United States Patent Application Publication US 2023/0087228 A1 - sequence listing, part 5

SEQ ID NO: 506 - DNA, 192087 bp, Artificial Sequence
  Synthetic Oligonucleotide
acaatgaaactgagaacggatatcctgtgagattcttggggacaccgctaacgccgactgaggaaccatcgaagtcaagaacggtgcctattgaagatgtttgccatgacacatgcgaagcgttgaaagcttgcgaatgagatcggcgtccgctgtaatcgatgagcgttgtcccgcccggtccttgaatagacgggacccacaagccagaaagacctctggagtgaggatgtcctacttgtctccaggttggcagggcggcttcaatcatcagctgaccgttttctcattgatgcacgccgagactgtgatactgttggaaccggcgttgtttttggcgtacagcttggcgtccttgatgccggcgggaaggacgaccgttgcaatggccgtgcctgctggcgccgcgtaggtgtccaggttcgccaggaaatccccgtcgctgtcgtcgttgggatactcgtccgatccgctgccgtccggatcgccgcacgtcgccaaaaggtagatgtccaccgtgtcaccgctggtcggcgtcccggcgttgtcggccttcagtgttaccgctcgggctatggccgtagccgaaagcccggcgaggtcggacgtctggttgccggccgccgacaccgatacggaatcggacgaactccattgaacttgcttttcggtattaccaaccgccatcgctgtttccttcctagatcgccaccatgttcgccatcacatcaagacagccgtccacgaccgctttgacctgttccgacgtcgggccttcgggtaaggtgtccaccatgtcgggatgactcatcaccaaggcgaaatagtcccgcgtcacctgttgccgatcgacaaagatggccttggccaacgcgaagcgtttttcgtggttgtccacccctgtcccttcgtacgcaatcgcccgggccgccgcgaccaaatggagcgcgaccaactcgaacgtcgtgcccttggggacaagggcgtcataacattgtttcgctgtcgccacagcgcaccgcctttcctagtcgagagagatgtcgaggtcgccgatcacgaagcggacggtatcgccgctggtgatcgttttcgagagcgtcagcgatccgtgggccagcatgttgccgccggtcaaggcatcgaacagggcgaagtgtgtcactgtgccccaatcgccggtggcggcggcgaactcgatggcggtggcgttgtcgagggacccgccgctggcggcgttccagtcggtgcctgtcgtcgctttccgcgcgtaggagccacccgacggctccgccaggccagcctcatcgtcaccggggtcagctgtagaaagacccacgtagatcgtcggcgggctgtaagcgcctttgccgaagaggtggtcgaggatctcgttttcccaatagtctgcaaagcttcccatcgcaggggtcctttcatcgtcaggcgtccttcaggtgttggccgagccgggaggaagggtcccgacccggcgcacctgtcacggcgtttttcgggtctatgtggtgatgttgctcagcaggtaaccgcagtcggcgctgatgaactcctcgtcggtctcgtgtcgggcgcgaatgacgttcccgcgcacgcggtcgtcgcgatagctctccatcacgcaattggacgggctgtcctcggtccagaggaacgtgcgacccaggcacggcgcttcgcccagcatgggcgaaccgtcggtcacgcagagcatggcatgctcgttgttccagatccccgtcagcgaggcgtcctggcccttcttggccgagttgtagagcccgtcaccgacgaccacctgatcgacaccgaaggccagggccagcaggtcggtcttgatgtcaccgcgtcgcacgctcgggttcgtgtacttgatgcggtcgacgatctcatcgcagaggccgagattcaggaaggtgctgtaggcgatcaccagcgtgttcggctcgatgcccacggcgtcgtggatggccaggcggccggccttgacgtcgtcgatcggggtggcgttctcgccgtcatcccattcgttggtgacagagtgggcggtgaagttggacgcgttgaagaccatatcggcgatgcgcttctcttgattgcgcaggacgatgcggcgggcgcgaatgccggccatcgtctcggcgttgaagtagctcttgtagagcttgacttccttgtcgtcgacgggctcctcgaagccgttctcgacggtggcataggtgtcccaatcccattcccaatcgctacgggcgtactcaccacgcgcagcgcgtcgggtctcgggaatcgagaacatcacttcggccgggatcacggggaactggccggtctgttcggcggcgcggaagatcggcaggacctgcaggccgataaaggcgttgcgccgatcgacggcctcctggacgacggtcgccaggcggggccgttgggctggacttgaaggacggggcatagtatctctcctatctgggtctctctgggtttcgggcgcaaaagaaaacggccgcaccgggggcttctggccccagtgcgaccgtttcttttgccttggcgtcgcttcgcaggtgcccctgctaggcgaaccctgtattcacttgtcgttgcggtcctacgaggccgcttgcagtccgacggtggcgagttggtcgagaatcgaatcgatcgctacgttgttggcgtcgatgccggccttcaacgccgcgagatccgcgacgatctgggcggcctgggcggcggtcatgtccgtcccggtgtccacaccggtcaggtccgtcgtcatcgacgcgcaggcggcggggtcggccacgtggggcagttgcgccaccggcgtctggctcagatccgcctcgggcaggatctcgatgacgtcggcgtcggccgtggcggcctcgacggtctcgccgaggcagagcgttccactggcggcgatttcgccgtcggcggcggcatacacagcggctgccgcactgatggcgccggccgcgacgatctcgaacgtcccgccggcattgaaaagtcggacggtgacatcttcgccggcgctggcggtgaactcggcgacgccgatgccgacatccgtagcgccggcggtcaccaccgtcgagccgctgagcttgacgcgggtatgggcggacacgccgccggtccccgttagaaaggtcttctttgagccttcgatcattggtctatcctttcgcagatagttctcgtgtcacttatgtcgagtgcaagccgccaacgtcgcgcggctactcttcggcgtcaccgtcgccggtcgggtcctcgtcgcctttggggtcggggtccacaagcggatcgggggccttggccttcttggccttcgccttgatcgagacctcgcggggcttcgccggcttggcgtcgcgcagatcccgcccgcactttcggcagttcttgcgcttgccgggtcgggccagaacgccgaattgaccacaggtgcaacgtactcgcattacagctctccttggttcgtctgggcgggtgctgctcgggtcgcctcagtcggttgcggttttagtgggcgtcacgctcggcctcgtagagcttgggatacagctcgacgcacttgtcgatcgcctggccctcggtggcgttgtgctcggccatgtaggccttgacggcggcgtcaaacgtcgccggcccttcggtggcctgggcgttcggggcctggcccggggtctgctcggcgaactcggtgaccgccggatcgacggccggggtcgcggtcgccggggcggcggactgcttcgaggcggcggccagttggctggccagacgctcgttgcgcagctggagcgcctgggtctcggtcttgccgtcggcgaagcaactgaccagcagctcggtgtcgtcgccgcaggcggtctgcagcgtcttgaaacgcgcccgctcggcttcggcgccgtcggcctggccggccttgaagacgtcggcatggacctcggcgaactcgctcttgagccgatcgacggtcagcgtctccggcatcgggtgggtggtctcgttgggcataatgtgctcctttacggaaaactgaacggttttgtcgttgtcaccgtcgtcgaacgcggtggccgaggtgcggccatcggcgccgaagacgcacatactgacttccttgatggtcgatttgcggaacaccgccccgggacctttgagcgtcttgccgttgacctcggtcgtctcaccctccttgacgtattcgacgctgcgcggcgggcagtacagggacgcctgcatcgggaagccctcgcccacgtcgttgcggaactcctgggcgcggtcgttgctgaggaactggccctcgaaggtgaccttctcggcgatcgcctgtttcgtcgcgaagcccaggcgccgatcggtgaagtgcgaatcaaggaccggcgttttcttgccggcgaacttcatgccgcccaggtcgaacgccaggttgccccaccaccaatgatcggggatgatctcgccggaatagccgacgatactgaaccggttgcccttgtctttgtcaccgtcgtcggcgaaggtgacggcgccctcgcgggcgaacgtacaggcctggcggggggcggcgttctcgttacttgctttgcgtcgcggcatcgtcggtctcctgtttgtcgtcggtctcgccggcctcggtttcggcctcgcgttcccgctgtcgctcttcgataaggtcgcgatagtccaggcccttgcgggcggtgatctgcgtgcgtgatgttgtcttgttctctagctcgatcttgtcggcctgggcctcgcggtaggggtccacgtacggccacttctggcagacgacctcgtgcgcgaacgcgtctttgcgatcgaggagctgattggcggcgatcttcctggccagccaccagcgatacatccggctgacggtcgggatcaccacgtgcacctgctcgcgggcaaaatgtttctgggcggccttgtaggcgatgcgggcgttcatgtaggtggcgcccgagaagtcgagcgtcaccagcatcagcgggaagcagatcgcccggccgatctcgatccgctggtctcgcacgaacggggcatacgccgccggcgggcgggacggggtcaccgcgttgatactctcgccggggcccagatgctcgatcatgcccggctcgatcttctgcatcttcgtgccgtcttcggtctcgcccgtgctgctggtgccctgggtgtaggcgctcggaatcccgaggccgtcctcgcgggtgatgaagatcgacatacacgcgttgacgtgtgcggcgaccagttcggcctcctggtagcgcttgagcatatcgatattttcgaccgctggcgtcagcgccggttcccctcgcgtggtgctgaatcggtcggggttgaagacgtgaatcacgtgctcggcttggtaatgctgccagtcctcggtctcgatgtagccccaggtgttgggtttgccgatgtaataaccgagcacgcggccggtcgccctctcggtcgccacgccgttggtgacggtgaacgtcttgccgaggtcgctgccgtagggcgtgccgcaccgctggccttcgcagacctgcaggccgatgtcggtcagaatcacaaagatgtcaccgtcccggcgataactcaaaaagagcttatagagcagctgctggaaattgaaccggccggtcagctcgcacggttgatcgagcatttcctctcgccagagggcttcggcctgtttgttccaggccttgctcttggtgcgggcctcgatgtgcgtctgggtgccgacgacctcgtcggcctccgagagcaacaggcccttgaccatcggattattgcgggcctggtcccggcagatctcgcgcatcatgcccagggccgactcggtcagatgcgcatccccggggccgcccagcccgctgcgctgggtgtggaggcgcgtgttcttgatggcgttataaccgaaccgggcagcggcgtcggccagcttggcccgggccaagtcctggcggcgcgaggcaaaccaccggggcgagacggccttggccaggccgtcgatcttcgagctgactcgatcgctaagcgtcatacgtgcgccacccttgtgcctttgtcgttacccttggcgatcttgcgcagtagccgctcctcgcggcggtacagcacacccagatcgtgcttggtgaacgactggttgcccacggtgtaggccgagacggtcccgcgctcgatggcggcgatcgccgtctggacccggtcgagttgtattgcatacgattctgccatattcgcagaatacagtggccgggcaggaggtgcacagagggccgttactacagattagtaacgactcgaaaagtttctaaagcccctaggatttcgggatttctcgatttgcagttcaatttccggcgtgtttctgccgataaacgtgatggaggcgggtcgaagaggcgtagtgcgaatgcccattgcaagtagtctggatcttggcgagcgactgttacggtgactagccggtaggggtgtttccctgaaattaccgagagtaacggactactcacggggacggagtgcgcccaccggcaagaagcagcgggcattcaggaacacaaaaggcgaggtgacaatgaattacaacctattggacgaaaagtggattccggtcctttatcgcaacgggaaatgggatcgcgttgggattcgtcaggcgttcaaggatgcgggctgcattcggcaaatcgcggcgagcaaccccatggatcgtgttgcgatcgtacgatttctgcttgcgctattgtattggtgtaaggggagtccaccagatgatgcgaacgcagaccttagtgattctcttccctctgactggttctcgaaactgcatgacaacagagataacttcaatctcttcggtgaagggaagaggttctaccaatgcgcttcctcgggaaatgtgaactcccctgcaagactcgcggcggactatcttatccatgagatccccacaggtacgaacaaatggcactttcgccatgcgaccgacaaggtcgatggcttgtgtccggggtgttgtgccatgggtctgttgaggctgccgctcttttcaacatctggaggccgtggcaagccgcctggggttaactcgaaaccgccggtttatgccgtaccggtgggtgtttcactcgcggagactctatggttctcgtggcagcaagcatcgagattgggaacaccagcgtgggaagagccggatttgcagctcccgacaataggtgaggttcctctgctcatgggattgacgtggttgccgcgacgggtgtggctgggcaatgccgaggagcccgaagccgcctgtatctcatgtggacgcaaggagcgactggttcgactcagcgtgtttgctggcatagggagcactaagacaactgaaggtcgtcccaggcgaatctggcgtgacccacacgttctctatgttgcttctccgaaaggcgaagtgatatcgcaccatgcaagtgatgcccttggtgccgccgatgcggcagccgatcaatgggcaaaaaccatgaccagaatgctccaatctagcgcgatcggcagtgaaagtgttcgtgtctgggtagtcggcttctccacagttcagaacgacaagtatctggaggctgcagagtacgaggtgtcgttccagtgttcaccaagtcgtgttcgggagagtattgagagaatggaacaatggcaaaaacaggggtatgggctaaagaggcggatagccaggtcgaaggtcgagggttcagccttcgtttcagtcattcgcccccatgtggaaaagagagtttccacaaaagccggtgatctaattgccgggggggatgaggtgtggcaacaggcggcggcggaataccacccgcttatgaagttgatcgccacgtcgctatctcccggtttcacgacggcagcggttcaacggcgactacacattaccagggtggctccggatatgcggcccaaaacaaaaacaatcaagaaggcgggccggaagaagggaggagccaagtgagcgcagcagagcagtacattgatactttgacaaagctcaaggtggggcaacttggattgctgcgcacccatgcgggacaggggctcgatgaatcagttgatggattcgacctctttgctggattgtggtggccgttgcgacgacagaagggcgggcctccacctcgccgtgaagtggcttggctggttgccaagctttacgccttttgtccgattccacattcacccggcagcacgattgctcgccaattgtgtcactgccagccagccaagagccccgaaagggaacgattccagcagaaattcgaccgtatggtcaccctgtcgcttgagcaactcgaaccggctcttcaatgggctctcaaccaagtcgcctcaaacagggaggggcttgattgggtgcagctcacggacgatctttcaaactggcaccgcgaaggcaaacgcctgtcgtgggcgagacaattcattccggacacggaaagggacccctcatgttgatccagatacatgctattcagaaccacagccccgccaatctcaatcgagatgacttgggagcacccaagacatgctatttcggcggcgttctgcgatcgcgtatctctagtcagtgcatcaaacgaagcatccgaactagtgaagcatttaagtctctgtgtggcgggattcgtacgcgacaattggcacggctcattgctgagaacatcaaaggcggagccagtgcgcagaagcgagcagccaagattctcaagaaatgtggcatcaatgccaaggatgacgaaaagagcgatatgcttgtttacacaacgggggaggcgattcagaggatggccgtatgcttgcaggacggtgacaagaagaccgatgacgaattggcagcagtgtttggaacgctcatcagtgaacaggtagccgtgccggacatggcgcttagcggcagaatgctcgaaaccggtgttctgaaagataccacggtcgacgcagcgttgcaggtggcccacgccatctcgacgcatgaggcccggcctgaagtggattactatgttgcgacggatgacattcccggggccgatgccggcgcgggttacgtggatgaagccatgtttgcctctgcctgtttctataagtactcttcgattcactgggagacactcgtcgacaatctcgatggcttcgacggcaatacggagtatctagcagcccatacggttggcgcattcatccgtggagcggcgaggaccaacccgacgggcaagcagaacagtttcgctgctcataacgctcccgatgggatgttgatagaaatcgggaacactcccatcagctacgccaacgcgttcgccaagccagcagtccaaggcgagcgtgacatgatcgcccagagcatcgcccagctcggtcaatatgttcgcgacctggacatgggatatggccctccgaagaaacgcttctggttttcgcccaatctccgctatcgcttgaccacgcaagttacagaagaggagaacggcaagaagaaacggagtgaggtctcgttgacgaatgatgagtactcattcaagtctctcaacgaactgatcgccgccgtgattaggagccttggtcatgattgggatgccgtccagacggttgtcgtgaatccagaggtagcctcatgagtacgaatactctcttcctgcgccttgaagggccgttacaagcgtggggcaatcaggagtcgaagttcgtcatccgacggacggccgaggctccgaccaaatctggactgatcgggatgctctgcgcggcattgggtgtttcccgtcccgatgccgccggcgagtggcttccaagactcggtggcctgcgcatgggggtacgcatcgacgcgccgggtctccgctggtgggactatcacaccgtcggtgccaagatgcagatgcgtacagccgaaggtaagcacaaagatggcccgattctcacccggcgtgagtacctgtgcgatgcttcatttctcgctgcacttcagggtgaaccgtcgctggttgtcgaactggcgcaagcgatgaagaacccgaaatggaccctctatctagggcgcaagtcctgtccgccgtcccgtctgttgatggagcatccgccgggccttttccccgatttgctttctgcgttgatatcgattccttggcggcgacggctcaaggctgacgagccacggcgtactgcggattgcctcctcgactggcaaccgtcggacgaacagcccgaagcgcccgacgatgcgcttatctggtacgatgtgccgttgacgtttgagccaccagcgcatcacccacgctttgttattcggcacaaactgcgcgtgggtccgggaggtgaggtctccatcgcaaaacaaggcacgcaaagccccactccaggaccgcttcgcccgcgcgctgactatggcaacaccaaatacaggaagatccgacaagagcggcttgaccgcgatcatcagttatgtgttttttgtaagtcgcctgcaaccacggttcagcatgtcacgtatcgccatgctggtggagaggaacgtattgaagagttgcggtccctttgccgcctttgccatgatgccgtgacgatgatcgaatacggcttgggcatgggcctggatcggatcaacccagaagagcagcgatggcgggatcggatcatccagaaacgagaggagatcatcaagtttcgctcgcttgaaacgcgtcggcgtaaactcagcgccgaggaggtcgaatgatgtacctgtcccaccttatgatcgatgttggaaacaatcctgatcgaccccggcctggacggcgatggttgcgaaatgcttaccgcgttcaccagcgactttgcatggcgtttccatcgaaggaacgcccaaagaaggaagccgacccggagtttctgatgccatattcacccgacgacttccctgaagcccggcacatcgcagaccagaaggcagcacaggttggttccgaagcactgcgtcatgtacacacaccgcgcgattccagcagcggtttcctgtttcgaatagaccccttgccagactcatcagtatcgattctggttctgtcggccgtcaaaccggattgggactatgcttttcataatgccgcttatctcttggcagcgcccccctccaagccgcgttccatggaactggccatcgcaacgggcagtcagtttcacttccgtctgacagccaatcccgtccggaaagttgcgaccattccaagaaggtgccgggaacggccggatcaaccgggtcgccacgggcgacgtgttccagtaccgtcggaagacttcggaaagtggctggtggcgcgcggtgagatacatggctttcggcttttcgaaccgcttgaggagactcttcgcactcagcccggatacgtttatgtcgccaagggccgcgacaccggtaaggggcagcggttacggagtgtgcgttacgatggtcttctcgaagttgtcgatgtggagcggtttcgcaaggcgttgctctcaggcatcgggagcgccaaggccttcggcttcggactgttatccatcgcgccggtgaatcgatgaccaagttgtgcggctacggcaaaggagagattgcactcatcgaataacgctctttggtgtccagtacgaagggattctggaagtgacggatacgcagaagttctttcggacgctctgctctggcattggcccggctaaaggactgggcatgggtctgctaagcattgcaccggcttaggagattcaatggctgacttgcatgaactgccgaagtttgaggatcgctggactcatctgtacttggagcatggcggtctggacaaggacaaagagggcctggtcttccggcaaggggaaggtcgcaccctgattccgatcgaccaactttcactggtcatgttgggacccggaacctctgtcactcagcaggccgccaaggcgctggccgcgaacaactgcctgatgtgcttcgtcggcgaacagggtgtgaagatgtatgcctttggaacgggagggacacacagcgcccgccgactgctgcgacaagcagaactgtatgcctctcctgaacagcgagagcgcgtcgcccggcggatgtatctgaaacggtttcctccaccaatcccggcagatgtgaccatacagcagctccggggcatggaaggagcccgagtgcgcaaaacgtacgagcagatggctcaagactggggagtgaagtgggaaggccgcaactacgatcaaaacagttggtacactgccgaccccttgaacagagcaatgtcttcggccaatgcctgcctttacagcttgtgtcacgccgccattctctctgccggttacagtcctgccatcggcttcattcatacaggcaaagtactgagcttcgtgtacgacgtggcggatctctacaaaacggagatctccgtcccgctggccttccaggtagccgctgactccagcgagcatgtggaaagaagggcgagactggcctgtcgggatgctttcaagcaaacgaaattgatacggcgtatcttgcccgatattgcggaggtgctcgatgctcgtgatgatcttggaaaaggtgccgacgagtctgaagggcgagctatctcgctggctgatcgagcccaaggctggggttttccttggaagtccgacggccagaatacgggataagctgtggcagaaggccgtcaagaaacgtaaacggggatacatcctgcaaatatggtctgattccagcccacaggggtacagtttccgttccgagggcgagtcttttcgccaaatggttgacttcgagggcattgcccttgtggcccgcgtgggcaagggctagttcgagtgagtcccaacatattgcggttaggcaattggtggcatacaatgccgtggtattgtccccacgcacgtgggggtgaaccggcaaaacgtttcatcgcgttgtctgcaatctcattgtccccacgcacgtgggggtgaaccgggcgtgaggtcggccggacgatacccttcaagtattgtccccacgcacgtgggggtgaaccgcgataaaacagaaaacccaccctatcgtatccattgtccccacgcacgtgggggtgaaccgatagggaacgaagagatggcattgacgcgacgattgtccccacgcacgtgggggtgaaccgtaaggttgatctgtgcaagcttgtccgtaacaattgtccccacgcacgtgggggtgaaccgctagaggctcacgacagaaagggccaccgaggattgtccccacgcacgtgggggtgaaccggagccgaggcgtcgatcgtcccccagacggtaattgtccccacgcacgtgggggtgaaccgccgaccgcctgcccgcctccgtcgcccgagccattgtccccacgcacgtgggggtgaaccggccacgtaaagcccttgtatatctatggttgcattgtccccacgcacgtgggggtgaaccgacgacgcactacgccatcactggggcgattaccattgtccccacgcacgtgggggtgaaccgatccaggggccaatacacacaatcctgattttattgtccccacgcacgtgggggtgaaccgcattcccttccaccgtaatcgcgggcgtcatcattgtccccacgcacgtgggggtgaaccgaacagtgtgcggaatgactacattgcgtgggtcattgtccccacgcacgtgggggtgaaccggacatcttccccgctggtatgacgggcgtgacgattgtccccacgcacgtgggggtgaaccgatggcgattgaattcggcataacccccgtgtcattgtccccacgcacgtgggggtgaaccgtaacgcccaagcaagtccaggtcgttctggatgattgtccccacgcacgtgggggtgaaccgtaccatgggcgcttttctcctttattcattgttattgtccccacgcacgtgggggtgaacccgcatccgacgaattggacagaaaagcaaacatattgtccccacgcacgtgggggtgaaccgccatcgcagacttgacccgcgaagaggtacggattgtccccacgcacgtgggggtgaaccgagagcaggggagcggggcgtgatggttcgtgaattgtccccacgcacgtgggggtgaaccaatcgtatatatcgccgcttctacgctcatgcgattgtccccacgcacgtgggggtgaaccgacaagatacaaacgtggaatggcttcacgtggattgtccccacgcacgtgggggtgaaccgtagtaggtgccgcgaaagatcaccgtgccgctcattgtccccacgcacgtgggggtgaaccgtgctgcatcgtggtacaagcactaagcctcgcattgtccccacgcacgtgggggtgaaccgcacagcgaaattcaggatattcgcagccttgacattgtccccacgcacgtgggggtgaaccgccggccgaccagaagggcgagaagatcgtgatcattgtccccacgcacgtgggggtgaaccgattgctaaattcagattttagcgcccatgatcattgtccccacgcacgtgggggtgaaccggtgggccgggggactaactgaaaggaccaaccattgtccccacgcacgtgggggtgaaccgacagagtcatcataacagccgacctggccagtatagtccccacgcacgtgggggtgaaccgggagacgggaaacttgatgaagaactctggtcattgtccccacgcacgtgggggtgaaccggcggctgccaggctagacatcctcggactcctggtttggcttgtagttgacctcgacgctcttgaacgtcctgccgcagtcttggcagcgatggtaacggacgggcacatggttgctgtcgtagaccgggcaatgcgtcgaaccacacgcgggacagcggacgcgcatgaagggcacgaagtctgggttagctcggcggcgtggttgccgaggccgctcacctggtgttccaagttccggtaagtcgtccaggaagcccgtcattgcgataacctcggcagcccctgcagaaagcccttgttctgttggtcgctacggtcgcttcgtttcgcgggcgctgccggcatcggcggcgcgacgagtgcctccaggaggccgacgccgaccagttcggccgccgccgtcgcgtagaccaggcagtcccagaggtggttgtcgccgccgccggcgcgcttgacccatcggatctctttccgttcgcccttgatgaccgcctcctgttcttcgctgcagagatggttcttgacttcctggctcgtctcgccgtgcaggtgcatgtagccggggccgggaacctcggcttcgaacagcaggcggaacaggcggttcttgatctcatcgacgttcagatcgtaccgagcgacgatcttatcgatcgggctcttccgatagatccgagccttgacccgatcgtcgccgcgcacggggatcgcacgcaagtgggcgttctggcgacagaagttgatcacgacgtcgtactcgtaaccgcaatcgacgcccgtcatcgcggtcggcagcagcagattgcgatcgtgcgaaaacggccagggccgcgcgatcaattgacggacccggccgaagttctctaattccttggtcgcgccggtctcgatgcgcccctcatcgagcagccacgcctcgaacagatagccccagccgacgaccgcgtaccagatgtgatcgagctgcacgtcgatcccgatcgtgatcgcctggacgcccggcgggatcagaccgcgctcgtagctgccgatgtgcggatcgagcttggattcctccggttccttctcgcggaaccgccaggcccgggccatctccgaacggctccagtgttgcagcggccgaaagttcccttccttcagcgacgtttgggcccggacgtacttggccgccagctggccgatcgactggaaacgcgggttgaccatgaacgccgagatccggtaactgcgccgcgcggtctcgggcaactcgcccaggatgtcaccaccgctgttgaccgtgcagccatgcggggcccaccgcccggcggtgatcgcctcgtgacggtcccgctcgctccagaccgccccgcactcggggcagacgtaccgtgcgcggtcgcctttctcgtagacctccggatcgaggaagcggccggtgaggctcttatcgaggaccatatgcctgtcgtcaaacgtatggtgttcgctgcagtgggggcactgggggtgaaactgccgcttgtcgccggcctcgtattcgcggtcggccaggtcgccctcatcgaccgggctggtggtcttaatcaaggtcgcgcgatggccgaaggtgcgcaaccgatcgcgcagcagattcaaagggtccgcctccttgccgacggccggcgggaatttaccgatctcatcggccaggatccgcgcgaccgggacgtcggccagttgcgctgcgctccgcgcccaggcgagatagaggttcatctggtccatcaccgttgcctcgccgatgtgcaggttctccagccgcccgccaatcgctttcaggaggaacgggttggcctcgaagatcggccgcacgcgggcggcgatacgacgcttgaccgtcgattcgtccggcatgacgatcatcgtatggacgggatcgacggcgatcgtataggccaggaccaggtaactgatcagcgtcttgcccgcctgggtgcaggcgtagatggtcacctcggagacggccgggtcgacgcaggcctcggcgatctcacgcaggaagggcgagaagtaaaacgagaacaggccgggcgccgtcgtctccttggccggcaggaacagattcgcctccgcccagtcgcagatcggcgccctcggcggcggcacccacaattcctgctcgcgcggcaggacctccagcgatgggccgagcagttcaaccatcgcgctcctcccgttcgcccagggccgctgcaggcggcgtttcgagccggcccaggaaggccttgaactcggcggccgtcgcctcatcgagacgcagttcggtcgggacctcagtcatctgctctcgcaggccttcgacaaaccgacgcaaccgctgctcgatcgcggcggcggccttgccttcgcagtcggcggccgtcgccggcagatggttctcgacgtaggccagcagattctgcacgcgggcgaccaggccgttctcgaccgcctggcgatcgagaacgtgggcctgggccttccggtagtcgagttccttcatcgctgcgttggcgacgcggaggcggtcctcgcgcttgccgctcttggcctgggccttggtcgcggcctcgaaccagcggacgaactcgctgaggttataggtgcagtcgggattgcggggcaggccggcgtcccgggtccaggcggccagggtctggcggaccttgccggtgatggcctccatcaccttgatcgggacatgctcgtaatcgaagccggtcgggctcttctcgctgcggaggaagttctcgacgtagcgcatggcgttgggcttgccggcgccggcctgctcgaccatcacggcgttgagcttcatgcgcagttgacggcggttttcattccacaggtcggcgacctcggtgtcggtatcgagcagttgccgcagctccggaccggtgacgcccatctccttggccgccgccgagacggtgacggtcgtcgcggccagttgcgagaccttgcgcagcagccgaccccgctcccaggcggcccggacgttgtcgcgtttggcgatcagggcaaccagatcaccgggcccgctgaacagcaccgccgcctcggtcaggttctcgcactccaggcccaggtgccgcacctcggccagcgagaccgtccggcggcgtttcccgtccgccggcggggtgcggggcttctttttcgtcttttttctggccatttcgtaccgcttcagttcctcaacctcggcgcgagacagcggctgattctgccggaccttgcccagcagatacgcgtgacgctgcttctgcgcgatctcaatcgccgatacctcgtgactcaatccttcctactttccccaccagtcgttacaatgcttcgctctttcatggcgacgcgcgcaagtcgtcggcagtggcagctgccggcggggcggttcgaccaccagtcaccgcccgcgtcgccgtctcttttctcgcaccgctttgcgcccggtccacgtctcccagcgcttgaccgccacgtcgacgaacagcggctgctgctcgatcgcgtagcagcggcgcccgagcttctcggccgcgacgatctgcgtgcctgaaccgctgaacggctcgtagcagatgtcaccgggccgggtgtggattcgcatcgggatcgcaaagcactccaccggcttgatcgtcggatggcccagggccggcgcgcgtttcttgccgtcccagcccagctcccagacgtcgctgtaatactccggcgtcgtcggatcgcccgctttctgataacccaccgaccagacggccgtcagcttgttggtgtccgatcgctgccggccgtcgatggcgggcttttgtttcttcacccagatcagcaggcacggctcgtgacgcagggcgtagtaacagaagctcaacacgcaaatcggtttgacccagatgatgttctgatggatgtgcagaccgagttcactacagacctgctcgatgtcggtgcggcgacgatcggcgtgccaaaggtacagggctgtcccttcctggatgacctcgaggccgcacctggtgaaatcccgcatgaaggtaagggcgtcggtgatctcacgctcacggaactgatccgaccaatccttgccgcctttgccgggccggttggtgccggtgtagtcgatgcagtagggtggatcggtggcaaagagcctggccgtctcgccggccatcagtcgtgtcacgtcctcgggtttggtgctgtcaccgcagagcaggcggtgctcgccgagtaaccagaggtccccatcttgcgtgatggccgtctccggcggcgcgggcatctcgtcgtcgggggcctggccctgcttttccgaaggtttttggatctcgctgtagagggcgtcgacaccgaggtcggccagggcggtccggtcgcccagttcgtcacggagctgctcgatatagccgtccagttcggcggtgaaccggccctggatgtgagggttgttcagcgtcaggttcagcagcttttcctcggcggccgaacaggagacggtgacacacaatacccgatcgacgccgcgcgcgccgagcacggccaggcgctgatggcctccgacgacgcgacgcttgccgccccggacgttcaccacgatcggctcgacacagccgaaccgctcgatggacgcggccaggccggccagggccgactcggaaatcacgcgggggttgtactcggcgctctgcagctcggccaattgaaacgtcgctaccttcggaacggcgatggtttttgatgacttcacggtgttgactctcctcaggccgggaccttgagacgctcgaaggcgccggcgtggcatttgggacattgttcgggcggcttcctcgctcgacaccgaggccggctcagccgtaaaagtgcctgtttggtccatctgtaacccctttatttgcagtgcgttatgtatgtaaaaccaaaaaaataaatcccaaagtagccgaacctcgcgatcccgcgaccgctcggcgtctattccggaggaggacccaccagatataaaccctgtctgcgcaatcgtttacacgcggcctgttgggcagtgatcttggtggcattaaaggcgacagtgtcactctgtttctctctcgatcggttcgatgcggtttaacatcgctcacagattcccgctcccggccttggccagcaggctgtcccagatccggcagaacatcgcccccggcctcttgagccggggcttcttgctcgtgtggtgcttgcgagcctggcggcgggcctcgccccacagcgtcgcggcgatcggcggtggcagggcggcccgctcggccttcgtccagcaggcggcgaacgtgcccagctctcgggccttctgggtgcgcaggtaggccaggcccaggtcctcgtagatcgcagcggcgaactccttggcggcgtcgctgtatcgctgctcgaagccctcgggttctgctggcggcccggtcccatcgagcacctggccgatgcgtgccagttcgccggcgattagcgaccccggggggcctttggcctgcgtcggcctgtcggccccccgagcgtcgacttcggtcgcccctggtggtgggtgtgcggctgctctgtccccttgagcgtcggcttcggtcggcacagtcggcgtcggcgtcggcgataacggcggggtggtggtcggggatgtggtggttcctgcttggcttgggggttgcccttggtccttgccggtcacttggtcttgccctgggctttcggctggtcccttcggcgtttcggttcggcttgccttgggtttcggattgggcttgggattctgtttgccgtttacttctttctttttctttccattgcccttgccgttgccgttcccttcccttttcaaagggctccggatttctccggatttttccgcagaccccgccgtgcccggcttctcgttgaccgagaggtcaaagtcgggcatttcgacgcgttcgatcagaccgaccgcttccagccgtttgaggaccttgcgggcctcgggcgtcttgacgttcagcacgtcgcagatatcggcgatccccgccggcgcccgcttgccgttgagcaggtagccccggtaggcgcggctccgatcggccgcctcattgcgcagggcgatgaacgccccatgcaaggccaggtggttgtcgtagcgcttcagcgcccgcagctgcaggcagtagtccttggcgctgtcgtcgttgttgctgaccgcctcgcgacagaacagcagcgggcccttgcgacaggcccgcgcatcttcgctcagctcgaagcggtcctcaaactcgtatatgtgccataccttcgggcgtttcccactcggcattcaagccctccgtggctagcggttctctctgatgcgcccggcctaagcggccttgccttcgccggcggcggccctctcggtctcggagacgacggcctcgtcgcaccaggcctgcagatccagcttgagcatctcggcgatcagctgtattaccgcccggtcctcttcgctgccactgggcggggcgcagtcgagcccctcggtcgcctggccccagagccgcttcagcacgacgtcgaggacgttcgacgggccttgcttgcgggccttctcgatcgcttggcgatagtccgccatcccgtcgtatccgaactgggcatcggtcgcgtagaacgtcgccaccagcgggacgatcgtcagcttgttatccggcagatccgcatacgccagatccatcaggtgctgcgcgaaccgattggccacgaagtcccaccgcgcccgctcggcggaggccttctgctcggcggccgagggcttgcgtgccttctggctggccagtgtcggcgtcttcttgaccttgacgtagcggaccttgcccttgtcccgcccggcgacgatcagcgcgggcgtcgcccctttgtccttcttcttgcagatcgtcacgtcgcccttgctcagaaccttgccataacagcgtttcagcttcgtggcgttctcattgacgaaactcgcgttgctgagaaggaccaggccgtcgtatttctgccgcatcgccgcgacctggcgtttcgccgccgaggcctcgcgcttggcccaacacttcgggtccagacaccgatcgcccggcttgatcgtggtcgtcaccgttacgcctccatcggccgatttcattgtttgcggtgcgtcccacagcagcggctggcagctggtccgcttggtgcacgtgacgcacttgctctcgctactcgtatcgaacggcgctttgcccagcagcttctgctcgtcggcggtctgtttttccagctcctcgacggtccagtcggcgcagtgactccagggccagttccccttcttgagcttgccgtgccaggcctcttgcacattggccgggaaccgcgcgatcgccgccaggtggccggccccccagccggtcaatccgccgggcgccatctcgccgcgccagcagtcggccagctgttcgtgaacggccgcccgcagcgccacccagcgcggggtctgtcccatcagtacgccggccgccttggcattcccttggcacttggccagagccgtggccgccgcctggccctgttccagcggcgtcaagtcctcgcggttggcgttttcgatgaaggcgatacggaacgccgcctcgtcatccatcgccccgtaatcgatcaccgggacctcggggcacttggccgccagggcggcgcgatgtcgccgatggccggccaggatctcgaacttgtccttgcggctcgggtgggtccgcacctgcagcggctgttggacgccgagcttgcgaaccgactcgataagtgcgatgaacgcgggatctttctcgttgatcgttctcgggttgtccgggttcggtaccagccgcttcggcggcaattgttccagcttcataactgtcctttcaagtttcatcgtccgtgacttacaattcgtgaaaagggcaggcacggaggccagcccctactaatccccgccaccgtggcaatcgacgccgtcggggtccttgtgtttgcgcagcacgttgcggccgttgagcttgcgataggcgacctcgcgcccgcactcgttgcagatcaccttgcccagccaggtggtcgtgtccttgcccgcctcggccgccggcttcggcttgaccttgcgcgcggccgttcggtcgatcacggcgttgcgatcgaccacgatctcgccgtcttcccattcggccttgtagcgcgtcaccatcgacggcagtaggctgaaatggcgcagcgccccggcgccgctgattcggaacgcctggcccggccgcgtcttcgaggcccaggccagcgccccgacctcctggcgcgacgtcggccgtaggattatcgcgttggcctccttacagaatccgacccgacagccgtcggtctcttttagattgatcccctcggccagttcgacactgacactgatcgtgccgctaggcgtcagcgtgacaaaccgccccttcgccacccggttggtgtcgccggtgtaaaactcggtctctcgcttgtccttcttcgccatgattatccttcctgtttgcacggttgcacctggcggcgtcgccattcgtcgagccagacgaggtcttctgctgaattgttcgggcactgttccggctcgaccgccaggcactggcccggctcgcccggctcccaaagatcgcacggccgctggcagtactcgcagagcgccgggtcactcatcgtcccgcccccatgcgcttgcgcaccttgttcggcacccagacccgcaccggttcgccccgacgccgtcgccgccgtttgcgtttcggcttcgtcgcggtcgcgcggccgtcggtcttgcgcaaggcccgcccgcgcgtcaataagtcactcagtcgcatcggtccctcctttcgggtccaatttgtcgagcactttcaacacgcgcaggcgggccccagcctgactaaggcccggcccgtcgagatcctcgcagatgattcccttcctcatcggctcacctcacggatgtcggtgttcgtgtagggaataggcccgtcggccaggtattgggccaggtcgaccttgacggtgtaggtcttgccgaacttctcgcagagcacgacggccttgaccgcgtaggcctgccagtcgatggccgcttcgcgctctttgtcgtgattgagcttaccgagcatgaaatggtcgacgtggtcggccgcccgtatgatcagctccagcgattgggtcgggtcaatgaccggctccatcgatgcccaggtgaagatcccggccgccttggcatgcgccagggccttaatgcgactgtgaggtgacgcggcgtgcggttcgtgttctcggcacaggtcgtcatcggagaacgtcagcgaggccccgaaggcgtcacgcgggccgtagaggtggaagtcacgcgtcgcgcggagcccgcccttggtcaggatcgtaaacggcacatcgttgtcgcgcaggatcgtgatggccttcttcgtgacgcgctgctcgaaggcggggccctgatacggatcgcaggtaaagcacaacagcacgcgcttgttcgtctcggccaaggccggggcttgtcgcttcagccccgcgatcacgccgtcccgcggtccgcatttggcgatgaagacttcgcgactcttgtgcaacgtcgccggcccgtagcagtagtcacagccatgccggcagcccttaaacaggttggcggccaggtggctgtattcccccgcccggcccttcggttcgtagatcacttgcattgactcgctcccttccaattccaatgagggcgggcacgggggcaccgcccctacacgtttacacccttcgcactcttgtgacgctgaatccggccgtcagcaggcccagcggccagagccagccgaggatcgggtgatggttcgccggcggtttgccgtcgatgcagacggtgtaatagcccgtcttggcctcggcgtacggtgggtcatcggtgatactgacgtagatgtactgcggacccggcaggacctcaccggccagcgtccaggtcccggtgttcgggtcggatgtcaccgaccagcccggcgtgcggctggccacggtgtaccggtggccgtcgggatcgcaggccgggccctggcgaaacagcttgcccgtcggcacggtgtaggcgacagcaccgctgagcgtgtcgatcaccgccggcaggacgagcccctcgatcagattcggatcggcccagggcggcctctcgtagtggatctgctcgcaaggcggcgcgttcggctcgtcggccacaactaccagcgtcgtggcctggccgatcgagcagagggccagcagcaataaaccggttcttcgcttcatgtccgctcctttcgttgctcgtcgaacttgtccgccttgcgcgccagatagcccataatgcccgccgccccgaagcaccagcagaacgactcgatccacgaaggggagataacggcgaatccgtacaagcccagtgagacaatgcccaagaacagattcatggttgcccctttcgccagcggtagccggccgcccaggcccgatcgaaatagccctggacctcgtcgtagatatcccggccgccgaggtgctcgggctggaggtattggtcgtagagcccgagccggccggtgacgtggaacggagtcaccggccaaaggcccttgaagcaccaggcaacggcgtcgtcgtagatctcgcagcgggccgcttgctcgtcggcccgggtcatcagacggcatcgggccagcagcgtcaccgccagggccttacccaacggcagcggcgtggtctcggccctctcgaagcgcgggtcgggcttctgcgatgagacgatcaggatcggcccgcgccagtcggtcgccttggtccgcgtctcgatcgtcttgttaccgtcggcgatccaggaggcccacggttgtttgacagacagtgccggcaggatcatggttcgtacctccgcaggtgcagcgtcgttagcgttcggcaggtccaggcccgccaggtgtccaggtccatccagacgtcacagtcctcggcgagtgcatcatggtcgacgtcggccagggccttctgctcgacggccaggtaaaccggctcagcgccccagaacttcatgtaaccgatcacctcgccggcgcggccgccgctcgattcgacaatctcgtagacgtcactctgcatggctcagccgttcttgagggtcttgacgttgttggcggtggttgtgccctggcggtccttcagcaccgcgatcgcggcggcctcgtcggtgatctggggcgagtcgagcagcgagtcgaccgaatggatcacgttgaccaggtccttgcccagcgctgtggcggcctgcgactttttccaggccaggtaggcgccgccggcggcggtgatcaggctgccggccaggccgacatagacgccgtagggcgccgggacgtgcgatccgaccgtggtgatccccttgccgagcagctcgatctcgtcgccgatcccctcgaccgggccggcgttggccagcacccgctcccagtcggtcagcacgtcatcgacctttcccttgactccccgggccacggtcagcttttcctgggccaccacgacggcggccgcaatcttctcgatttcctcggcgggcagattcgggtcggccagggccgcctggctcttggtcaggaacgcttcgagctggtcgacgaccatttcgacctgctcgcttttctgctgggccacggcgacggcctgctcggtcgccgcgatccgctcggggctgtccatattgcagccgccgatcgggatcagccaggtcaacgcggcgatgatgcagagtgtcttgattcgcatgtgcttcctttcgctaaaatgtgggttcaaacggttcgggccagtgccgacagaggtgacatccctcggggcactggccgctctcggtcttcagggggcagggcggcgtttcggggtgggccatttcagacgacccccagactcgctcgccgctcaacggctccttttgggtggtgatgtgcatggtacccttccttctgctcttgcctggccgccttcagttgccggttgaagcgttcgatgcgggcgatcgtctctggcgtcggcggcacccagcattcgtagagcgtgacctggctaaagtaacgcgacgccgcccggcgccgcaggcccgcgatcgccgcttcataggccgccccgatcttcgtgcggatcggccagaaatagggccgcagctcggcgtgctgggtgaccgcgaccagctcaaaacgccagacgccgcgattgcgccagccctggccgtcgacgcgagccgcctgatcaaagaacaaccccggaaatggcccctcttcgtcatacgcctcaatgatccgcaccgccatcgggcagctcctcgaacaggtcggcgtgctcggtctcgacgcgcagctcgacgatggcgtgcttctcgcgaaccaagaactccagctcggccaggcgatcgtcgggcaccacgacgtcttggaatgtcaacgtgcaatccttgaccacgccgaacatggagatcggcttgatctcggagtgttccttgtcgggcaccagtagcagggcgacgggtctctcgcgggccttgctcttgagcaggaacgccgactcgctcggatcgatcgagagtttgacgacgccgctcttgacggtgcggtcctcgaccgaagccgggcaggtgaatttgagtttacgcgtcttggccatagccttcctttcctgggtagagtggatgaatcaatagcgggggccggactcgaaccggcgacctttcgggaatgaaccgaccgcgctaaccaactgcgccaccccgcgatcaagccgtgatatttgtatgccccccacggccaggggcctccgttggcgcttgggcaggcaaaagaggcgggccccggcaacgacccatggaaccggggcccaaccacaacaaaaggacagggggaagtgaacgggttcgggcgggcctttcacccgcccggcgggacagttgcagcggcaagctcccgctatgaccaggggccctcggtcgcgacgatccgccgttgtgtcgcaacgtcatggggccagtcgaaagtaattatcgagaagaacagagggcccggggggagaggtggttttgagagcccgccgactacctggtcgggccgctctgtcgaagaatgtcacgccgccgtgtcaagagtgtggcaaaaaactcttggtctcaggggtgaaagctgctagaatacggccttgagagcacgttaagaccgtttataacctggagtaccgagcttccaagctgattacgcgggttcgattcccgccacccgcttttttccccgcgctgtttgcaataggctccctatcgacccatttgccgggcgggttttcggtttttcctctgttcggcccatccagagcctatccttagtcatctccagaggtatgagcaaccacgcggcgcaaggccatgcacctgccgtccgtctgatctgcgcctggtatttgagcccactcgttcccaaaagggggcgagtttggacgtggaatctacagccagatttgacttctccgcccttggcacgcgtggaattgcagatatggctccggatgggtctgggagtgacactgtcttggctggtgacagagccggcaggaggtggtgacgagtgggtggaagtgggacccggtgacggactcgggaccagcggtctctcgatccccgccgccggggcgagactttccaagggggttcacgattccgtgttatagggcaaagcaggggtagcggtttcgtaaatgcctttaacggttgcagttaagttgctactccgtgacggtcctataaacaatcgccccaaaaaaacgacaaaatgcatttttggaggttgacgaagtgggtgtgagtggggataattcccaaacgctttgtgttgagtggggcaattgccatgcttttactaaccggtgaataccagcacgttgtagacggcaaaggaagagtgctcgtctccaacaagcttcgaagccagatcgacgtcgatgagcatggtcgtaacttctacctcgttctcggggccaacggtgtgttgtgcctgtaccccgagaagtactttgagcagatcgttctggccgtggcccctggggcgacggctccggatgaagcggtggcgttcgaacgcatcagcttcgccttggccagcaagatcgaattggacggtcagggccgcctgttgatcggcgagaagctgcgtaagcgggccgggctggcggacgacatcaccctggtcggtgtcagggaccacattgagttgtggaacaatgaagattgggaacgctatctgtcggatcatatgggtcagtaccagaaacagatgacgcaggcccggcagcttgttttgcagaagcaacagaaggaattataaacgctgcgttggaggcaatggacagggatggatagttgctattgtcaggttgtcgccgggactctggcaggggaacggccgatggacgagcatacgcacgcctcggtggcgattctgggcgagcgtttggagcgtctcaaagagcacggtgggctcttcgccggcatcgagttctcaccgcatgtccagcgattgcgacaacgctctgagccggtatcgataggctgaaagggcgtgcaaagttcaggagtgaatcgctcagaagttgaacacgttccggtactttcggaacctttggccgaacagataaacttaccccaggatggggtgatggtcgatgtgaccgtgggacacggaggtcacagttttctgttcggtcagaagctgggtccgcaaggcacgctgatcgggctggatatcgacagtttgtctctggagcgggccgagcaacggttggcgggccttggctgcaaggtggttctgattaaatccaatttttccgcggttgctgaacgtcttgacgaattgggcgttcctgcggtcgatttcatcctggcggatttggggctgtgctcggcgcaattggcggatgcggatctgggacttagttttcgcgatgaagatatgccgttggacatgagaattgacgaaagcttggagacgacagcggccgatatagtgaatgggtacgacgagaaggccctggcggatctgatctacgaatacggccaggatcgcgcctctcgacgtatcgcgcgttacatcgttcgacgacggcaacaagaaccaatcatcacgaccggccaactcgtgcaggtcgtgtgcagcgccttgtataagggcggctcgaagcggcgagccagaaaacacccggccacccggacgtttcaggcgctgcgaatagcggtgaaccgagagttggagaacctgaaaatgttactctcctcggctccggcgttgctcaaacagggcggcagcctggcgatcatcagctttcatagcctggaagacggtctggtcaagcgcgatttcaaggcacaccagcaggcgggcctctatcagatcctgacgaagaaaccgatggtggccgatcgggacgaggttgcggccaaccggcgggctcggagtgcgaaactgagaatggcccgcaaaactgagatcaatgaacaagaataggcatggcaggatgcttttacgaaggaacgggttaacggcaaggaacggagtgcgactatgacgtcagatgcgaaaatcggcttgctcttgggattggtgttcatctttgtcattgcctttatcatcaacgggctacccaactttggcaaccggtcgcaagccgaggcggcgccgatgacgaattttccggacgagaacctgggtgtggccgacagcgcccagagtgcccaggagcagctcgactgggagggtctgctggcgcaagggagcgaagagcaaaccgagtttcagccggtcgaagcggaagtcgaaccgagcgtggcgctaccggcgacgacggttgcgacggacaccgagaacggggccgttcgctccgttcatacgcttgactcgctgatgggaggggtctcccggaccatcgaagacgtgattaagggaattggtgaggcctcgcagtcggtcacgctgcaggccgaaacgagcgaaccggccccggcgatcgagatgcccgggcggcagccgatcgcccaaccggtccagacggcgcggtcccaaaggccgacgccggcggaaaagcccgcccgcaagcccggaaagaagtctgcatcgcgggtctacgtggttcaggatggcgacgttctggccacggtggccaagaaggcctatggtcctgaagagggcaacaagctggccaatatcaagcgcatttaccaggctaatagcatgatcttgaatagccccgacgagattgtggtggggcagaagctggtcattccgccgttgcccaagggtaaggtcggagccgccgatccggcggccgtgctggctgggccgcacttcgagaaggtcggcaccgcctccagaaaggccctggctgatgtgaaacagggcaagcctaaggggtggtactacgtcgttcaggatggtgacaacttgtggaaaatcgccgtgacgcaactgaacagcgggtcgcgcagcgaggagatcgccaagctcaacagcgatatcctcaagagcaaggacgctctgaccattgggatgcgcctgcgccttccggcgaaatagaatcaagccggcgagcccggcgtgtggagacaaggacttctcaacggcgacaacgacatggcttctcgattgtgcttcgcgtttgtcatcttcttctttgcagccatcctgattctggcggtctatctgcgcagcgccaaccaccgtgttttttacacgttgcggcgacaaacgattgagcagcatcagcttcagcaggagttgtggcagaagcagttgagggtcgaggtgttgaccagtccggccgccgtgctgcagcggttggatcaataagacggacgctggtgtggcaaccgcccacgtgcgctcgtgctcgatgaacgaatgtcaggacagatagcagcaagcgaaggatgccgtgtatggagacaagggacgtcatggggagcgaatcgacccgcggccgatcccctgatgattgttcgcggcgcgagcgaatcacgatcgtcgtattcgtctccgtgatcatcgcggctttcgcggccctgggtgggcgatgctactacctgcaatacgctgcggccgatcactatgagcaactgagtctgcgccagcaatgctcgtttcttcccctggagccccaacgcggggccatcctggatagtcgtggtcgcgttttggccgccagcaatcagattcgcacgatcttcgccgagccccgcgtcatcgccgagcccaaggagacggctaacgtattggcgccgattctcgatatgggggggcacgagatctgcaagctgatcaccgagagtcgcaatcccggctacgtggccctcaaggtcgatgccgaagttgagacgtgtgatctggcccgcgccgtgtacggcgtcggcgtgcagtctgcctggcgtcggcattacctgacggggcgtctggcctcccatgtcgtcggctttaccagccgggataatcgaggtctgggcggcgtcgagaaccgattcgacgcggagttgcgcggtgagggggcccggcatgcgttcaatgtggatgtccaacgccggcctctgtccttcgccgtggcccagaatacgggtgataacgccgtcccgaccaacggcagcgccatcatcttaactctggacgcagcgatccagcaattcgcgcgcgaagagttgctcaagcagtacaaggagtacgacgctgaaagcgctttggcggtcgtcgctgatccgcatacaggcgccattttggcgatggtctcgctgtccgatttcgatccggacaacgtcggacgcacgaatcccgatcacttcctcaaccacgtgctgaccgaccaattcgagcctggcagtatgattaagcccattgttgccgccatcgccctggacacaggggcggtgagcaagtacgaaacgatcttctgcgagaacggcaactaccggggtcatggcttcggccggatcggggagttcgacaagggtttcggcgatctgacgttgcgcgagattctcgtgaactccagcaatatcgggatggccaagatcggacagcgcatgggccccgagcggctctacgaaggattgacgctgttcggtttcggcaagaagatcggcttcgacctgcccggcgaggccgaagggctgctgcgtcatccatctgcctggacgggctacagcatcacccgaattcccttcggccaggagatctcggttactgctctgcaaatggtgcgagcctactgcatgctcgccaacgggggacgcctggtgcggccttacctggtcaaggttgtggttcagccggacggatcgatggtggatgtcaggcctccggcgctgcgtgtcggctacgtgatcaaacccgagatcgccaagtgggtggtcagcgaggcactggtctccgtcgtcaacgaaggcaccggccaccgggccaagttggagaaatggcaggtctttggcaagacgggcacggcccaactggcgcgcagcgacggacgcggctacgagcccaaggcctacgtggtttcgttcatctgcggcgccccggctgaagatccccgagtcgtcgttctcgtctcgattcgacgaccgaacacggcgatcaagggacgcttcaccggcggcggcagcgtcgcttcgcccgtcgcggcggcgattctcgaaaaggtcatgacctatctcgaaggtacggaccctgccaaggcgaccatcgcccgggccgcgccgtagagcggcagacgtgcttgctgggggcaatcgcctcgtcaggtatcgacttccggcgttgtcggcctcagccttttcctgcatcgccatagtgttctactgtgattttatggggcgtgcacagccgaagaacagatgggccccgacagggcgtcgagccacgttggggacctggggcacattgtgcatggacggaatatagacgtttggcacgaagaagggggcattatgccaacgatgctgcaagcggattgtcatctcgatatcgaccgtctgtgggagctgttcaaggagacgggcgaggcttgctatcggaatcttctggtggatcgttaccactatctggtcgaacgcactgccacgcatttgcatcaaaggctgccgggcgctgtggagcttgatgatctgatcagcgtcggcgtttttgggttgatgagcgcggtggagagcttcgatcgaaaccgggccgtccagttcaagacgtactgcgtgcatcggatcaggggcgctatcctggacgaactacggcagacagattgggtgccccgcaccgtccgcaggcgggctagcgaactatcgactgccgtgcagtctctccaactgcatctggggcgcagacccaccgaatgcgaaatcgccgacgaacttggcgtggacgagttcgaagtagagaagctgcggcgatacagtacggccccgcgcgtgacctcgtttgatgagatgtgcggtgagggtgaggatagcgagggcatgcggcggttgaatctcgtggcggccaagaaagcccatacgccctgtcggcgagcgcgccggcgcgagttgctggaccagttgacccacgggctgagccggaccgagaaactcattctcgtgctgtactattgcgaagacctgaccatgaaggaaatcggggtaacgctggggttatccgaatcacgcgtttcccagatgcactctctcctggtgactcgtctgcgggccaaggcctccagggggcagccggcattcagtgcgttacggcccgctctctgaccttgggtggggcactcccatcgctgtatatcatggccttttaggcgcctaagcggacccacgcccgcccgggtcatcattagaaactagctaaatcctgttttgcggacgcagttatggtacactattcggctgagtacaagatgtacggatgccggagcgtaacgccgcatggccagaataatctatgccgtcgcaggagagggatatgggcacagtagccgggcccatctggtcgggcagcgcctgcttgacgcgggccatgaggtgatgttcgtcgcctcccagaaggccttgcgctacctccgatcgatttacggcccagaggtcaaggagatcttcgggttgtcctttgcctatcgtcgcgggcggatcgaccccgtcgagacattcacgcggaaccttttccaggttgcgcgggccaagagtctcaacaagcggctcttcgagaaggtctatcgttcgttcaatcccgatctggttatcacggatttcgagccgttcaccggctggtgggcccggcggtctggcgtgccgttcatcagtctcgacaacgagcacatgctgaccgtgtgccgtctggagcaccgtttgcggtacgtcttgccacgcctgactgcgacggcggtgaccaagagtttcggcatcggggccggcacgtatgttgtgacgaatttcttcgacgcgccggtgaagaccgaccgagcgatcctggcgccacccattgtccggccgatcgtcaccacgatggagccttccgacgccgggcacgtcgtgatctactggaccacgggcacagaggaaacgcgcctgcggacggtactgcggaagttcccggggcagcggttcttcgtttatgggtttgacaagtccgcgaccgtggggaactgcgtcttcaagcgcccttcgaccgaggggtttcttgcagacttggcctcggcccacggggtggtggcctcggcggggctttcgttgctcagcgagtgtatgtactggcgcaagaaaatgctgcttctgcccttggccggccagtacgagcagattgtcaacgcgcattacttcgagaaactcggtttggggattaccgccaagcgtttgaatgaagcggttctggctcgcttcctggaccgactggacgaacccatttcgcaggacgaacgcattctctggcccgacaacgagaagttcttcgagacgctggagacggcgctgagtcgcctgcagacgccggtcagcattgccatacgagagattggcccgaaacgtcgttcgacggcgccgatggtgcgggcggaagactgacggatcggcgcccaaggtccgctctagggcaggaccgtcggttgcgacgccgtgcccacgtagcccttctcgatgcagaactggatgacatcgcgcgccagcggggccgcgtcgctggagccgtattcaccgccttcgacgatgacggccagcgcgatcttggccccttcgtgatcttcagcgaatcccgcgaaccaggcattgtaagggcgttcggtggacccggttttgccatagactttgacgccttgatccttcagggcacttggcccgaatactttgtttgccgagccgcctgattcgttcaccacggcgtccatcccatcgtaaacggtccggagggtctccacggagattcccaggtcggtgggtaaccccggcgcgggggattccggtttcaggaagagtcggggccggatcgctcgccctccacgggcgatggtggcgaaggagttggctacttgcaagggggttgcccagaggttgccttgcccgatgccgaagaggggaaggtctcgcttggccagcggaggaaggtcctcgagcgacttggtgctcttgggccgttccctgctgattagcccggcagcttgtcttagttgccgggggtccagatcgtttggccccggccatggacaggccagcggcaagcgacgtccgtagccaaagcggtacaaccaaccctgcaagactgccggttcgatatcgttggccagacgcgagaaatagacgttgcagctacctttgatggcgttgcgtgccttgttggtccacttctcgtcatggccgaagccgtgcttccgctggatcaagcagcgaggccaaccgcgcggaggcgcgtgggaggggcacgagataacggtgtcggccgtgacgacgccagcctccatcccggcaatcaggatgatcggtttgacggatgaacctgggggatagtcccgagccagggctcggttgagcagcggatgatggccgttctggaccagttcagcgtaatcggcgcgtacgcgattgttgtcataggtgggcagcgaaacgagggccaggatatcgccggtccggacttgcatgaccacgacggccatgttggcgtcggcgttcttgttcagggccgggttggtcaaatagttttcgatacgcgactgcagttcgatgtccagagtcaactggacgtcccgaccgaattcggtctccgtattgcggacgatctgaccgtcgatgtcgctgaccaactctccccggcggccgcgcagaatcggttcgcagacatactcgacgccaggtcggcgcccacagacttcgccttcgagatagctggccaggcggtcatgttcgaagagcgccttgtcgcggtcctgcgtggccccgccgacccagccgatggtctgggccgccacggagccatagggatactcacgttgccccttgggaacgacttccacatcgttgatgtccatgaactcgaactgggcggtgaagatgtcgtcctcggtcttcaactccagcagaggctggctctcgtatagatcgcgaatgtcatccacctgtccgatcagtttgtagcgttgattcggatcgggaaaatgccgttcgaagtcggagcgggccaccgacatgggaacgctggtgattcgcccgcgatactcggcgatgatgttggggtctggttcattaccgcgccaggcgaagaaggttcgcaagttccacatcttatcattcatgttcgtgatgcgatcttcgatctgggcctcggtgacgccgaactgggcgcaatcgtgtatgatgcggtcgaggtcggctcgccgcgcggtcgcctccttgaaaagatcatcgagggccgacgcgctgccgttctcctcagccaatagcttctgggcgaggatgacgcgccggtctctgaaacgactaagaccgtaatcgatggtgacctggaattcgggaatgtcggtagcgagcaccttgccgtttcgatcgaggatatctccacggagcgttttgagttgtttggatcgcccgcgctgcagcttcaatgcggccacttcgtcgcgcaacgaggagtcggccagcagttgcatttgcaccagcctgagcagtccgatccccaggagcaacagactggcagcaatgaatattctaactcgcttttcgtacatactgattcgcttggagaacgtcgacccgactgggtcgcgtctctgatgcttggccccatgtgtgtgatcgtccgtcccggcggcagcgctgtcgccttacagccgccacttgccacgccgacgtttcttcttatttatatgcatccaccaggccagcggcaagcacaaaaagggcccgagtagcgccgacaacaccggttgccagaagagttcgcgggccatattcagcggcgccgggtcggcgcgcagatgggccaggagatgggcgacaatggtagtcgtcagggccatgacgaagatcgcgattccctggtagggcagtcgtttgatcgagatgacattgttcaagtcggaaagcagcgtgccgaacaggccaaagctgatgatctgtggtcccatgaacccggtgaccgggttggccagatctgcggcaaagccgatggcaaaggacgtgattacggcgtcgctgggattgcattgaaccgcaaagaacaccagcaggatcagcagcaggtcgggcctgatgtcaggactacccagccagacgacgccgagaaagctggtttgcagaaccgttgcgatgacaatgagcacggcaaaccgccaccaacgcattcacctatacctcacgatggaaggattcgggattcgagcttcagcgccgtccattaccggccgggcacaatgacgtgcacgcccttcagatttgcgatgtcacagaccggttggaccgagatgttcaggaccacggggttttcgtccggcttgcagtccaccacgacagcggtgacaaagggaatctccggatagcccggggctttcagggcatagactcggtcgccttttcgggccttctgggccttgtgtctggagggtacctgcaccgcggcggtgttcgggccgttgcccgtcatgatcccctgggccttcatctgtgcgatgcgcaccggaattctggacgctggatcggtaatcagcctgactttggcggtttggttcaggacggcggagatcgtcccgatgacgctgaaatcgcccaggacaaattggcccacagccagacgatcgttttgcccgcgattgatcaatagttcactctggccctgcccgaggtcggataggacgctggcttcgactacgaccatgcgcttccaatcgggattgctgcgcacttgctgcaggtcggcgatctgttgctcggcggcgtccaaatgagcctcgcggttggcagcgatgttcgcgagttggcggttctctaccgccagttcctcgtagctttttgcacgtccggtctccgcccgagtggcggtccgcgccgccagggtcgcaacgcgcccggccgccagcggcccacggaacatccgggcatacgccaactggagcttacctgtcacggtggcgggggtgaagagaaagatcagcccgcccagcatgaagtagacgaacaagaatcgcttcgagattttgctgccctgtcttgtcattgccgtcggtaaaccgggtgtccgagggacgccaagcccatgaggctcgcggtggggttactcccaccctcggtcattgtggtccatggtatccttccatatctcgagattctcgaggtagacgctggtgcctcgggccacgcaactgagcgggtcctcgacggtgtggaccttcaggccggtggcgttggtcaggacgacgtccagcccgcggaggcaggacccgccgccgcagatgtggataccattgtcgatcaggtcggccgccaactccggttcggccttttccagcgtcgccgtcacggcgtcgatgatggccgtgatcgggtccttcaaggcctcgcgaatctcctcgctggtgataacgatcttgcggggcaggccgctgatggtgtcccgcccggcaatttccatcgtcatttcttcacgcaggagtgccgccgagccgatggcgatcttgaccttctcagctcgggcctctccaatcaggaggttgtacgttttcttgaggtggttgatcacggcctcgtccatgtcatcgccgccgatgcgaatggattctgcggttgcgatatcggccagtgacatgatggcgacctcggtggtgcccccgccgatatcgacgatcatggaggcggtcggttcggtgatgggcaatccggcgccgatgccggcggccatcggctcatcgaccaggtagaccttgcgggcgcccgcccgctcggcgctgtcgacgacggcgcgtcgttcgacggccgtaataccgctgggaaccgcgatcacgacgcgcggacggaccaagccgccccggccgtgtactttgcggatgaaataactcagcatggcctcggtcacttcgaagtcgctgatgacgccgtctttcataggacggatagcgctgatggaaccgggggttttgcccaacatttcccgcgccaccagcccgacggcctctccgtcgttcaacacgacgttggtccctttgcgcaccgccaccacagaaggttcgttcaggacgatacctttgtcgcggacacacaccagtgtggtacaggtaccgagatcgatacccatatccatactaaacatgccgaggatcgagtccaacagcacaaccgactcctttcttacgtggctattggcgtattgtgcgtgcccagagggggtatcgtcaagaggattctgactagggcatgccaaaaatcgtcttgtattgtgcgaagcactggaaggcgacgaaggcggacgtggccaccacgacgcccagcgcgacggcgagaatcgccgtgtagagattactgggaaccgagatggctccccgtgattgcggcatcggactcatatgtcactaacctcctggtcgcgaagcgaataccgaacaggcccggtcacgagcggttcacaggttggtggtgcaggtatcacccttacgcggttcggcctggatcagatccaggacgcccacggccttatcggcgtcgacgtcgaggatgacgatgtcacagacgaactgctggccgcgggtgacatggaatttcatgtcctgcttgacgccggcggctcggccgatcgagatctcagccagcgagttcttcaggtcgagggccgtgatgcttccgttgaggccgatgtccttggcggccggaggggccggttggacgatggcacgcgtcggagtcacgggcttgggggccgcggcggccttgccgtactgttgcaggtactggttcaaccgcgtctcgagctcctggttggcctcgatcaactgcttgttcttggattcgagttgcacgacgacggccattttctccatcagcaactggttgctctccttcagctccctgtcgagccgggtctgatcggagcggagcgccacgacatcctgctgggacgcctgagcctgctgcatctggctggcctgagtctcgttggccactttaacggccgcgcccatatcggtgaccttctgtaccaattgggctctctctcgtttgaccatatccaactgagcgctcagatcggaaaccgtgattcccagctctttgatctggttttgcagttgctcctgcgccttcaggtattcggccttcgcagtgtttcggtctgtatcagccgctttgctcagggcccgagccgactggtagtcctgctggagcttgtcggcacgctctcgctggttttctgcattggcgacgtaggtgaccacgatgccgcacaggaagatggaaaagacagtcagtaagacaatcagaaccttcgtaagcgtgctcaagacaggctcctttcacgaattagcgcgttttgtgtttctgcgacacttcattctatcggacgttaggctcaccgcatttatgcataattgggagagccacatcattgccagagattacactccaacccaccgtcccgatactgctactgcgtactttaattttacgcatgaggcctaaaaaggtcaagtcatttttcccaaatagcccaaatagaatgctttatatgcggcctgccgtcgctgggtgcgagttctcggaccttgcggggctctgggtgagcccaaggtccgagaactcgcatccagcgagaagcaccccctggccgtcttatcggttagcgatagtcaggacggctttggcagcagctaggcggacggtcggagacgtttcctggagcaggtcgggcaaatgcctggccagtgtgggcgtgccaatctcggcgatggccagagcggtcagaaccctgatgcggtcggcgctctggggccccaaggtggtcaggacatgtttgtcgaagacggcctggacctcggcttcgccgatggcgtcgcccaatttgcccagttgccgggcggcggccagtcgcacttcgagcagggggtcgtcgagcatggtgatcagcgcgttcttggcctcttcggtgcccagggcgcccatggcgcgaacgccgatcatgcggtcgtcggcataggcgctgatcaggcgggtccagagcttgggatagatgcgtcggtcacccagcatggcgatcgattcggccgcctggagcaggaccttgtcggtggaatcggggcgccgcaaggtccaataaagatactgcagcgcctcctgtcggccgctttttcccagcagcagggcggcgttggcgcggacggtctggtcttcactggccaccgcgtcgcggacgattcggaagtgatcgggctgacccagcttcatcagggcataagcggccgacattctgacattcatgtcggggtcgttcagcaaggccatgacttcttctgttgccagggcgaactccaggtcgcctaccgccagggctgccagaaaacgcacgggcaccgccgggtccgggagcatgcgctggatcttgggtagtagacgcacctcgccgacggtggagattacttcgactgcgttggcccgcacacggggatcgacgtcggtcaggccttcgagcaggatctgtcgtgcttcggattgaggatcgccgaccaggggacgacgccggacggacggattcgcaaagaccgggggagcggtcgccggctgcacctgcgccggtgcttcacagccgcatatggccggcagcaacagaaggaccgatattgtgccgaatacccggagtacgtattgcatattgagactcccgcgcgtcttgatgacttcaccctctatttcgttggtgggcgtgccgacttttgcgccttgcgccgacgcacacccaggatggccggcacgaccaggaccgcgacaaaggtcactgcacaaatcgtgtccaaccactgaccgtggcgactatagaacgtcacccttgtatctatcggcattctgtcggtgaaccatccaaccatagcggttcggcgcatggcgttggcgggaaatccttcactggcggcgcggtagccgtttcgcaggcgccccgtcgagtcgatcaggcaactgatgcccgtattgacgctgcgtaggatagggagacgattctcgacggcccggaagacacaggtcgcggcgtgctggggcaattcgctggtgggtttgacgtgcggaggggcgtccaggaatcggacgaaccagccatcgttgctgatatttaccagccagtcgacgcgcttgcgtccgttttcgtccagcgcgaagttgcgggcgacataggggatcgcgtcctcgtagcagatgatgacgccgaagcggtgcgtcacaggttgcccggtcgcctcggcgacgatcggggttgcattggcgtcggccggccggattggcgtggccatctcgaaaacggtgtagtccgtcccgtgctccagcgagtaatcgtattgatactctttgggtgtgaaccgtttgagctgctggtagagccagttgcagctgcggcggaagggaatgtactcgccgaacaggaccaggtgaatcttgctgtagcggttcgggtcgcgcgtcccgtcggcgcgatagaggaaggcggagttgtagtcgcccagatagcgctcgccttgagaatcggtcaggatttcgccgccataggcgccgacgagaaggtaggcattgcctcgtgcatgctctgcgagggtcttgtggaagatcctatcttcctccggcacggattgcaggaggggccacagttccggctggagcagggcttggaccatcgtctcgggccaggcgatcagctcggcgcctgcttgcaccgcttccttgctctgggctagaagctcattaaagaggtcatcggaggcttggtagctgttcttgaccgactgggggacgttggactgcagggcggctacgatagggccttcggagacacaggtatccgtctggcggaggcgccactggccgtagaaaacggtccccactacggccccgacaaccagcgccgtccgacagagaagcgacaggctggaaggctttctcttacgggcgaaaaacgagtcgagggcttcgcaggccagaagggtaaagcccttgccctctgcctcgggttcgacggattcggccagcctgggtcgggtcgcggcgaccgccaggacaacgtccgcgaaaaaaccattgaccagggccacgacaaaggaaacgcccccgacgccgaagatgtcggcgatttggatcagcgtgatattggcatattgactgtgccccagaagtcgccagtagaatccgcccaggggaaaaccctgaagacgctcggccccgacgaccaggatgggcaaggccaatgtcagcgggatgtttcgggcccggcagaatcgcaccgccagggccaggagaggccagagcagggcgatgtagaaacacagtccgacccagcctggaatggtgatcggcgcgatccagtggaggttgaccatccagtagacgaagccgacgacccaggcgaccagcgccattgtgcggggccgaaactccggcgagcagcccagcgcgaacgaaacgaccgcgatccaggcgagaaacgaccagtccactggcggctgaatcagtgtcaacatcagggcgctgtcgaagaacggtaccgaaagcagtaatagtctcttgattctcatgggtcttcttatcgtgatacctgtcgtatttgtccccgatgttgaacggcgggtcggcgaagatctgattcgcaagcggcttggtgatatcccgcaggattacgatgcaattgcggcggattgatgttgttcttcgattccagcatggccgccattctacaggctcaagggcccttggcaagggcaatcgtccgccgacagggggcctccgccgatcgacctgacggaaagacgtgtgggaaaaagatgtaacagatgcccttttgtcccgtcctaaagagtggaaggtttggccgatatcgttgccattgggaaaagcgaggtacacgcagatggactcaggcgtctgccaaaagggaggtccaaccatgtcgaggtcctttgatgtcaagagtggtcttattgggggtctgctggcgctgctgatcttgtccgccttgggtggcgcgccgtggatggaacgtgattgccatggtcgattcgcgatgatgggccatccgggccatgcctatgtcttcgataccctcacgggacaggtttggtccatgcgggtctatgacagccagtccaccgccacagagcggaccggcgataatgaactgcgtttctacgatcccaaggtgtacgtggcgtccgatcccaatagcctcatctactgatagcgggcctctcttccgtctgaaggccctgggacactgtctgttcggtttacgtaacgggaggcgacaggcctttctcaccgtgtcaatcgcttccattgcgcttgatgtctgatgcgaatcggcttatacagagggttgattcgtactgatgaactcaaggcaaggaaggaaagtctgtgtctctgagaaggtgcattattctgggtatggccttgtatctgtccgccggcgcctcggttctggatgcgcaggtggtggccgggccgctgtcggacgtgaacattcacctgcgggggccgtttcaaaacgcgcgtctccgtttcgagagggagaagaaggggcacgtggcctttatcgggggttcgatcaccgagatgaatgggtatcgccccaaggtcatggctgtcctcggacgccgcttcccggagacggagttcacctttaccgacgccggcgtggcctcgacctgctcgaccaccggcgccttccgccttcatgacgatgtgctcagccaggggccggtcgatctgttctttgttgaattcgcggtcaatgacgatcaggatgcgcatcacgcctaccgggagtgtctccggggcatggaagggatcgtgcgccacacgaggcgccataaccctcgcgccgatatcgtcatcgtctatttcatcaatcccggcatgctcgatacgtggcaatcggggcaggcgcctctctccgtgcgcgctcacgacgaggtggccaggcactatgggatcgcaacgatcaacctggccagggaaaccgccgagcagatcaaggccgggacactgacctggaaacagtatggtggcacccaccccgggcctatcggcaacacgctttgcgcgaccatgatcgaccgtctcatgtcactggcctgggacgagccgatccccatggggtttggacctcgcgatcattcaacgccaaaggcgctggactctcacagctatttccatgggcggctgattgccccgggtaaggccgaggtcagtcgtgatatggttgtccagacgcccgattggtcgaagctcaaaggggcctgccggcagcgttttgccaaattatctctgctgtgcgccgagaaacccggcgcagaactgaccctggcgtttgaaggaaccgctgtcggcgcgtacgttctggccggacccgatgcagggatcgcaacggtgagtatcgatggcgccccggccaaggcggtcaacctgtttcacgacttcagtacgggcctgcactacccgcgcaccgtcatgttcgatgccgatctggagcctggcaagcatgtgttgcgtcttcggatcagtgacgacaaggacgcgcgcagtagcggttatgccatgcgcgttctgcatttcgtcgagaatccatccccacgcccataagttcaaacattcggcaggagatcacagagtgagagatgtctcagatgagttcgttagtgagttcgtgaatgcctgccgcgaggcagggcagcgaggattgatgcgctgtagtagtggcaacatgtctcggcgtgtggacgaagagcgcatgctggtcaccgccacgcgctgctggatgagtcgcctgacggccgatgatgtggtgctgtgccgcatcgccgacggcgccgtgctcgacgggccggacccgaccgtggagatcaacctccacgcgggcattcttctggcccggcctgacatcgatgtggtgatgcattttcaatcgccctgcgccacaaccctggcctgtcgcgacgtgagtcaggtcaactattttgtgatcccggagatagcttactatcttggggccattgggtatgttccgtacctgcctccggggtctacggaactggccgatgcggctgccgaagtcatgcgtcaacacaatctggcgatcatggccaatcatggacaggtcaccgcggcacgcgatttcgatcaagtcatccagaacgcggagttctttgaactggcgtgccggatcattcttcagggtggcgatggcgtgacgcccttgaccgaggaggctgctgacgctctcatcgctgcagggccaggcggttcacgttcaagggtctgagcttcaggccgccaatagatatcagatggagtatcaagtgaagaaggttggaatcattcgttgtcaacagaccgaggatatgtgtcccgggaccatggacttcaaggtggcctcgcaagggaagctggcctttgaacatctcggccccgtggagatcgttggatttgtcagttgcggtggatgtcccggcaagcgggcgattgcacgagcgaagttgatggtcgacagaggcgccgaggctattgtcttggcatcctgtatctcaaaggggaacccaattggctatccttgccctcactacgccaatatgagagacgcgatcatcaagaagatcggcccagagatagagatcatcgaatacacccattagacgttcttcgaaagaggcgttgggaccgttcctctggtcatcgatgcgtggtccggacatgaggcttcaattcccttgccttttccgcgtggtgcccgcacaatggccttgatcgaagcagacgcggtgcctggaatcaagcagaattgatagcgtgtgcactgcacggccgtttttcaatgtagaagtgtcttggggagttgcatcatgcacgagaatttcatgctttgtattgctcgggtcaggcggcatggactgaagtccatcctacagcttgtcgtgtgtgttacggtgttgagcgcgacgggttgttgctgcaacagagaaaacaaggtggctgcgaagagggatcacatgattatcgaccgactggaaaacgccgagcgctattacgacctgcacccgggcttcgccaaggcgtttgcctttctgaagcaaagtgacctggcccgactgccggccgagcggcatgacatcgatggcgaccgcctgttctgttcgatcagcaacgggccgggccgtccccgcaccgaggccaacttggaagcccatcgcaagtatatcgacatccagtacgttattgccgggacggaggagcagggctggaagccgaccgccgattgtcacaccgtgcacaccccctacgatgcggacaaggacatcgggttcttcaaggacccgcccgagacctggaccgaggtgccggccgggtcgttcgttatcttctttccccaggatgcccacgcccccctcgttggtgaaggccaaatccacaaagccgttctcaaggtcgccgtggagtagaatgtgaatagcgagccaacgatggtcagcgttaggactctatgaggagttgcttgacgtgattatggagtttttttttggggggggggaatggccaacgccaagcgagcaactcccgtgccgagcagcatggggtccgtccctggtggttgagatctcggccgcaagcggatagagtgttacgcgtcttctgattagggcgtgacggagaaagcacatgtcgagactacgaattctacagagaccttaagactcggatgcaaacgtgagcagaagagacagaattacgtactatgacgttgccgacatgaattacgctagtttcttcctgacgggactcagcgagaacgagaaccagcgtggctacaaattgactgtgtcaagaagactgcctcctcgccttcgcgaacgaatgatggaggggaagtgggcaaggattgtgccctccgtgtgtgtgtttgagatgaggttgatggagaaggagttctacttttgcatcgacgggcgagatagttgcaggtcggccggagatattggcatggggtatcacttgcctcttctggacgaagtgaaactctacttcaaagtcaactacaatgaagaagcaatcaggacggatcccgatctgaaggcccatgccggtaagattgttcctatggctccatgtttccccttgagaccgaggcgcttactgccgctgttgggtaaaatagttggcgggagcgtcaccacggggagcgcgcgcaatgctgcgtcgaagattaagtcgctggctcgactcccaagtctcgaggagatgcaacgatttcgaaacgtgagcaaggagattgatatattcttcgttagtacattctatggacatgcttaccaccacgcccacatggagtttcgctatgaaatcatgaaggcaataagaagccacggcaatctggcgtctgtagtggggtttaccggtgagcctacggggaaatacgcgtcgttcaaatgtgaccgattccctctgcaagattacctaaatagcttgtccagtgccaaggtggcaatatatgtgaggggattgcatgactgcctgtccttcaagatcgggcagtacttggctcttggattgccaatcgccgggcagacaatttccaacaacagaaaagcattgtatggccatgagggcttctccgaacagtttgcatttgacagcccgagggagattgtgcgccaggctgtgcaactactgggagagcccgacaaacggaaatcgctgggtgaatccaactctagaatctttgataccaagttattcccccaggcaaccgtgagcgagatgttggagtgtctgagatctgatgtgtcctaggttcgttctgatcttggccacactgacactggtgccaaagcaatggtaacgggccgggatggaatggtcctccgcgttcgtcccgttgcgcatgatactgaaagctgagtcaacggtgcgataggcagggcggcagagtcgaggtgaagtggtagcggcccgagccgatggcgaatatggcgcagtggccttcggtgcgtaggaaggtgacgtgaggggattcggatgcgagtgtctcgccttccttgacggcggcggggtccagggtcgggagacaaaccgtcgcgctcgtgttggcgggaatggtcatgtgcagcgagagcatttggtccttgcgctgccacgcgctgtggatggtcccgctggccgagtcgtgatgggccttgacccaggtcaggtcgccgacgatcttggggtgaatgacgatcttcttgaatcccacgtcggtcgggtcgtgttgaatgcccgccaggtgggcgtagaaccactgttgaatatgccccagcatgcagtggttcatcgaggcgctggtattggcgtcccacgcctcgggcagggacgtccagccgcgatcgcggatgaatccgtagctgccgagatcgtgccgattggcaatgtcgaacaggacgtcgctgcgcccatgctcagccagagcctggacgagataggaaaagccgatatcgccggcggtttgttgatggttccgggtctggatgtcggccaccagacgctcgaccacggccggtatgtattcgggaggaaccagatcggtcaccagtgccatggcgctggaggtctgggggctgccctggttctcgtattcgtctcggtcgttgaaataggtggcattgaacttctgtctgatctgcttggccaaggcggtgtaagcggtctggtcctggtcttgtctcagcaattcggctgtttcggttacgatccgcgtgcagcgataaaacgtgaccatggcggtcagttcaggcggggtgaagcgcgccgggccgttgccctggccatgtccatagtcgtaccagtcgcccagacccgcctgcgggatcagatctttggatgtgtcgcgcatgtagtcgacgaaatgcttcatcgtcgcgtagttgtcctccaggattctccggtcgccgtaccgatgatagatctgccagggtagaatcacccccgcggcgccccattccggtgtgtagcgaaaaccgccgctgaacgcggggtagttgggggccaccgtgtagatagcgccgtcggtgccctgcgagtcgcggatgtcacgagtgacctttgcatagaaacaggcgatgtcgtaccggcatgcgattgagggctccatcaggtaacttacttcgagccagcccagtttttctcggtgagggcaatcggtcaggacatgtcccatgttgctgcgcaccgcccagtcgaccaggcgatggatgtcattgaacagggggttcgagcaggcgaacgacccgacggtggggcaggcgctgcgcacgtggcgggaaaccagttcctcgactaccggcaatccatctggattggattgcccctgaggaacggcgccggtgagctccaggtactgaaatccactataggtgaattggggcgaccagacctcggcgtcttggccgcgcagagtgtactcccaatagttgggtttccccacccccgcctggttgactcgacctcgcccatcgttggtgcgttcggtttggccgaagcgctgctcggccggcgtcaggcggagggtttgtcctggtctgccgcgtacctgtagatgaggaacggccgacgcgttctggccgaaatcgtagacgtacacgcccggttcgggctggtcgatccggacgggctcgaacacttcgtacgtcttcatcggaggggctggggacgcgatcaattttcctcctggtccctcggtgacctgcgctgtcgaccagtgtgaatcatcgaatccaggctcggcccagccgttcgccaagcggcgcgcgtcgtagtcgctgcccccgagtatcgcacagtgcgtgatcggtccatccgtcacacgccacgaatcgtccgtgacaagcttctgcctggcaccgtcggccaattcgatgtgggcctggaggatgaccttgggccggtgttgtacactgacgccatgaacacggcggtcgccgaccgtgttgtagaagcccttgcccagcatgaccccgatggcgttggcgccgcgattgagatcggccgtgacatcgtaggttgtgtaataagcggttttgccataaaccgaccatgccggatcgaggaatcgattgcccgccttgcgaccgttgacaaacaactcatgctggcccagaccgcaaatgtaaaccagggcgcgccgaaccggttggttcacggtaaacgccttgcgaaagatgggaagtccgcgtgacgtggccttgtcggacggattactcgaatccgccgggtgcaggatccaccgcgcgtgccagtcggccggttgcagtaggcccatggtccaggtcgccggtgtgctccaggctgaagacgcgccatccccgtcccagacccgcaccttccagtacacctgctgagaggagatgagcggttcacctccataggcgatcagatgcatctgcgagccggtcactctgcccgagttccacagatcggttgctgcttccgtcaatgcctcgatcgacgtggccgctaaaacctgataggcggcttggatctggccccgctcggtcgattgcagggtccaactcagtcgcggccgcgccgaatccacatccaatggattcgggcgatgttcgcatcgcagcccgttcaccaccagattcgcctcggcagcagcgccggtgaccagaagtgacagacagaacgcgagccgaacacctcgccacctggaaagcagcatcatatttcgtgcctctcaaacgatatcagatcacgattcgttactgggcgggacggggacaggcgtctacgaactggagcgattcttcgatcaggatctcgccggtgttctcgcccagagacgtccgcgtgatatactcgtaacgctcgaagctgtcccagtcgaccttggccaggatgtatccgaaggcgtcgttggtcaggccgaacaggaagttgtgttgcccgtgcatcttgcgtttgaggtaatacccgatattgggcatcgcttcgcccgggatggtcagcatctgagcgttggccaaattcacgacgtttagacgcgtctggatgttgtttttgctgtccagggcgaaacccaagggcgacaattggaccacctgtcggagcatctggttctccaccggaagcgtgacggtcttgctgtggcaggacaacttcgggttactctggattggagcgctgccggcgatgcgcagcgcctcgtcggccagacgatggccaatgcggatgcactcgtcccacgtttgaatgtccttgccgttgggaccgcgacagtcggccgtgaccatgccccccagggcgctgttcatgaagattccgacgccgcctccttgtgcctcgatccgctcatatagcggtcccacaaaatccgggcagaggatgccctggtcggccccgatcacttccggatggcaggcgtagttgacgagggtcgccaccgcgttgtgctctgagtcgagaacctggatgacatgacagcgcgggtcgtaaagccgttcggcgtagtagttgtacgcgatcttgccctgggcccggtcggtcgcgatgcggaccaccaccggttgtagcttgcccactgcctcgttgatcgcctcggccagtttcttgcagacgtcgtcgaggtagtccaggtcgcaattggctttgcccgttccgtcggggaacccataacagtcgggaccgctgtggttgtgcgtggccccgatcaggatattctcggccgggatgccgggcacctgcctgtggaccttctcacacagcacgcccgggaagcccaggaaatccgtgctgcagattgcgacgcgtgtgccatcctgttcgagcacgagcgcacggacgtttaaccgtccaatcgttctggtcgcggtgtgggaagggccgaccccgccggaaacaggcagcggcttctcaggtgtcacgtcacgaactgcgatcgctgcgcgaaacgctccgaacacaggacccgcacagagtacgctcactagcacggctgcaaaaagaactgtcttggcgactcgccggaactgttcggtcataatcctattctcccaagcacgatgatccctgacattgtggctccgcaccgttaaggttaggttcctcagaactggtccttgagcgggatcatccacttgggccagtcggtcgactgtacgccgcctggtttcgtccagggcccgttggtgtcaaaggatttgctccacttcagggtccacagttgcttcagcgcgattttgcgcacggaccagtcggcgaagaggacgaactgggcgccgccgtggcgattgacacagagtgttcgcatctcctgaccgcctatgatcggtgtttggtggccttgcgccggaggttcgtcggtgtctcgaggccagccgtccacccaccagctttcggtgaagaccggaaccctataggcgcccttgatctggtacgtccgccagtaatcgttgatcggtccccgtccccagaggtcggacaggccgggcctggggttacacatccagccgttggggccataactgcccacgtcgccgccatgggagacggggacgcgccaggcgtcgaacggttcgctggcaagggccatggcgtcttccgaggcgccgcttcggtgtttccgggccgttgggcacagccacatctttttgtccttcgagagcggtcgcatacattcccgccaccagtctccatgggcgacatctcttccaaagctcagcaattgtccgctgtagaagttgccgttattgtcatcgcagtacatcgagaagatcagaccccattggtgcaggttggatttacagcccacgccgcgcgcctgacgccgcacccgctccagggcgggcatgagaatgcccatcagcagggcgatgatggctattacgaccagaagctctatcagggtaaaaccgctttgttttcgcatcgtcacactcctatcatagattccgctgaaagcttcatagaccctatgatagcctaacgaggcatgacaatgcaagtgatctgagcggttgaggtcaactggccaggatcatgccgatgatggcgagtgtcccggagatcaacatactgatcaggttgtcgttattctgttccatctgagcactctttcgactccttttctctgagagtgctatgcgcggaggttccacggagttctgcgaaaatataggatttgtgagcgttggatggattcgtacggaaggttggggccagacgtatcgaaacgggggggcgcaagaaaaaagggacgcccatgcctggcatggacgtcccttcggggtcagtcgatatgggtgggattcgtcagagtttctccttcgaatcgcccggtgcggccgggtctttcttgtcgtcaaccggctcactcggtccagtgagatccaccgatgccttggtgtcatcgcacggctccggtacggtgaagagcatgaacgacatgtcctcactgacgccggtctggtcgtagagttcggtccactgccacgtggcggtgaggctgtcggtgcgcggctctgtcgccacggcgtcgtcgttgcgtcccgctccaaccagggtcaggacatcctcggcgcccagcgtgatgccgaagatacgcacatcgtccagcagtccgttgaggaactctgcgttctcatccccgcaaccgccgatgatcagcgtcgcctggaccggtgcgacgaaaccgcccgtattcgtggcggtcgcatcgaggacaccgttgatgtagagcttcatctgacgtgtgccgccgtcgaacgtggcgaccaggttgtgccactggttcgccaggaggctctgcgtcgtctgccaggtgttcaggcccacgcggaagtggaagcggccctgggggtcgatccacagaccgaagcgattgccattggcgcttgtcctgtcgtactccatgatggcctgccagccgcccttggtctgtcgggggttgacccaggccgagacggagaaggagccgggggccaggtcgaggcccttgggcttattgaccttgatgtagtcgcggtagccgtcgagattgagggccccgccgagatagccggcgccgggctgccagagaggattacccagcagggcgccgtcgttgttattgcccgagctgtcggatgccgtggtgccgctggactcgtccagtttccagtgggccaggacatcagctccggacaggtcccacagtttctggggatggttggtccagccccagggataggcgatcgtctggggatcttcatagaccgccacgacgctaagccagtagacgtcgcgggcgttcctctggcagaaccattcctcctgtggcaggcgaacggtgtagcgatataccggttcgtggccttgcgtcactgaactggtgatctgaggatgcttgtcgaagccgaccaggacctcgtcgaaatcatcgacgcggtactcccagattttctgggccggataactgaacgtggccgggttggccggtgtcgggtccggcgcgtccgcccagatcgacagcaggaagtagtcgggcgcggtcggtggcgccatctgcgtgcactcgcacgctcggtaggcatagccgatgtaggagccccaccaggacaggccggtgatcggcgtcgggctggtgcactgccagtcgtcggcgacgagtcggcggtaggtcaggccggagcccgccttttcggtctcgatctcgaaagccaggtcggccgatcgtgaggcggacggatgccctttcgggaatcgcaactcgccccaattgccgccggcataaggttcctctgccagcacccacacggcgtcgtcgttccagtggtcggccgaagccttccatccgaagcgggtcgctgtgctgcccggagcgtggatgaggtaggcctgagcgcacagccagtagacctttggctggctgggcgaaccggtttgctcgaaggcctcgtgggcgtcgatctggaagttgtacttgtacatggccaggtggttgttctgctcgaaggcctcgttgcacgggctgtagaagctctgagtccgcgcctcttgcggctgggccgtgaattcgcccggtttgaagtctttgcgccacagcacctcacccggcatgctgtaacccgtctggctgcgatcggccgagatgtcggcgcgaatgctgagggtgaatgtcacgtcctcggcgttgttgttgggcagaagatcgtggtaccacgcgccccagagcgagatgcccgtgatggggccgctcgtggtgcactggaaatcatcgccggcgatctgctcggaccatgtgggcgggatgtctttggtgatgtcgaccgccatgccgttagtgctgatgtccgggctctgcgtccacttggcccccggcgtcgatccgctggttgccagcgactcttcgtcctcgtagtgggcccagtgacgcaggcccgtgaagggctgctcccacttgatgaaatcgggatcggtgtccagttcgaaggccatgtcgtacatgtccagtcgttcgcagatgagcgaattggtgatcggctggaccagtccggggtcggccatgatgcccggccgtagttcgttcttgcggaattcgaaaccgatcgccccgtccatccatggctggggacgcgtcttccaaccccacgcgtaatcgggctcgggatatccggtgtagaccgcggtgatgctgatccagaagacgttgtcttccgtgttcttgtcactgtaggcaccctgccagaaatactcctgttcgtcgagatcgagcaggtattggaagcaggtgtccgagggcttgccggggaactcatcgagcccgacgcgttcgatttcgacgcggctggcggtggcgctgacgacccacagcaattggccgggccgactgaacgcgtatggtccgccggccgggacgttgctccagaatccgatgcgccaggacgcgggcttggtttgcggcggcgcgtcggcgttccatcccaaatacgagccccaccagtggacggatgtcacgggcatggcgccggcgcaacggaaattgtcggcgacgagtctccagttgctccacgcatagtccgaggcccgactggtgaaggccggttcgtcccatccgcagtagaccggtacgttcgaacccggcaaccattccagcggcggttgggaccatttcagatgctcgaccggtggcttgctcggtatgaaaacgtcctcaatgctcacctgatggtcttccacctcaccgtccggggccggaccggtatagtcgagaccgcgcatcgtgctgaagcgccaccgcgagaatgtcttcgtggacgcggcgccggccggtacgttgaacgtcagggtgttgacccctgaagccagcggtcgatcgatgaagatctgctcgcccgcatcgtcccagtcgttgtcgctgttgaaatcgatccaggcgttgagcacgccggtggtggaggcagtgacctcgacggtggctttgctgcccggggccaggacggagacgaagacgacgccgtcctcatcgtcgttgctatcgctgtcgtcgccggtagccgtgatgtccggctgcccgtccgggtcggcgtcgacaccgcggccgagatagacgcggggctcgatcatgtggcgggcgccgtcactgatgtgcagcgtcggataaggtcgatccggggcgtcgccgaaatccatatccaccgggggcggtcccgtgatgaccagcgagagatccaacggctgactctcgtacgcatgccccccgggataggccatgggcatccacccgagggtgggatgcagccagacggcgctgtcgttccattgcagttgccgctcggaggttttccacccgaacacgtagctggtgtcctggctcgggacctctttgatttcgagccagtacgtggtgccgagtttctggacgaagagttcttcttcggcctcgtcgaagcagatgttgtattggtaggcccgtttgtgattctcgggctcgtagaatttgctggccggatcgaaccagccttcgggaatgttgttggtcacttgtgtcacatcatagctgaacggcaggatctcccgggtccagagaagcactccggggcggctccacgggatcaggttgtccgccggtcggtctgaatagatgttgatctcaaaccgcaggctgtcgacccccttgaccggcgtgatgtcgtcgaggaacgaggcccagaaatggacgtccaggatcggaccggtctcggcgcaacggaaatcctcggccaggctggtccagtacatgtccacgtccatgcccgtcgagcgcaggtcgggcaactgcggccagtgcatcttgtgcgggtccttctcctgccagtcgcagaagaccaggggttccttgacgtggaggagatagtcttcggtttcgccgtcgccgaagacgccgtcaccgttccagtcttccggcacgggtcgttcggtgatcgagaggcgagcccagacgtagccgccgaagggacccagcttgaaactcggaggggtcaaggccgacagcggaccgtcgtaaccgttgggtacagggaagttgaccaggacgtgctcggggctgtccccctcgggacatggcacggcgccctgccatttcccgtcctggttccaatcgaccaggaggtttacgtaggcgtcccgtacgatcggcagccggttgtgaacctcgatatcgatatgattgccccagagggcggtcaggcaggcgttgggcagcgattcgaaaccgctgaagatcaggggccagacctcttcggagccgacggctcccttgatcgtataggcgcgtggtttgagcaagcccgcatccccgtcctgctgttcctcgtcgaggttgtaggtgttgggattgaaggccggacaagccccggcgttgccttcgagttcgatatccaccttgggtccgaagtagaggtagttcgtgtcgtgctcgatccaggcggccggcccgacgccgacgcatgtggggaacaggccgactacgccggaggccggataggccagcgccccttcgggcgcatcgccgaagtctcgttctccgagggggccggtcgggtcgtccttctccatgcactcgtgtcgaatacggccctcaacgctcacattcgagccgcggatgtcgattgaaacccaagccgggcagaatccctctatctcgtgggaggtgttgatgaagatggattgctggacatcgcgtcgcggtacgacgatgtgccgttcgatcaactggttttcgtggctcaggttgatgatatcatacggtagcgggggagcggggtcccctgggtcggaagaccactggcccgtcgtccagttcaaggcgacctcgacggaactgccggttgccgcggccggattgaggacgcggaaagtcaggtccacctcaatgactttgcgacgcgtgctgtcgtagcggccattgaagaaccactgattccaccagtctgtctgggggtagtagaaccaccctccctggtcgaatccggtgccttgaccggcgacgaagtgcccggccgaatcgatgtccaccgagaacacgtcttcgaccgccccggccgagccgacgcccaggcccagcgccaggatcatgaccgcgacaacataccttgaaaaccttaccttgaacccgctcatggcatacacctcccaaaaaatgaccttacgcaaagccagcgcaaccacccgtcggggacgagcgatttgactgcacacttacagcgcgttgattactttatagttccactgtgcaatcgacttgtaacggtatttcctccaacaaaaagcaggtaacggacgttaaaatcaccaccactccctctcctaatgtcatcccgagcccaatctagacgcagtgcggcattatttggggttcaaggccgactttatagggcggtgtttttcccggacctgttgtctcagcgggttatcgggcgtgttttgccgtcccaatgcacgtttgaaccggtatcgcagccaccagtccgggcagggcgcaattctcgtttttccgggaccttgccgacgtgaaaacgggctgatttcgacaacatcgccgataatatcccctatttcagggccctgtcgtgggccggaaacggacggtaacggcatgaacgaccgtgttttgtgtgtgtttcgcttgtacgttagtgatagcaggctgtgtttgttgtgtaatatgcctaatttgcctggggctgggcgatttagtcaaaaagaggggctttactcgagggcggcgcgggattataattccggcattagtcctcggcggcgccattgctgagggtaagaagggaattgcggcatgcaaaacatggaggtcctcacgaccaggaatccacaagcagtctcggccagggcgggcggccccgcaaggatcgctgcgctttctcgatgtgcgtgcaaaggcctggcccatccagcggaaagggtatgagtatgcagacaatcaagacgacgaccccagggtccgactcggacacgagcacgtcatcgaccaagctgcacccactctcgaatcggatcgtcaagtggtatatgaacctgccggtcgatgcgaagttggcggtggtgctgtttcaagagatgttgcgggccgagaagcagatgccggatcgctacttgggcgaggatatccgcagcaaactgagcaatcagatgaaggatgagaccatctcggaggatcgcggcgaggtctcgctgatgcacggcctgttcctgatgatgcagggctgggacacctagatcgggcccgtcgatgggggccgcctgaacaagccccctttttccgttgcatcgaaaggctacggcttttcgtcgagccagtcggaggccgccagcgcgagattatgcaggtccagagcggccttcacgtctccgttgtccggttcaggtttctgctcggtatcgagtgcgccatacgtggtcagttggaaggccatatcccaggggacgccgctgccgtcttcgacggggaagccttgtagccactgatcgccctcgaccgggggccacggtcccggcgtgacttcctggatccaggtgcccgtctcgctgaactgatgcgttcgcgtcagccagccccacgtgtggttggcgcccggccccttcgtgtcgtagatagcggcgatgctgatccagtagaatggctgctcgccgtctttggacgtcggctcgaggggcggatggaaccactggttctgtgagagcggacaactgaactggaagcacgtttcgcccaaccccgcgtccttgccggcttcctgatagcctgcgatggcccaggtccaggcggtgcaatagttttcccagatcaggacgcctgggtggccgaacgtgtcgagagggcccgacccggcatgggggacgtccgtccagatgccgatgtggaagcccagcggctgtaccggcggcaggtgggatgccgtccagttgtggaacgcgccccaccagtgtatcccggtgacaggctggccggcttcgagttggaaatcatcggctgcgatctgatggaggcccagcgccgacagggcggtgacgccgtcgaagagatacggggtcgtcagggcaatcgccgccggtggctggttccattgcagggcggtgacaccagaggtcgggtaaggctcgaagtgccgggtgatctggacggcgtagtcttcgacttcaccgtcggaggccgggccgtcgtagctgagcaagccacgcgaattgaagcggaatcgcgcgaaggtggtgccgaccagggcctcttccgggacggcgaaggtcagggtcttggcgccggttgtcaggagggcgtcggcgaatatctgctcgttcggaccgtcaaagctgccgtccccgtcgaaatcgatccacgcgttgagatagcccagggtcgaggcgacgacctggacgctggcggattcgccgggctccagtagggaggtgaatgtcacgccatcctcgtcggcgccgttgttgtcatccccggttgccgtcgcatcgggctggccgtcgatttcgctatcgacgcttctgcccagaaagatgccggagaccatcgtgtgccgcgctccgttgtcggccaggagcgtggggtagtccggcgcgtcgccgaagtccgacgagctggactgcttgatgcagtcggcgcaggtgcggccctcgcccagggcgacgtaagaatcgacacagtcgcctccgaaggtgacgtagcaatcccccgtggaccaacggcaacagatccggtatcccggatcgccgtcgtccgggtcgccgcccggctcggtgccgtccttgggttggcactcgtgccacgcgccgcgatagatacgcgcattgcggccgatgatatcgatggagatccattcggggttgtatccctggatcgtgtagccgcggaccggctcaatactctcgaagttgcccagattctccaccagatagaaatggtggtcggacatgtacgtgacttcctcaaccatggtcgggacgtcggtgggcaggggaggagagcccgtatccagggccgaccattccggtgtggtccagttgtagtggatctccacatacgacgtcttgctcgggtccaccggcatgatataggcctcgaaattgagataccccttccggtccggatcgtagacgccgttgttgaaccacatgcggtagcgatcgacggtggggtagtagtaccagcccaggccgtcgccgtcgcccatgatgcggttgccgtcgtcgtcgaaggcgatgcgataccagacccccggatagtggctcgggtcttcgatttgggcctggaggggtgaggatgataccgtcagggcgatcaacagggcccacgtcaagaggaatccggatctcgggcgattcatgttcacactcctgtgccaaggtttcgtgcgcgcgcaaagacgctcttctcttcctgagtgattcgtgcgccgatgtccctctcggcgatgcaccggcgcctcgaccactgatgtatgccatcgacagcgccggcttttgggtccagcaaaaagcgcggaaatgcggcgaaaaacgcgtcaccgacctccgaaaagaccccctgaacaactccctataccctatcagaaacgcccactggattcaatgaggaaattatcggaccggttttccggcgatgttcgggcgctcatccccgccccggcgaccccggatacgccggggcgggggcggattgttcctcacattgcctcgtcgaactcgtcccggtaacgggcgactccgccggcgcgtgatttgagggacgtctcgaagaagaggatcaggaaggcctcgtccggcacacaccctcccactggctccggaggtggtaggcgcaggcgcgctcgaagccaaagcgggggtagtattccggatgtccgagcacgatgacgaaggggcatgaccgctcggccagcagatcgatcccacgcttgaccagggccgagccaatgccctgacgctgtcgtccgggctgcaccgccatgggcgccaggcccataccttcgaccagtccctggtcggtctcgatggtcgccgggctgaagagaatgtgcccaacaatctccccctcgtccagggcgacgggcgaaagcacgccggggcagtttgcccggatcttctcaacgatgttcgcctcttcgggctgcccgaacgcctgctcgttgatcgttcgcaccgccggcgcgtcttctggcaattcctcgcgaatcacaatcattcgcagctcacctctgttccctagtttcctgagacgatgtaatagcgcgcccctttgcttgtttcgagaacgtccagacgcatagtcaggttgtggattccatgggtctcgaagtaacctgtccccgcgtagggaaccgtcttcccgtcaggggcgggttccccaaagacgtataccgtattcccgtcgtttttgcagatctcagcccagtttagcgaggccgtcccgggccataggatatgcatttcatcgtagtctttcttcatccgcgcgttccagaaggcttcacatacccctttgggtgactcgggccaatgttctcgcttccctatcaggtcgaaggcctgggctcttgcctgcgcaaatgggtctgtcacgcttggcggggtgacgctattgttggtgcccgtcattctcagcaagatgagaactccaacggacaggcagacacaggcgacgctggcgagaaacatggctgtctggggcttcatcttcatgatacacctctcagtctggaggatagagggggcttcaccgatgcggttaatccgttgggctgaaggacgtaaggaacagttctttggccttgtcgaggccctcttcgctcatcgctacggatttggccttgcccttggggtcggagatgtagcctttctgatgcaggcgattcatggtctcccagtcgaagctcttccaggcccgcgcacctgagcctttgtgttgttcccacgtcaccagataaagaagcgccaacgtgtagtcgtcaaccttgtcactgtcatagtccatcattggtcctttcgtcgcccaggatggttgccaatgacttgcgaaatacggtggcctgacgcatcatgcccacatcgttgggatgaacgccgtcgaccgtgccgtcaccgtcggttcccagcatgttctcattggataggaaatgcaggttcgtgatcccttgggatttcagctcttcgtagatcgtccgaacgatggcccctttctcggtcggtgtcgtattgctgacactggaatcctcggcgagcaagatgggcgtattcgggtgagcctgacgcagtttcttgatgaagggctcgacgcgttcggcgaccatctccgaagtcatgttccagaggcagtccaggacgtagaccgccgggtctagctcggccaggaggttggccatcgccggctccatcttgccattcccggagaaaccgaggttgatcaccggaacgtcgagctgccgttgcacgatggctgtacacgccatgcccgggcgggaggcgcatccgccttgagtgatggatgtgccgtagaagacgatcggcgtgctgtgtttgtggaaggaccttaccggcctcgaaagggcattgtcctttgggattcctatctctatggtcttcacgccattgtacagcggaagatagagcatgcattccgtctgctgtgtcaccgcgaacgaggcttcattcgacaccccgagcggtcgaccgttcttgcgaaagacccacgcgccgtccttgttcctggtatacaggtcgattccgctgacgcccgtggcgggcatgtggggcatggcaaggtttcccttgcgaagggtccagcgaatcttgacagactttgcatccgtcgcgaagtagacgcacatcccggccgaatggtggctcagactccaaaccgggggccgaaccgtctccttggccttggcgggcagacgatcgtagtacgattcggtctcctcccagcccttgccctcgattgcgagcagttggccgtcgtaccacaccgtgttgtcacaagggtcctgcacgccccggcgcgggtcgattctctcgacagcagcggcgccgagcgtaagcggtagaagcagagctgccagcaggcaatgaatcggtctcactgtcgtttcctccaagtcaaacaaacgaactccaaagcgtttctcgcgaagccatcgcgcctcacttccgtttctctatggggaccgcctcattggctgaagcccccgaggttctgtctgtgcgcgggccattcggcaaaggcaatgtagaaaggtagaacgatgttcgcgatggggacgagcatgagcaatgacagggcccccgggaagcccgccttcgtgcaaatcttccagaacggaagcacgttcaacaggatcacaacaggaaatattcccgcgatcacgagcatttcataaaatcccggcatggtatttcctttctccgcttcaagcctatgtctcagttgtcacgggtgttgcgcatgcaacaccctgctcctacggcgtcatgttacacggaaccggtctgcaacgccacgatgatacgtccgatgcggagcatctgcaaatggctttccgtgtcaaatggcgatgtgaacgggcgtgatgttgagggccttgggcatgtcgttgggatcgatacggacgagcaggccgcgatgacccgcgttgatatagatgcagtccagatcgaaaatgctttgctcagcgtagacgttcatggcccgccgggttccgaagggactggtcccgcccacctggtagccactatggcggtcggcgaccttcggttcacacgacgcgaccgatttgactttcaaggcccgcgccagttgcttggtcgagacctcgcagtcaccatgcatcaacacgatcagcgggtccctggtattcgtctccatgaccagggtcttgattaccgcgtgctcgtccacccccagttcggccgaagaaacaccggtcccgcctttgtcgacgtagcggtacgtgaagacttcgaacgggatgccatgcttgagcaggcaacggatggcgttcgtcttgggataatctttctttgccataacggaatcaatcgcgtgcggtctgcacgttgccttgccgttcctccagaatcactctgaggggaccggaatctcaacgttttcagagacgggatagcccaagcaaggctcgccttcgacattccatgtgaagcgttgcatgcgggtgttgcggttccacccggcgccctgatgcttggcggcgtgatagacgatccaatcttctctgccgtcggggctcttggtgaagcaggcgtggcccgggccaaacaccgtttttgttgagctgaagacaggcgtttcctttttcttccatgcctcggggtccagcgggtcttgtcccaccagcttcaattgaccgaggcaatagtcgtcggtccagcttccactggccgaatagatgacaaagatgtcgccattgtgcttcaggacttccggcccttcgttgatgaggggacgacctattctttcccaatcgtgctcgggttcggagatgagcgagcgcggcccgtcaatcgacaggggattcttcatggatgcgatgtacaggttctgccgcacgttcgcatcaccttcccagcccgaccagatgaagtatagttgcccttgatagtccaataccgtcccatcaatggcccacttgtccgatgggtcggtgatcttgcctttgaggatgtaggggccggcgggatcggccgtggcgttctgaagcacgtacatgcgatgattctcattcttgccgtcatcggcggccacgtagatgtaccactgccctgcgagcttgtgcagttcaggggcccacaattccctggagtaggcctgcccgggttcgggacgccagacccgcttgccggtgaattggacggcctcttgaatcgtccggctgcggttgacccaaatgcatccctggtgagaatagcagtagtaatagaagccgctgtcctggatgatccacggatcgtgaccgtcgggggcgacgggattggtcagagtgcggggggcgcctgtcgcgatacttgtcccgcacagaccggctgccgtcagtagagcaatcacgagcattctaccgtgttggatcatgaagtcctttccgaatctctggctgtggcaatcaacgaacagacatgataacgcgtcccggccgaattgcaacgaccgcccacgccactcgttcgccagcgggcgtgggtcgatgaaaatcgcgtccgtttcgttgcggtcgtgaacaggccggttataatcgccgtacggcaggggaatggaaaggatcgaaatttggatgtagagcctttagcagtaaagcggttgcccatccggctggccgccgacccggcgctgacgattactcggctgttctgggccggtcccgagcgggcccgcaaggtgatcgaccgcgttctggcgctggacgaggaccaggtggcgcgcctgctggcttcgaccatgcgggacttcgaccacctgcacatcgacctggaggacatctttctcgaacactacgagcaggtctcgcaacggatccagatgccgactccgccgacggtcaagagaatggtgctcatcggcgcctactttaccctggaatacgcctttgcctcctcggccttgttcaacccgtccatggcgcccgccatcggtcaggaggatctggaaccggggtctctacgcttcgccatgagcctgcgggcggtcggcgagggccatctcagttcggtggtgtttcgtcggggagtgatcgattcggccggtgatatcatgatggaaccgaccgggctgtttcacgagccctcgcgacgagtcaggaaccgtcagtttagcaaggccaagtttcgtatcaggctggcccagatggggatgcgtgacgcgatcctggaccctctgttggagcgactggacgatccgttcacgttccaggacctgctgcacatcgtcgatcgggttcagacgcaaaccgaagcggcctcggcgcacgatcacgaagcccacggcttcgaatggctcggcgcctgtgattacgatatcgagagcgcagccggcgccgacatcaccgaactggtgctcttcccgatcagcgaggccgaatcccggggtatggaggacatgcgcctggtgcgttttgtcgacgacgacgggtcgccgcgctactacgggacctacacggccttcaacggtcacgagatcctgccccagatgatcgagatgccccgtccggggctggcccatgtccgcacgctgggcggccgctgcgcccggaacaaggggctggcgttgttcccgcgccgggtccagggccggtacatgatgagcggccgcatcgatggtgagaatctctacatcctcaagtccaacaacatcctgctctgggacgaggcggtactggtccaggagccccagttcccgtgggagttcatgcagatcggcaattgcggctcgcccatcgagaccgaggccggctggctgctcctgacccacggggtcgggcccctgcgccactattgcatcggcgcgacgctgttggatcgcgaggatcccacaaagctgatcggccggctcgaacgaccgctgctgatccccgaggccgacgaacgcagcggctacgtccccaacgttgtctactcctgcggcggactcgtccacaacggtatcctcgtcatcccctacggcatcagcgacgccgccaccgggttcgccaccgtccccctcgacgatctcctcgcccgactcgcctgaccgcgagacgctactgctctgcgaaatccatttgggtgggctgtcctgccgagaacgtcgcccatttactgcccaggttgtccccggaagactcttcgaggtacaccatgcgccggcctaccggcaatcctgtcggttgcgaaatccacctgggtggcctgtcccgccgagaacgtcgcccatttactgctcaggtcgtccccggaagatgatttgaggtataccatgcattggcctatcggtaattccgacaacttgtagcatccgttttcatcggtcttcgtgctccgcctgacgacgggacaatagctgtgctgcaacttgacgtcgtcatcgtgggtttttctcacctcgacgcgcagccccggtctcggcaggccctgtttgtcgacgacgaccccaaaggcgctggcggccgccggcaagacgatctgggtcggcgcgtcatcggcggtctccaactcgctccacgggccccagtgtggcgcgaagcccggcgcggtcacgtagagatactcttgatcgtcgcttaccccggaaatgacaaagacccccgatgcgtcggttgcaaacttttgccaatgagccggttctcgacgctcgctcaatgcgactgtggcgccctcgatcgggttgccctgtgcgtcaaccacgacgcctgcaatcagggtcgccgtcttgagtcggaacaccgtccgattcgggtccggcgatatgggctgtaccgctacagggtccagcaccagcgcatcgtagccttgggcgagcaccgtcattcggtatgttgcgccgatggggaaatcttcctcctcgccggtgtcgaagaagccttgcgatgattggaagatgaccccttgccgattccacagcgctctgtagccgtacgttggttcgtccaccttcgtagcgctcagcttcaccatgaacttagtgatcggttcaccggtcgcatcggccaggaccttcccatagatgcgcccggcccgacgtacgacgacgatatactcgcctttgccgagttcgaatctttggatttcgccggagataccgccaccgaacggattaagacgaatcgtaccttcacttggggcgttggggatgatgaaccatccctcggcgtcactgacgtaccgcttgtcgtcgaggtttgaagcgtcgtcgtattcgtgaatcgccactttcacacccggcacaggctcgttcgcgtcatcgacgatccgcccatgcagcggcacgcccacgtcaagctgaatgtcgatttgcgcttcgcttgcatcttccaacagctcgaggcgctgtacgtgcagggcatggctcgaatgcacggcccagagagtcagtttgccctgatccacgttctccaaccgataccagccttcggcgtccgtcttgctcgtgaggcagttccacatacaccgggaattggtattgccgactgtcaccccggccaggggccggccgttcggatcggtgacgcacccgtaaatgttcactcctggcttgagaatcacgtcctgatggactgtctggcccgcggcgcccggtgagaaccgctgtgacacggcgggatagtccggatgggtcgcgtgcagagaatacgtgcccacgaccgggctgagaccgtcaatctcaaagcggccatccgctcccgtgacggcggggcggttcgtgaagaagaacgtttcgaccgtcgccccggcaatgggattgccttcgggattggtgactctgcccgccagacgtgagccgcgatccagttcgaccaggatcccttcagtcacctgacctcggacgataggagtgacgattcgctgcgatacataaccgtgggcgatgacgcagacgtagctgcgctgcatcgggtaaaggcctgtgaggagaaaccggcctgacgcatcggtttcggcgtgggtgttggaatcggacacttggtatccgacccgcactccggcgatgggcttctgggtcagcttgtccagcaccatgccggcgatgccggtgacaggctcctgcggagtggttggttccgttggaaggacactgggcttggcagcgggtgcgttgggctcggtggtctcgatctgttccggttccgcctcggccagtcgctcccggatggcgtcgatggccttttggaaggggttggcgttggggtcgccttgccactgggttgcgaagggttggagggctgcaatggcggacgcgtcgccgatttggcccaggtactcggcgatctttgtttgagtctcgttcgtgcctctctggagtagggacaccagccccgcgatatcgccttgctcgtagagggtccgggccagggccagttcgtcttggacgcgatctctgtctttttccggctcgacgaccggcctgtcttccacggcggtcggttccggcgccggttgtggtgcttcgcgaccgatgaggtggttggccaggatgaagatgccggcaatcagtgccgcggcgaccgccagttttgtaatcggacttctcatgatccgtctcccgaactcgatcacggcgggcagtcccgcatgcgatggagttctccgctgcgctcgccgggccagcgacgccaaggcctgggcgtgggcgctttgccacgcggcaaagtccggcctgggcggttcgcctggaaccgttctggcgatggcgtcgtccagccaattggcctgttcgggacgtttcatgatggctgtccttcaggatacccgtttttcttgagcgtccgttcgatctttcttctggcgcgaaagagtcggcctcgcaccgtatggcccgcgatacccagcgtcgtggcgatctggcgatagtccatcccattgtagtagtgcaggacgacgatttcacggtacatcggcgccagttgatcgaccgccgccttgaccagatccaggtccgaaccctccgtctgcgacggatcggcgcaggccgtctccatcggcggtggtggggcggatcggtggcgatcgcgaatcaactgatgggcttcgttccgacagatgcgcgccagccacggcctgaaccgatcgatacgcttcagatcgctcagcttctcacaagccttgacgaacgcctgctgagcggcgtcttcggcttgggttcggtccagaagaatcgagtaggccagccagaccatcgtcgcgtaatgacgctcgtagagcgccccgaaggacgcggcgtcgccccggcgagctgattcaacaatttgtgtttccgtttcccgttccaacgttcggtcaacctgtaggcccactcactgatcagtgacactctatagatacacgggccgcgcgaaagtgcgcagggaaatgcccggagtcgagaaaaaaccgctcggagggtaggagacgcttcagtgcgtgccggctaccgctttcccttatccacttctcacgacctcaacagcggcctaaccgccggcgccatctggcacttctaaggtcccgccttgaggaagctatggcggacgggctgtttcttcagttcggcctgggtgggcagcagttcgaaggactggacgtgctcggtggcggtgaagtggtcgagggtgcgctggatctgggccatggtgcggccgtggagcatggcgaacaggttgtacggccaaccctcgaaggtctcacgctcgtagcagtgactgacggtgcccgaatgggccagccagcggccggcctcgacgatatgcgcttcgcccacctgggcggcgaacatgacgttggcggcaaagcccagtttgtgatgattcaccacggccgccaggcggcgcaccacgccacgctccagcagttcggtcagcagggcgaacatcgcttcgagttccatgccctcgggcgtcacggcgtcgaagggacgcgctgtcaccttcaggcccccttgcagggcggccagcacacgccggtgcgcctcgtccaggtcgacggcctcggccttgggtatgcgctcgacgtcctggagcaggacctcgtcgtcgctctcggcgtcgaagcgcacgtcgagtttgaagatccgcgtcacgggcagactgtggaaatcgatgccgaacttcgacgccagttcgctcagggtcgcctgcacctgggcgggcgacgcctcctgcagcgtgaaccacatattgaagcggtgctggcggaggtagttgtgcgagacgccgggcagggcgttgaccgccgtggtcacttggggcagttggtcttccgggacgtgagcggtcacgagcgtgctgctaaagcccagggcgcgatagttcaccacggaagcgaggcggcggatgatgcccacttttttcagatgtcgggtctcggccagcacctcggtctcgctgctgtcgatatccctggcgatctcggaaaacggctgtggacagagcggcagcccgcgctgcaggcgattgcacaggcgtttctggaagtcggtcaactccagactcatttctcctcccgaggctcgtaccagcataccggatcttcggccaggtagtcgcctgtcatggtgtaggcgcgggcccggcagccgccgcagactttcacgtaggcgcacgagccgcacttgcccttgtacgacgtcaggtcgcggatctcgttgaggaactctgatttgtcccagatcgccgcgaagtcgtagccgttctcgacgaggttgcccgctgagatatccaggaagccgcaggtctgcacgtcgccgcgatggctgatgaacccgaagccacgaccgcccatgcagccgctgatatgtacgcgcggctcctgcaggtttgcctcccgatagacgcgtgcatactgaggtccacacgtcactcgcagttcgatggccaggtcgttcttcaatgccagcaagtcactcagtagctcggcgtattgattcggcgccaggatttcttcccggatctcatcaccccgtcccgtggggaccaggatgaaggggttgaagcagtaagcgccgagttggcgggccagttcggcgatcgcaggcacctccgccagattggtgcgggtgatggtcgtattgatctgaaactgcaggcccgcttcgtgcgtggccttagcggctttgacgaccgtctcgaaagcgcccggcgtgcgccggaaggcgtcgtgagtcgcggcggtcgcgccgtcgagcgagtaggacatcgccaggacaccggcgtccttcagctcggccagcgaggccgcgtcgatcgcgtagccgcaggtcgccatcaccacgcgcaggccctggtctctgccatgccgggccagttcgagaatgtcgtcgcgctcggtcggctcgcccccggtcagaatgatgacgcacttctcgtaggccgcgaccgagtcgatgatcttcttccactgctcggtgctcaactcgtccctgtcggccgtgcggtcggcgttggcccggcaatgccggcagttgaacttgcaccgccgcgtcacctcgaacgccagcaatcgcggcttgtgattctgtagatgtttcttcataggccccagactctatcgaaatccactccaaccgtcaatgcgcaccccttcagcgtgcccagtggccttacgctggtccggcgaattgggtttgattggctctgtttttctcgcataatcagcgttttcagcccccaaaacccggtaattggctttgtttcgcacaattgagtccatcgccaccagccgctcggtacccgccggcccaattgggttcgtttggcttcgtttttccgcccgatctgcattattagcccaaaaaggcagggaattgggttcgttttgcataaaaagggtggctccggccagcccttggcacccgatagggcccgccgcctttgtctcgttgcggagggcagtgctcgcccgacccaggcctgccggccggattgatgagtgagtatttgatatccagttttcatgttcggtggttataatacaaacatcgatgcccggcgtcaagaagaatctcaccgatcctcactttttctgcactttcattttcccccgtgccgcccccgtatctccagctcagacatagatttgacaccctgcctacgtctctgtaggctgtatctgtaaacgtgcttggggaagctatgacaggagacgtcccggacacctgtggttccccgagacatccggttcagagggaggaacatgatgcgcatcatttcagtgttctttgtcctttcggggctttcggtggtcttggcgtaggagggcggcgcagaggatcagtcgcgagagaagttcaagccgccgaagaaccctgccgagtaccgtgcgatgctggagcgagcgatcgccaacatagacaaagagcgagagaacgcgccgacgactcttgccgaggcccatgcgaggctggagcagatgttgtctcccgggacactggctgagattgacgctatgccgtccgaagaaggcatgatcgagtattacatgggtctgggggcgcacatccgcagtggttgggggttggggagcgatttgcccccggcgaagcctcctgcgtaggcaggggcttcgccgggggctatgctatcacatcttaccgattacacgatggcctacttcaagacccttatgcactcttcctacgaagtttcacgcctgccacgctcaggcccagcatccccagcaaaacggcaccggggaccgggaccatctgtaaaccacggacggtcgagatgtagttgccagagagaccgccatccaagtaccacgctgaacctgaatatgaaaggccatacttcctcaaagaatcaggatacccaccagccgagttgttcttgtcatcgtcagagtcggttacgtagatggcagtgtagtaatctgcactgatagggtcatactcaaagccccaggctgtaatcgcgtgcgccatggttcctcggattgaaagaccaatcccgtaaccatcgtgcatccaatcgtcaatatttgaaagtgccgctgaatccgtgccgtccactctcgtgtaatcatcgtgattgagtgtcggatagaatccacctccgccatcaacatcctcctgggcccaaccattcgtagcatgaactgcaccttgcatatcattggttccatcaaaccaccagttccaaccaacgttggcattgccacctgcatctgtgaaatgtgctccgaaatgagcgaacatgtcgtcggtggtagtcattccacccacctggccccaacctgtgtactccaggatattggaggccgatgcagcccaacacaataagtcgtcatcttggtttacatcagtcttctcagcatcggcccaggtaccaccccaggtgtcccagatattatagatatctgcaaatgagctgctggcgagcagtgccacgatccccacagcaacaaatgaaactgcgaacctgtttttcatcaaaatcctccgtttccatgtctccatgtatttgacttaatggagaccttcaattcgttgatggcccgcacgcgggagagcatttcttggctattacaggaccggagggccgcgcgctgccagtacggctggtgcgaattgggatgtccggcaaagtgacgcagtgtcatccaggcgagatggtgcaagagaatcccccaccctggaatccggctgaacgaagcagcgtactggtacagagcagagaatttccggcgacacagcaagattggggccgatctggaaaggaccggcgttgtggtaccattccgggacagagcccagggatgatctccggacccagtggccagagcgacacagtcccaggccgagaagggcgtacagacaataatccagactgcctgatctctccgttaggtctgggccatgttgcgtggctcggcccgttccaccctctgcttccgtttcgggcaaaggaacgatggggcttgagttcagatctgaaagattgaaaggacaagcgaacaaactgtacgaatttgctcctcgaagctgcgcttgctcgcagactcgcgaaacccgtcctctgccagcatccaatgggcagacgggcatcaggtcggcaaagacaccctctgtagcgatcagagccgccgcaaccgcaatgatgaccctactcctgtccgtcatcgacccttgctccgcacccccgcttcttttgctaggccacctagactgcctatatgtcccagtgtaccgtgactcgtcgttcgattccaagaaaaacgcaccaaatcacggtctttccctgttttcgctttctgtatgtctgtaggctatgtcctaaatatgcttggggagctatgtgtggagaggtctcgacaatccggccaactgacccaacgccgcgatcggcggcgcgtgacaggtctctggccgcggtctgcgctggcgatgctgtccagagtgacgatatcggcgataacgaggagacctggaccgagatgaccgtcgagggcgtaggcaaggggactaatggcgggatcgatggtcgtgacatggcagttgaataggtagctgtccgaatggtggtccgtaaagggagttatagataggaactccccggatggacaagggcatgcatataagttgccgcatatgacccttgccgcgagagacaacaagaagtgcctttagaggtgatgttgtcaatcagagcacggagcctccaatcttcacgaaggaaggtggcatgcggctcggacggatcgccattcgttggcgtctctattatccgcctcaccagcgcgggtgggcccaccggcgatacgtgtggtagagggaacaccgagcaaggagatgatcgtgaattcgaggagcaaaggggtttccaggattgtgatcgtcgtcgtgattctgttggccgctgtcggtttgttgcccggtcttttcgttgttcgtactggcatggtagaacatagaagtgcccgccagagactcgtacgattgctcagtgagaccgattaccaaacggtcctggaagcgtgcagggagctgtcgatgcgtgtcgcccgaggacatctcaagcctggcggttatggtgtccggttgaatgtggccccggaggctccggatttccctcaagtgattttggccctagagccggcatgcgtcctgatagaaaatgatggtcgtgtcttcgtcgagatgcttggctatcccagctacggcgtagtcgcctaccctgagggctacagggtcggtccttatggcttgggggacgtggagcttatacccggattgtggtattatcatgaggactacgataagtatgtggattacaggaaggacgtcaactccttggtggaacgaggaagggcataccagtggcggaccctggttgattgcagcccattcacgttaaagtgcttacaggctctcggctgcgggctgcggtttggtcggctgatatgtggactctcaacgcgcgaggttcatggttgatgtgcgccggcagacctgctcgtttggaaggtgtcacgagacgggccccgaagcggcttgtggatgatggcggggcattgcataggggagtgatcctatgattcggtgggcggggcccaccctgcgcgactgagttcgtccccaggtgaggtgttaagagtctcgtaggagttgctgtcatgggcaaggtcacgaaatcacgtcgggaccgcatcattgtcgttgccgtggtggcagcggttgctgctattctcgctcccttcgcggtcaatttcttcgggattctgcgagtgtttcacggtgtacaagagagcagagtccgattgctggataaaaccgatcatgtcgccttgctggacgcctgtcaggaactctcacgacaggttgccgccggagagttggctccaggccggtacgagagacatggcgagcagtgggagccggcgttcgaaccgccagaggtcatccgtgagcttcgacctccgctcctcagaatcgacccggatgggcgtgtggtggtgagcatggccgcaggactaagccaattcggcgcgaccgcataccccgatgggtaccgagaaggctcagcgagcttccactatggtgaccgagaactcatcccgaacctatggtactttgacatggagtaccagagggagccggattacgacaagattgtcgacggaatccttcgccggcacggaggccaatcgggagcggattagcgttgcgagggaattgaaggcctgcggtctctcccgaagaggaaagaacacctgacatctttgaattcccagtggaactgcctgccctggacgagggcgaccccatcgtctggtgagccggcgcggcttgaggattggacaagacggtcgcaggcgcctattgaaaggggtagtattgctgccggatcgatggctggttccatcaatctcttgttgacacggacttggtctctctgctagcgttgcatcaatgaggtgtgttgttccgtatgtgaatacgccatggtgtcgaagatagacagcccgatgtcgctccaggaagccgaggggtgggctgttcattgagtcgcatagccagcagttactgtgaagatctggtccaataggagacaagatcatggcgacttcggccctgacaggcgcgcgggaaatcgtagattggctcaggcacaccgaggaacggatcgggcagttgtatgcggcggcggccaaagtttgttgccacgacgcggcgctgtccagtttcctcggtcagttggcggaggacgagaagtcgcacgccgagttcatgacgcgggtgtgggagcattttcgcagcaccaaggaggctccggtactccgcgttgttcttgacagtgacactcaaaggcagatcgaggaactcttcgagcgatttcagaggctgttaatcaaagcggaaatccccaagcaacgcatcatggagtacgtcgcccgggccgagtcctccgaactgaatcccgtgttcctctacgtggccgacgagtatcggcgggcgggtcgtgaaggcgaacacatgaccggcgagattcaagggcatctgctgcgcatccagaagttcattgagaacctgcccaaggaccagagaccttctattgatgtttgcaccctgccttctgtgggtgagccgcgcttcctggtggttgacgatcatggacctttgcgccggctgatggcgtctctgctttctcgccgtggaatggtcgatacggcccaagggggccaagaaggattggaacggctgaaagagcattttcacgatggtgttgtctccgatatccggatgtcgggaatggatggattcgagttctaccagcgtgccgtgcaatacgacggtagactggatcgacggttcctcttctgctcaagtgacgtgacctctgagaccgagggccacctccgcgagaggaacctgccgtttctgaagaagccttttgggttgcacgatttccatggggccatcgagaagattctgagcagcacggatgtcgttcccggaagaccgacggaatagaagcgtccggcgcatcacagatctggaagtcggccattttcctcgcgcaatcttatatcactgaaagccgcatctctatatgccctgttgttggcgccttcgttcagagaaaccctcaaggcgtatcggcacggcgtgggcgcggggacgcctcaaccaggccggacggcgtccggggggtggacagcagtgtgtgaaacagcttccagcgtttggcggggtcggtcgcgccgccgtggcgttcgatgtagtctttgacgagccgccgaccgacggtgtagttgatgatatagctgcgatgctgttcgatgaactgcatcaggcccatctcggcgcccggggctatcagggagtaacgccgcagccactgcttggtctgggcagcatccatcttgccgtcgagatagcgccgcgccgcctcgacaaccgccccgtccaattcgctcttgagttgcatgatcctgtcgtaggtttcggcctgggccggatcgatgtccagcaacgggaacagtaccgaccgttcgaattccaatcgctccttattgccgagcaggtcgtaactgccatattcggccagtccctctgcgacgagcgccaggggactgtaaagagggaggatcgaaaactcaatccaacgcctgcccttgaccaggtgcttatcgagcagggtcagatgcgtgtggtggcccggatacatctcatgtcgggcgatgcgaacgatatcggcgatgcagaacggcgcactggagttgacctggatcagactgacgccatcgccttgataggtcaccgaggcggcccagggcttgccaaaaacgaactccatctcgaaccgctcgtcggcaggcagcgtgacatgctcccgcgtgggttgccgataggcggcgatcgcgcctttcagcgccttctcgatctcgatgcgcggcatggtgaattcgatccggtactggttgaagcgccagtagagttcgccttcgccgggcaggagtctgtcgagttcgtccagaatgccctggtagtgtgtgggctcccaggccggcgcgacggcgtcgaacagggcccgagactcttcgtcgaaggacattctgacgttcgccagcaggtcgatcttgcctcggacgctgcgcaattgcttatcgatatagtcccgccggagtttttcaatgccttcgactccgtcactgtccatcccctccagttgcctgatgagcgcatcggctccgccccgcaaccgggcgccggggaattcgccctgcatcacgtcgtcggcaggttgccacgcagacgggccgaagtaggcgtcgacatagccgtcgtcatacagtcccacctccagcacaagcttaacatatccctctgcgacatcgttgacgtcagcctggccggctgtcgcgacagtcccatccgccagtagccagagcgccagcagaaaacagcggtgaatcctcattctctcgttcctctcatcctgcgcggtgttccagcatggcgccgatgccgaccaggggagggcggtgttggcgtgccaatgcccgctcgattcctcacgatgtcatttgccttggattctcttggtaaatcggaaggccggccggtgtggcctgaaaaaaagtgaaaagatacggaaaatcccttcccggagggtcccggtggacgtacaataaggagtgaatgatcactccggtcgaaagggctggtattgtggctaggagcaatagtctttcagagaagaagatcgccattctcgaggcgacactggtgttgattgccgaacaaggcttccacggggcgccaacttcggaaatcgccgagaaagccggtgtggggatgggatctctctatcggtactttgaagataaggatgaactgatccgagagctgttcgtgtacgttacggagcagtcgcgacgggccatcgttaaggggcatgaccctgaggcgcccttcagggaacagtatatacacctttgccgcaatgcgctgcggcatatggcgagccatcctgacatctttcgctttgttgaacagtacctgaattcgccctacggtgttggcgagcgacgtgagaagcttctgggcctgggcagcgtcagcgtgacggatgggccgctggaggaactgtttcggctggccagggcccgtcaagtgacgaaggacattccgctaccggctgtctatgccctgacgttcgggccgctgttcttcctgattcgcgacgtgcacgccgggctgattgaggtggatgatgagatggtggaacagaccgtggaggcctgctgggatgccgtaagacgctgaccagcggccggaatgtagggtttctatgggagaccctgtttttttgccgcctgtcggagggagggctcactccggaaggcggaaacgccgggccgcaaagaagccggcctaggggaatagagatatgctgcactacaaggatcgcgagcgtaaagtcgacattgttactatggaccgtgtgctggctaccgatgtctacgagaggttgcgcgcgtacaagccaatggaatcggttgaagtggttcgcccgggtcgcgggggcgacgagattacggtgcaggatgtcgaacagttcgttcctgataccacgcgggccgccgtcttgatcatcgacgttcgctatcagacacgagcgaagctcaggaacgcttatggcaccatggttcggcggagtcgtcccgatttccatacctattgccataccgtcgtcatcggtgggggaccgttcaatgtgtttcggccgggtatggccattgaggcgtttcgcaactacctgctcgagatgcgaatcgattacagcccggcggtgtgtttcgtcgacccgttccttcattatactttcgacgagatgcaggagcgggcgctgtacgaaaacaatacgctgccggatcggataccgaaaaatctgcagaagcacttcaaggcgaacaaactgggggccgagcaactgcgggcctatttccgcgccgcggacgtctctgagaccgggagggaggggcggagacgcaagaggcagaagatgctggaaggactgtatcgccggttagtgcataaggacttccccgaccacgaggaggagttggtgcagaccttggccaaggaggggtgtccactgctgggcgaaacgctcgcgttcaatatctatcccttctttttcgccgagtgggtgatggatttggtgcgtaaggttgatgcgaccaggtctggggggcaggccctgcgaagggactgtcgcgtgccgggcgccaagagcgcgtgaggatgttgatacgcaggttgccatacatatttgactgggaatcgtcatgagagtcctaatgcttttatatatcgtgtcctcctcgctgtgccttgagcccgcagttctgaggcgcgcggcgcagcgttgaccggcggtgacgggtactggtgccttcggtcaaggcagtgacgccccgggtgccgatcagtgaagtccttgtcagtactcccatgcttcagaagctgatcgtcgagcagtgtgacagcgatctgcctgtggtgattcgcggcggtcgatggtggcgcggatgccggccaggggcaaggcggcgctggccaggtagccgggcagttggcgtttggtgccgaagatccactcgcagacgtcgccgctttggaagtcacgcaccatgtcgatcacggtttggtcggccagggcgggatcgaccagatcgagcgtgtagacgaaccatccggtgggtgtggcccagtaggcgccgttctggtaggtgtcgcgaccacaggatggtttttcccagtagagaccgccgggcaggtgtcggatctggccggcctggacgatttgtgcgtagtgctgctggaaataggtggcgacggcttttgattgcttgctgtcggcgacgcccagatagactgcaaaggctgagccccagatgtcatgctctcggcactggacggtcgcggcgcggaagagcccggtatcgcggtcccagaaggttttgcgaatgctctgcacgacacgttggctctccgcctgccacttcctcgcgtcgtggtcgcggccgagcgttccaaacaggtccgccagttgtcgagacgcctgcacgtacagcagcgagcagaacaggacctggccctgcttgccgatcgtgtcggtgaagccatagggacatcgctcctggggttcgcctggtttgatacagacgagccccgtatcgggacggcggggaaccgcgttcattgtcttgaccagcggcgcgatgatctctgcgagcaaatcggcgtcctgggtctggcgataggtgtgccaggcgaccgagacggtgaactgtgagccatcggcgaccggatgcgtgcccatcgaaccgaaacccggcttatagatgggcgcgccgtcgaacttgacgcagtcggtgccggcgccgtcggcccgcatcttgcgtacgaagagtcggcacgcgtcggtcagttccttgtcggaatacgcatcgatggcgccttccagcgtatattcgtagtcgcgcagccagaaggcttcgtacccgagcccgacctggggcgggaaggccgcagtgccgtcggccattgtgcgcttcgaggctcggacgagacggtgcgcctcgctctccagccatgtcacggcttcggtgagcgtctcgggaccggtctcggtcgcccgaacggttcccatcgggacaagggcgacgacaagcaacactccaagaaaccatcttcgcatacgaatctctccttgggaactgttggactactcccagaccagacgggcgagactgacgccgcgcttgggccactggacgctggagatgtaccagtcgccatcttcgccctggaacacttcaggggcgtgggcgtccagacgggtgacgagtttgtcggtgtcgaacgaatagggatcgtcggattgatagacgtaggtgacatgctgataggcgccgttcagctcttttttgtcccagtggccgtcccagccgcagacgaagaggtagaacgtgtcattgtagcgaacgatcgagggcgactcggtgtctacgttgtccttcttcttgaggatgcagcgcgtctgcgtgcaggtcacaagatcgtcggattgcgccataagcacttcgtatcggccgcacaccatgatgtgccaggccccttgccagaagatgacactgggatcgcgtccggccggggcgttcgtcaccgggcccttgggagtccattggtgcaggtccttcgaggttgcatagcgcagcggggcgggcccgtagatcatgtgatagagcccgtccttccggatgatgtagggcgcgtggttcgcttcgatctcgcccggacgctcggcgggggggagcaccttgggcaggtccttccatgcgccctcacgcaggacgtccttcaagttacccttcggcgcctgggcatgaaacgacaggttttctcccgcgtggatctgatcgaacggggtacgcgggtgtgtaatgccgaacgcatgccagcgtccgttcgggcctttgacgaagcagtggtcgttgggcacccattcggggtagtactgccccgccttcaggcccgcgacgtcggggcccggaaagacatcgccggccggctggtagatgtggacgtagggcccatcaatcctcgggatacgtaccttggcgctggttgctccgcgctgcccaagggtggtccggtgatgggacgtggcctggacgatcttctcatgtgactcgtagggccggtacatcgctcgcatgacgaaacggtaacgctggcccacctcgtagttggggatgaaccactggaagtcccaggccggattgccttggcctccccccgagggagactggctcagacgcacctgatcgcgcgggcgaaagatctgtgccagggtcatatcatgactgatgccataataccagggctcggtgtagcggtagcgcgagcgattgaacacgagggtcagtgggaagtttgggtcgtgcttgaatgtgcgactgtcgtcaagagccaggtgtgtggcgcgcacgccatgggcgggtgtcacgccgcgtatccagcgacggctcgcggccggttcgtcggcgggtcgaccccaaaagtgaatgtccagggatttgggttggtggatgtagctggcgaagaacaggccgatgtagtcgttcgcaaaggttcgggcgtgggggacgcattcgagggtcatctcgatcgcaccgtcggggagcagttcgtaggtcagccagctttcgagtttccagtggggtgtaggcggttggtgcagcgccgcggtatggtcatcgacctgtctgatcgtcatcggagcgttgcgaggctcgaacagaatgttcctcggctggacggtcccatcgtggatgtgctcgaagttcaggccggcgtagaacgggacgaatagattgtcttttcgcttgcggtgggtcagcgaggcgacgccactgtatccgcggcgatggccggggagtgtttcgtcgtcgactgcctcgttgttgacgatcaccgccgttacatccccgcgctggagcacaacatacgtcttgtccgcagtcccggccgggagcgaactgcatgtcacaagcaacagcaatgcggcgaacgagaggggagcgtgcatcggaaagcgcatttcaaaccagtttctcattgggcgtcctccctattcctgggcctgacgagtacggggcgattatagcagagaaacttggagtaaggcaacgaatgcctggtggtttacgttcgagacggcggatgtaaggtttccttctccgtcgtctcccgagacgatcggctcgggagacgaacacgtgtgtattaaactgcgccttcggctctgctgggctcagtcgtcgattgcgttcggagtgggctcgactctcatgacgccgagataggtgaaatgataggagttgtcattgttggcggtgggggccaggctgatcgtgatctcaccggccgcgtccggctcgatccccgtggccgtcacgaagttgtcgacgttagcggcgacgtccagggccgcgaattctgcgttggcgccggtgagggtgtagcccgtttcgcggttgtcgcggatgcccatgcgtgaggcgtagaaggtgaagtcgtacgtcagcagcgggtccagccccgccagcttgaaactggggaagacatcgcttcggccgctgaaggtctccgtgttgccaaagagcgagtcgcgcgtggcgtcggtcgggaagagagcgaattccaacgtgccactctggttggcgccgttgaatcgactcagcatgaccaggtcgatttccgtcgttctgccatcgacggttgtcaggttgagcaactgacctgagtccgaagcgccgacgctctcggtgatattgttccatgtgttctccgtatcgctcgtcgtcggcgtactgcccgatccgaaatcgaagagaaggatttcgggctgcacctgtcccgaagctgtggcgcccgccgccagggcattgcccgccaggtcttgcacgccggtgacactgacgtcgaaggtggcggtcagacgctcgctcagcatcaggacaacggtttggccgtccgcatccagttcagcgctgatgacggcaaccgccccttcattgacggcgtagttgtcgatctgagtcacggtttcggggtcgagacgctcatcgaaagaaagctcgatcgtatatccgttggtgctggttgccgacagcaggaccggggcgttcacgtcgggcgccactgtcaggacggctgcgccgctggtggcgtcatagagcaggttgctgacgctgacggagaacgcggcgccgtccaggtcgggtgtcaccaggtcgatggtgtaggtaaacgcgttggcgtcggcgatagcctggccatcctggaaccactggacgacatacgggggcgtgctgtcgaccttcgcttggaacgctgccgagcgatactccagaaccctctggtcggccggttcctcgatgaacacgataggcgcctgctcggggatctcgtccatttgcatcgcgccgaggtagatgaaatggtatccgttgttgttattggccgtcggttcgaggctgatggtgatttcgccctgttcgtcgggcgtgaccccattggcgatggcgacgtcatcgacgttgttggctgggtcgagaacgacgtaaaccgaatcagcgccggagatagtgtagcctgtttcgcgcacgtcgttggccccgagacgggaggcgaagaacgtgaagttgtaggtcaatgtcgggtccaggccggtcagcttgaagctgggcgccacgtcgctgaaaccgttccagtttggtgtattgccataaagcgaatcgctggtggcgttggatgcgaattgggtcgattcggtggttccactctgattggggccactcccgttgaacgggctgagcatctgaaggccgatctctgtggacgtgttctccgtgtcgaccaggccgagcaactgaccggtctctgcgccgccaatatccaggatgacgttgttccagaagtgggcaggatcgtccggggtcgggccgttctgggtgatggtgttgacggcgccgaaatcgaaaaggaagctccgcgctcccggcgacgcccaggcggccagtacgggagcgaagaccgattgccacagttcgtagccggcggcattcatatgccgcatgtcactgccgaacagttcggggcgcggctgaccgctgtcgttcagcatgggcgtcaatacatcgatgaaccagaggtgtggatcgttggcggccagttgctccagacgttcgttgagttgcctggtgacttccaggtactggctccggctggggctgggtttcgtcgcgatgaagcccacatcggcgccgggcaagtgctcctcgaccagtgccaggaattcgagagtgtcgtcgtagactacgtccaccgacttgccgccggccaggtcgttgtcgccttcgtagacgaggatcagggccggatcgtaaggcgcgacgatgcgatcgaagtagtagagcaggtcgctcatgtgcgagccgccaaagccacgattcatagcgggatagtcggcgaagtcgcccggcaggtcgggccagacgcggatgctggaggagcccacgaacagaacggggtcggccggcggggggctggccagatccgcctgctcgaacgcgcggatgtcgttctcaaaacgcgtcgggtcctgggcctgggcatcgagaaggggcatcagagcaaaggctaacgcaagccagctgaggaagaaggggcgaaggccaggtgtcttaagcgattgagtgacggtgaagtccgtgctctcgttcataccctgcatctcctctttctaccccgagccctgttggggctccgactcttccccctcgaccctcctcgtgccatccgcggagaaggctaacgatgtatgcctcatcataccacaatcgccaggcaaccctcaacacctctgtccctcaattcgccgactactgctattccgacgggaactcagacgtcacggtgtcatgaccttgagtttcttgatcgggccgaagagggcggggccgtcttttttgggggtttttacggagattgtgaattggccggcctggttcttgcgcaccgataggttcctggtgcgatactggcccttctcgtagttgaaggtcttgccatcgtcttcgtagagggcgaaacggccctcggtcttgccatagaaacgcacttccagggggtgaccataggcctcttcggtctggttaaccgcttcggtgagcatcgggaccacggcgccttccttggcgaacagcggcatacggtcgcccaggtccttggcggtgacggtgatcgtcttgttgttgccgacgaacttgcctgtgtagaagtcgtaccagttgccggccggcagttggacttggcgcttgatcgcctggcgttcgtagaacggcgcgaccataatggagggaccgaacatgaactggtcggtcttttcgatgatcttgcccatcgcgtaggggttggtctcgctgtcgagcttgccctcgatgacattgccggccagttcgccaaacccgtcttccagaatcatggcgcggatgggcgggatgcccttgaagtgatagtcggcgaacgcgctgtagaggtagggcaagaagcgcatgcgcagcttgatcacgtcacgcaccgaatcggtgacatcgccatagctccagggcttcttgccggacgaccatgcgttgagctgggccatgggcgagaagcagacggtctgcatgcggttgagccattcgcgaccgttaccggccgagcgggcttcgggggtccacaggaggccacccaggctggcggtggacaggcccgtgatgtattcggcatggccataggaatcgctgtagatgacgaacgggtagcccgaggcggcgccgttgctggcgcggaccagaccataggtgcggacgttacgcttcctgaacagatcgttgtagagcatgttctgcatgagcaggccgtaggattggcgcatcgcttcgcccgagatgcccgatgggaacgtcgcgtggtccggccagagccagaaatcgtagccgtccacctcatcgattttgtacccactgatgccaatgcgaatgtggtcctcgtgatgctgatcggtgagcaacttgcgggccttgggtagggtgtagtccgggacgatgcccagccagaccatgtgcgagccggagagcggatacatctcgtcgtagatgcggctgtgcttggagatgtaagggttctcccagaggttcaggcgaatgccttggcccagcaattcctgggtgaacgcctcggggtcggggaagcgtttcttctgccactcgaacgtgcagggataggacttggtcatccagcccggctccagaccgatgacgtcgagcgggaagtctttttcgacgaactgcttcaactcgtcacgcgtctggtcggcgttgaaacgggcgtggacccggtgccagaatcccaatccccagagtgggggcagggcgccgccgccattgtagagattgtagcgactgacgacgtcgagcatcgagtcgcccgcgaagacgaccacctcgagccctgcgccgttgatttgcgcttcgacggcgtcacccggtggcatggccagccagggccccggctgcttctcgtccttgggcggattgcggtccacctcgggtgggttgtggcccgagtccttacggttgcccacctggttgtagatcttcaggaatcgagcggtattgaagaagacgccgtagcccttgctcgagatgtagaacggcacgggggcgtgggtgcgcccgccgcctttgttccagtggtccacgttcagggtcaggatcttgcgggacttcttgatcccgtcaaattgcaggccgaagccatagagcttctcgtcggcgtcggtggggatgcggatcatgaccttgccatccggcgtgacgagataggtggtttcgcccggcgcgaacgggaactcgggtttggatagctggttcagcctttcgagtctcgggccggctgcggccaggtccgtgtagcgcaactcaccgtccatctggcccagttcggccttccagatccccggtgcgacgttctgccagggcttgacaggcgtcagatcgctcagacccgccgcatggcatggagcaaagagaaccatcagtacgatcgcgatgagaacggcgcggagcattaaacgagtcctgaccatcggtattcctttcttcgatcggggtcttctcaggcccacattcgcggcgccttggcatacagcgttccccaccataccacactatgcggctgatttccacggcttccaagggttgctttgtcggttgccgggcggctagaacgcgtgcgagagggacaggccgatgttgtagattctctggtggtaatcgatgtcgttcacctcgcggtcgccccaggcgtggcccagcaccaggtccaagaaccagtcgttgcaccattcgtagccgacgcccagcgtgaggttgtggcggtcgacgcccacgatgttcgagaggctgacggacttgtcgggcaggggggattcgtcgaagaaatagccggcgcgaaaggcccagcgcagggcgggcttccattcgagacccaggcggtagcgatcggagtcgcgccagtcggaggagtagtcctgattggccagcgccacgccgggcgtgtcgtactcgatgtcgatatcgaaggtggaccagtcggtacgctgccagtcggcggtgaacgtcaggttggtcgtgtgccgataggcggttcctaggccgtaggtggcggggtggcggaacttctgtacgaagccgctggattcggatagaccgagcagcgtcaggctggcgcgggcgtgtccatctagatcgatgacgccaccggtgcgatagacgccgcccaggctcagcttcttgttgatgtgatagagtccgccgaagatgccctcgaagcccgttccgtcggagcctgtgtcgagggcgtagctgtagtcgctgatgcccgaatcggcgacggtcttgttggcttcgtattcgacgtcgccatagaggacgtccaggccggcgcccagggccagggcgtcgttgatctgccgggccagggagaaattgatggcgatcacgctgagttgctggaagagttcggcggtgatggtgccgccgccataggggacgcggtcgtcccagtcgacgtagtagccggcggggatgtagtagccggcggccatgttgaagccggcgtaggaccagtagcctccggcgccggctgggatgtagaagtcgtagttgaccttctccttgctgaagcgcgtgggctccatctccggcgcatactggacgaagatgtcacgctgaaagcgcgggtccattccggccaccggcggattggcgatactattctcatcgcgcatctcgatatggggactgctgaagtcgaagcccgcgccggcgccgcgcagttgggtcaggcccgccgggttccagtagatcgccgtccagtcgtcggccaggccgatgaaggcgccgcccatcgattgggcgcgactgccgaggccgccccattcgtagccgcccgctccggcagggtgggtcagagcaaccgtgagcgtgaggatggcgacggtcagaaggcgcctcttgcgttggtgggcgaaggtcatcaaagcggttcctttccattgtctttggggatcgatgtgtcttgttccggcgcgtccagcacggcccccggttcccagagtttaaggattgccacgcaggctggcaagacaaagacgtcgcccatccaggcagcgatcatggcgaccgcggtgaacaggccgaagtactggatcggcttgaagtccgccagcaggaggacgacgaagccggcggcggtgacgatcgaggtatacgtgatggccgggccggccttctggaggctgttccgcacggccgtaacggtcgccaggctgtgccgcttctcatcctgatagtgagccaggaaatgcaccgtgtcgtcggcggcgatgccgatcgcgatgctggcgatcatcaccgtggcggtatcgaacggaatgcccagcagcgtcatcaccgcgaagacggagaagatgggcaacaggttgggcaggatcgcggcgacgagagctcgccaggagcggaaaaagacgccgatgatgacgaggatcagaccgccggccagcgcaaaactgcggatctgcgtttcgatcagcgactgctgggcggctttgctcagcggcgcgatgccggtgacatagtgcgtcgccggcgctgggatcagggcgctggcttcctcttcaatgaagtccagcagtcggtagtactcgctgttggcagtgcgccggatgaagacggacagccgtagcgagatctgctcgtcggcgcggtgaacgtaggcatgcagcatgggcttgagcggattctttcgcgccgccagcgaaggcaggaagacggggatcgggacattcttgaagcacgaggcgatagtgcggtagtgcatgaccttggccacctccggtcgcgtggcgattcggttgcccaactcctccagtgtcttgagcatcgtgctgccttgctcggcggcggtcgtgacgcttatctcggccgtgtacatcccggtcaggtgcgcgccgatgaattcatagtcgcgccgcagtgtcgaatcgatggggaagaactgcaccacgttggattcgacgcgggcccgagcggtcaatccgaccgataccaggaagaccagcagtgccagcgccaatccggggcctcggtgtcggcatacgaattcgccgaccgccgccgtccagtggggtcgggccagttggggaagacctgggccgcggtgcagcaggcagagcatccccggcacgatggtcatgttgaatacgaacgacaggaggatgccgatcccggtgaagatcccgaactcgacgacgggttgcatctcggaaatcgccaaggcggcgaaccctaacgcggtcgtcacgttggagaggaatacgggccgcatcacttcggtcagcgccctccgcgccgtctccgtcggacccgtttcgtcggagaggtgggccaggaagcgggaggtgacgtgaatccctccggacagtgacagcatgaatagcagcgatggcatgaccaccgtgatcatattcagcgtcctgccggaggcgaccagaatccccatggcccagagggtcgtgacgcctaccgcgctgagaacggcgatgacgggcgagatgcccctcagcgtcacggccaggatgagcacggagagcaggatcgctacgggcagaaagcgttgtgatgtccgcgtcgagccgcgatccagggccacgttcagcaggggggcgccggccatgtggatcggcggaccgccaccggtcgccaccgccgcctcgatcccctcgatcacggctgtgcgggaggcggcaccgtcgacttccttgaggtagacgatcatgccgaaggtgcgtccgtcggcgccgatcaggaagttgcggaacaacgtgttctgacggatcagatccgcccagtcggagcggaagtcggccagaatctcggccgcggtggcgagggtgaatacgttgtcgacgttatcgatctgtcgcaaccgctcggccaggtccttctgaaaggccaggcaatcctcagacaggggatcgtcggcctccccggccaggacgacgaattcctcgttgccatatttgttcaggaagtcacgatagtcctgtcgcgcctggttccgctcgcccagccagacttcggtggcgttatcgattcgcgcgtcacgcagcagatagagggggacaaccgcgctgagcaggcagaccaaggccagccagcggcagtgggccgctacgaacccggacagcttgtcgtcggttttgtacattgtgggcagcaccgtatccagttatctgcagcacgagaccttagcaaagatcctccccagtgcaagcgcaaactgtcgcgaccgcgcggcgccatcggcaagaagcgcaagacggtaaaatgctgaatcatggacgccggctcagtgtgcatcgctcagaactggggatgcgtgctttcgtaaacgccgggtgagccgccgagggtggtgctggggcgccaggccgtttgattgcccagggcgttgggatcgagcgggggaggatcgatgaggaccagggagaatccctcgccatcagtggagcggcgccacttatcgtcgtagcggaaatcgacgatggtccggccgatggcgtcttcgagccgaagccgttcgcccccattgtcgagcttgccggcgtattggcctgcgatgttgatcgcgtcgccatagaacgaatgaaaggcgttcgggtcttgtacgacgatgaccgcttcgccaggcgcaagctccgtcgggccgaatacgaagtcgatcccggttgtgaaacgcacgaggttcagatcgatggttacgtctcccaggttcgctacttcgatgaactcggcatcgggctcgactcccgtcgcgacatcgtcggcagggtgatacatgatctccgtgatgcgcaggttctctacgacgggcccgacggcgaacgtcgcctcgttcagggcgctccaggttgcggcgctgagcgtgcgggccttgacctgggcggtgcggtccagcacgatcgggccggcgtaggcctgcgccgttgtcgcgacgtcggccggggcgccgccgatggcggcggtcagttcggcgccgatcaggaaatcggaactgccggccgagacgttcagcgcgtggatggcgagcagattgaggtccgagcgcagtaggggcaaaaaggccgagacgtcgatatattccaggccgacggcgtcggcgtcggagtggcccgcctcggcgctggaattccaggcgggctcgccttcgaaattccgccgggcgatttccgtaccgttgagataggcgacgaagccgtcgtcgtagcggacgcccagggtcatcgcgtcccagtcgtccgcgagtgtctccggcgtgaaggatatgcggacatagcacgaggtgtggctgccgtacatgagatcgtgcacgtcggcgctgatataaccttcatagcccgtggtgttttcgtagccgatcccgccgggcgtcccctcgacggcggtccagtccgccaggtcgtggcgcaatacctgccgccatgggtctccgatgtcctccgtcgggaccagcatatgcttgagcgcctcttcgccgacgagcgtgaactcggcggcctcgctctgcggcggcgcgggccggcgcgggtcggcgccatcggtggtgaaccaggtcacgccggtcggggtggtcatctccagggcgaatcccgtcgggaccgcgccgccgtgccggctgaatgccggggccgcgacgctgggatagaggccccgcccgcgcagttggttcagcacaatgtcgctgcgtcgggggaaatactcctgggtcaggaaatcaagttccgcctgccactcgatatccggcgtataggggtcgtcgggttgatgggcgtcgccccagcgggcggactcggccaccaaggccaggcgaatctcttcggcgcggtcgagccagcgggccaccgcgttttggggggtgagcaacccgccattgaagaagtggcggtgcacgcggtcggcgaactgcatccggtagtcggcgttggcggtcagtcgctggtggacgtgtgtgggctggttgttgttgtccttgccggtgacattgtcgttgaggttcaggaacgtccgctccgaatcccaggagaggaagtggaacccgtcgccgccggtgcgccggcgtccgccataccagttgttgtggtcccagtccacgttgcccgcgtagaagtggacgagcaggtagtcgatcaggttggggatgtccaggtactcctgaatctcgtggtaggcgtcggccgaggccaggccgcgatcggcgatcgccatcatggcgttccaggcgttgcggttgccgtcgacggtgccgcctttatgctgcacgacgtcgtactcttcttcgacaccgccgaggtgctcggcgaagaaggcggcgttcggccgctcgatcgcgtggtagaggccccagtacagaccgttgagatagaggtggacatagcattggcccgcactgagccggcccatcgcgcgctgcgtgtcacggggccattggtcgcgaatgtattgggcccgaatctgctggttggtgttggggtggaaccaggagtcgccgttgccgccgcgcaggacgatcgtatcgaaccgctgaatgggccagtcctcgaagagcgggaactccagtttggttgggccgtattggcccttgaacagcaggcggaggttgtgcttaggtcggttcgggttgcggctggccccgccctggatgcgcagggccgcattgacctgaatctccgcgccgccggccgggtcgatgatctccattgagaccggccgctcccagtcttcgccttcgctctgcgaattgacgtagatgccggtctccgggtcgaacaggtcgtcgacgtccagcgtcagcgagatcgttcggtgggtcagcagggcgacgccgacggtgtcccgatatggcggatacctgacgatggtcgggtccatttcgtaatccgctgcgccaccgcgccaggtgggcggaaagccttccgggttggggcgctgctgggtcacctggtcggcgaagatataggtgtgcgtccgcgtggtcgagggcttccagtccgagcggatcgccttggccttcagacaggtggtttcgtcgatctcgatcggtttggtatagcgtgtgccgcgataggcgcggcccgtccatacgtaaggttcacttccatcggtggtgtagtagatcgttgtctcgggcgtcgccgtcgtgagcgtcacgagcacgggcgcctcatagaagccccgctcgggactgaactgtacatcgtcgacgaatccctcgtagatcttgacgttggcgccgcccggcgtgggttgggacatgctgtgccaggcgtcggcgccgtcggggtagcggccgaacgagatgtccgaggcctgctcgccaaacgtcactgtgtcgatcggtgtcgcgccgtcgatgtcgagaaggacgatgtcctcgccccgagcgctgagactgaagggggcgtgcagacctggttcgtcttcggtatccccatcggcccagatgagcagaaagccctgggccggaaccgtcgtttcagcggaccggtcggcggggatgcgccacttgcctggttcgtccgggtcgtcgcttagatacatgcccgccatgtcgattggtattcgacttgtgttgtagatttcgatccagtcgtcgtattcggattgggggtcggctatcgtgctgctgttggccgccatgcactcgttgatccgcaaagggctatcgatggcgtgaaccgccgacgccaggcatgccatggcaagacacgctctaaggagccaccaccaacctctcaaacgactgggcattgcatgtttccatgtctaaccgcgttttggaccgataccgccggatgccgaccccgtcgggattgccacgtccccaattgtagcaaaagagaccctcccggggcaaacattgcttcatacgatcggcatgtgtgctatggcgccgcctgcggatcgggctcctccaactcccaccagagccgggggtagtcggcccctcatcgatccaccggatctcttcgcttccgtcatcttctgatctcctcgtcccaatgccgtccaccggcagattaccggccctcgtcgtgtctctcgagcgaaggtgctgacagggaaatactcgttccgcgtaggtttcagtataccggatcgggactgttcaggtcaaccttggtttgtgcgggttgtgggagggctttgcggggggatgctcgtcatccgcggaagtgcttggcgatgtagcggcgcacggggcattggcagatagttgttcgtccgaacgccatgccatggcgacagctccacccatcctcatcctggcagaacagcacctgttcaccggcggcccatttgacttctctgagcttctccagggccgattggagacactcgtgtcccctgtcgcagggcgtattgcggacgagttcctccagcttttcgcggtcctctcgggtcaaatccaccgtgaagttctccagtcgtcgtgccattgtatctggtgatattgtgtcagttgtaccggtccggctccgtgcgtgttcgtggattctcagaattccgcaaggtctcgacagcgcgggcgggactggtgacagaggccatggacgcggcttcgataacacctataatggcatgggtctctccttcgtgctgagagggatctgctagacgatggctttttcggagatacgcgctcatgcggcatacatcactgccgaccgacacggttcgattgggaagaatgtccagatggatactggtcttagtctggctggggcttgcggcagtggttcgaccgggttggtcgagcccggcccaatggcctcggacgcgggccgagcggaccggataccgggagacatcctcccatgccgacgtggtggcgtttctggagcagcttcgtgcggccggcgcgccgatctccgtgagcacgatgggcgccagcgatggggggcgatcgattcccctggtcgtggccacgcgacctctgacgactgacccggtgcaggcggcgcgggactgcaagcccgtggtgtacgtgcagggcaatatccatgccggcgaggtcgaaggcaaagaagccatgctgatgttgctgcgcgatctggcgcaggagccggccgggcggggactgctggacaagctcgtcttgctgacggcgccgatctacaatatcgatggaaacgaggacctcaagccccaggcggagcaccgctcgcaacagtttgggccggagagggtcggccggcgttctaacggcgcagggctcgatctcaatcgcgactatatcaaactcatggcccccgagacaaggggcgccatggagcatgtgttcatcaagtgggacccggacgtatttctcgatctgcacgccacgaacggaacgctgcatgggtatcagttgacctacgcgccgcctctgaatcccaatacggagccctcgattctggaatacacacgcgatcgactcttgcccggaattcgtggacgcctcaggcagcggtgggggatggagacctttgactatggcaatatcttcgtctacggccggcccaagccctcgaccgatcgtatcgcctggtacgcccatagtccggagtttcgtttcagcaccagctacgtcggtctgcgcaatcgcatcggcattctgtcggaggcgatgagtcacctgagctttcgcgaccgcgtagaggcgacgtaccgattcgtgcgggcgattctggagcaggtggcgcaggaggcttcgacggtcctggcgttaactgcccaggcggatcgtacggtcgtcggctgggggcgcgaccctgcccgtgcgccggcgctgggcgtgcgctttgccgcggcctcgcggggtcgggaggcggtcctgctggaggattatggcgatccgaaccggctgggccggcgtgacccggctcgaggccccggcccgcccgagaaggtctctgaaatcatgatgcctgtctacgaccgctttgtgacgaccgagacgtcacgatatccggccggttacgtcctggcgtccgacctgacggaggtggtatccctgttgcagcgtcacggcgtcgcagtcgagcgcatcgaaggtgactgggaaaccgaggcggagaccttcatggttgaaaccgtcaagacccggccccggtcttaccaagggcgccaattgtgcgaagtgcagggccacttccagagcgagcgccttgccgtacgggtgggcagcttctgggtttcgaccgcccagcctctggggatactgattttcagcctgttggagccggagagcatcgatggtgtcgcggtctggggattcctggccgatcatttgcaggaaggccgtcgctaccccatttggaagtgctaccagacgccgacgggccgcacccgatccttggattccgccgtagagtccgctggttgccctgagaggtgagtttttttcagaccatgattgcctttctggccccaattaggttatcatggccttgtggtgttctggggacacaagccggaactcctcgtgtgtggcgtctgagagcgtgtgtttgagaccaatgccaattggccaagcgagtggaaggggccctgaccatgaggaacagaagtgcattcacgctgatcgaactgctcgtcgttatcgccgtcatcgccgtcttgatggccatcctgatgccctccctgaagatcgcccgcgaacaggcgagggctatcaattgcatggccaaccagcggtcgctggcgcaggcgtacatcatgtacgccggcgacaatgatggtgcgatctgtggaggcatggctcgcccgagcgccacgaatagagtgccgccctgggtgaagccaccggggaacatcaacactgatggcagctttgccgccgtcgatggtgacgtgacattccagcagcggctcaacggcctgaaggccggggccatctatcctttcgtcaacgagcccgacgtgtatcattgcccgggtgacatgcgcaagaacatgggtacgagcctgggtgacgcacgggagtttctgatcttccgcagctattcgttgccggactacatgaccgggacaagcgccgccgatgcgaagaatctgtttagcttcaaggagcaggccaccaagatgctgttcgtcgaggagatctacgacggcgcctcgggcaatcacaatgtcgatggttggtcgtacaggccttacgacggtagcctgtgggatccgctgggcaacttccacagcgacgcctgtacgttcagcttcatggacggtcacgccgagcgcaagaaatggcaggacaagcgaactgtcatctactttggcagtcgcaccgacgcggccgcccagggctttggcaaggggagccagttcagcccgcccaacgtcgatctcgattggctcgacaagcactatccgggcaagaccctcaggaagggcgtcaactaacggtgccgccagacggcatcgtcatcgtcagggtccggatcgtaccgtcaggcgcatagtccgccgagttcagttcccttaggtggaccaatactcgcgcgggacgagaagcctattagcctcgccatttgccgattccattccagaattgttcgaccagccgggcattgccacgaagaacactgacgagatcgcatacagcacgcatacgatcctctcctcctgaacgatgaagatattgcccaatgtccctcatggctgcgttggccgtaggacaagagaaatcgtctctgcccgagagttccgaagaagcttcctcaccgagagcggctaaccgaaggccgagatagagattgattctctcaagatcaacctccaccaggtgtggtttcaagacatgaagtgcgtctgcgattttcgatttgtcgatatcttgataagacgaatgcatctgtttcgcaagcgcatcgacatcggcgtcttcccaagtccagttatggaggattaaccacgcgtgcgggtgccatgacagtatccacaggtcgacgtttgtaagaccagacagcgatccatagcgtctgagtatttctgtttcaatcaccacttgcgtggcattttttgactgaacagcggtttcgataaggtcaactgtcccctggatcgtttcttgcattctcttgcctctccatcggactctggctactctgagtgctcgtgaccctgttctctttaggaagctatgtaaggtgggtgctggagaccacttcaatcatccggacgccggcccggttatgaatggaatcgggtctgttcgtcggtttctcgaggcttctcaggacccgtcaccagggtactggcaggccgtgacatggtcaagggcgtgtcttgtcggagttggacgcggatcggaggcgggttctggggtcaggtccttctcgacgccacaacggtgcgcggggcagcctcatggagggtatttttcgcttgacattcggcgaaagtgtttgtattttagtaaacaaaaccaataagacatcaagctatgatacacaagcgtaaatactaactcccagtccgaaaggggagtcgtgattagtgaaacgcatgtctatgtcgagtgggcaaatcgggggacatccatgggcccggagccggcggttgcggcaccatcaattatgcaaaacaaacccaattgtgccctttaaagccagaaaacgagggtgaggcgaaaaaacaaagccaaacaaagccaatttgtgagacgcaatcgggggatgtgttcgcctttttgcggtagctcggtgggtcgacggccctgcaaaacgacgcggggagatgtcgcgccgggatgggatgaaaccgccgccgggaccggccttgacagaacggcctgtctccagggacaattggcactctttgtggcttcggttttcgtgattttccgatggcctggggcgtctatacttgtcgctgagtgaaatgttgcctatggacgagaagaagaatcagttcagtacgtttgccggtgtgttcacaccgtcgatcctgacgatcctcggcgtgatcatgttcctgcgcgccggttatgtgatcggccaggcgggcatcttcaacacgatcctgatcctgctggccgcccaggcgatcagtctgttgacggcgctgtccatgagcgctgtggcgaccaatactccggtggctggcgggggggcctactttctgatctcccggtcgctgggcccccagtttggcggggccatcggtctggcgctgttcctggcgcaggcgttgtccgtccccttctacattctgggcttcacgaacgccctggtgacagacgtccccagcctgggaccctggtttgggctcatcgcgctgggtacggcggtcgtgctctttgtcatcaactggatcagttcgggggcggccattcgctttcagtatgtggtcatgacgctcctggggttggccattttcgtctttctcggaggcgccctgaagcgtttcgatttcgcaacgtttcagacgaatctgggcccgcgttacacggggccggggatcggcttctgggtggtcttcgccatctacttccccgccgtcaccggcattctggccggggtgaatatgtcgggggatctcaaagatccggctcgctcgctggtccgcgggaccctggcggcgatcgtcgtggggttcttcatctatctgctggaagtcatcctttgcggcggctccaccgcacgcggcgatctggtcgagcgttcctattccatgctcaagatccacgccctctttggcgccggggtcctcgtcagcgggggagtgttcgccgccacgatctccagcgcggtcgggtcgttccttggggccccccgcgtgctgcaggccctggcgcgggacgggatatttcgcattctccacccgtttgcgcacggttcgaagggcacggacgagccgcgggccggtctggcgctgactctgggcttggcgctggtggttatcgtgctggtcagcggtcaggaatctatggccgctttcgacatgatcgctgcgattgtcagtatgttcttcctctgcacgtatggtatgatcaatctggccgccttcgtggagtcgttcggcgccaatccatcattccgaccgcgcttccgcttcttccattggacaacgtctctgctgggcttcgtcgcttgcctggttgccatggtgctgattgatgcgttggcggcctcaatcgcggtgctgaccgtcgccggcgtctatgtctttctgagccgtcgggttttccgggtggcgtttggagacgcccgtcggggctttcagtacgctctggtcgtgcgggctctgcagaaactccgtgacatgacgccgcatcccaagaactggcgtcccacgttcctggtcatggccgggaacacgaagacgcatctgactctgctgcgatacgccgtctggatggaagggggtcgcggcctcgtcaccgccggccaggtcatctcgggtgatctcgatacctttgcggcccgggtcgagagtctgcggtctgctatggacaagttcctcaagagcaatgagttggcggtgtttcccgaggtggtctttgccgaagacgtcgacgaggggattcgtatgttggcgcaagcacactcgatcggcccgctcaaacccaacaccgttgtgttcggctggccgcgcagcgccgaacgcgtcgaggcgatattccggcacgtctcgactatcgccgccctgggcaagagcgtggtggtggtggtggacaagggattgcccccgtccgtgcgtcgcgcgcggtgcgtcgatatctggtggagaggggagcaaaacggatcgcttatggcgacgctcgctcacctgctggtccagaactgggagtggggtcgtagccaggttcgggtcctgcgggtcatcggcgacgaggccggacgcgagtcgtcgaggaaagcggttcactcgcttgttgaggccgcccgcattcgcgccgaggcctgtatcattgtctcgacggaacccttcctcgaagtgtttcgccgtcactcggccaaggccgatgtggtgttcctggggctgcaaccaacgggcgatgaatcctctctggaggtgtaccaccgtctcaacgatctcctcgagtccatgcccaccacggtcctggttcgttccagtggtgaagcggatgtgttcgcttgagccggcgcagaccgatgctggcatccttcagggttcacgaaatacgggttaggagcagaggcgactgagttcgtccatggtcagactgctgagacgctcagtgacgagatgcgctgctgttaactgctcggcgtcgtaggtattcgtcacggccaccgtatgcatctgggcttcgtgggcggcttggagtccccagtgcgagtcctcgatgacgacgcatcgccccggggtgatgggagcggccgtcgattcgttgagtctctgcaacgccaggagaaaaccctcggggtcgggcttgccccgcgtgacgtcctcggccgagacgatgacatcgaacaggctacgcagtccggcgtcctggagcacccactcgatctcggtacgcagagaacccgagcagatcgcgatgggaacgctgccggttctcaacacgtcgaggaactcacggacgccttcaatgatctgcccatcggtccgcgcgagcttctcgaagacgcgggtcttcttggcgatgaggtcctcgatctggctcggttcagcgcccagtcgaccttcgtcgacaagcgccttgaagcagtccacatcgctcaggcccaggtactcggtgtagtattccttcttggtcaattcgagcccatggtgggctaacacgacgttgaaggcgcgaaagtgcagaacttcagagtcggtgatgaccccgtcgaagtcgaatatcacggctcccagcatgacggcaatgctctccctagacttcctggaccggcccgatcagagcgtcgtagtcgctgaaagtcgatttgtcgccctggcggaccaactcggtcagcgccttgatcttgggggcgttcttctcgatgtaacgccgggcgatcatggccttgcgctgtttcatcgggattgtctcgccattgccggtcgaggtgccggaggccgctgctacgtccatctcgaccttactgctggcttgaccgcagaacaaatacccgatgatcaggtcgatcgcgacatccgtcagggcccgaccgtagagatccatgtagtcgttgccccgctccttggtgaattcgatcgcggccctaagttgctcagtgccttcggccagcttgtccagcaggtccttgacctcggcatcgtattccagggcgaccaggtcggccagatacttctcggcggtcccgctgcagacgccccggacggccgcgacgacctgcaactggctggttccctcgtagatggtggtgatgcgggcgtcgcgggcgtgcctttcgctggcgtaatcacgcatgtacccgctgccgccgagcacctggatcgaatcgtaggcgacctggttgcacatctccgagcagaagtacttgctcatgggggtcagcagcccggcgtagcgcttataggcgcgggcccgattcttcagtgccttgagttcggctttgtcctggggcggattgttctccacctgtctgttgtatccgaccgccaggtccacgatccgggacgtatcatagagcagagcgcgtccagcctcgatggcgatcttggtgtcaatcaacatatcgcgcacggccggcagtctctcgatcgccacgccgaactgcgcgcggctggcggcgtaatcccgcgcgatccgataggccgcttcggcgatccccatcgactgggcggcaatcccgatgcgggccccgttcatcagcgtcgcgacataaggcgccaaaccgcgtttgcgctcgccgatgagtttgcagggcgtgttgtcgaagaagatctcgcacgtgggtgagccgtgaatgccgagcttgtcttcgaggcggcgaatatggacggtcgggcccggcccgcagacgaacaggctcagtcccagtccgccgctgcggtccgcttcgctgcgggacagcaccagcaggacgtcgccgcacccgttggtgatgaaacgcttgacgccatgcaggaaccagttgccctcatcgtcctggaaggccctcagcttcacggcctgcagatccgagccggcgtccggttcggtcaagaccatcgcgccggtgaccgtccctgcggcgaagggcggcaaatattcctgcttgatctcttccgaggcaaaggcatcgatcgtctcgccgatcccctgcaagccgaacacgttcatcagcgaagcgtcggcccgtgagatcatctcgttggccatcgaatagaccaggttggggaaattcaggccgccgaagcggtagggcagcgtgaagcccatcacctcggcttgggcgagtttctccaaggcctcggtgatgcccttggcccgcgtcacggagccgtcctcgttgagcgtgttgccttcccgatctacgtcctcggcctggggggcgatgacgtcggcgctcagttcgccaagcgagttcagcaccatatcgtagttctgaacggcctcatccggatcggccggcgcatagtcaaattcctgggcaaaccgaaaatcttcctcggtcatcgccgccagttgctgctggtcaatatgctggaacaggaactgaatatcgtcgttgtctttgtagaagttccccatgtctatcccgctatcatgagtttcgtaacgttacacgctcaactggcgtctatcctcggcccacggctcctcaccggcggccgaggcgttcctctgtgggtcagtcctttatgctcttctctttgatcgacttgatcattctcggtatgacctcgttgagatcgccgacgatcttgtagtgggcgatgccaaagatcggcgcatcgggatcgttgttgatggcgacgattttctggctctgggccataccggcctggtgctgaatggcgccgctgatccccacggcgatgtagaggctgggccgaactgtcgtgccggtctgacccacctggtggtcgtggtcgataaagcccagatcgaccgccggacgggtggccgccggggcggcgcccaggcaattggccagatcccaaatcagtttgaagttctccttgctgccgacgccggcgcctccggcaacgatgagccgggcggccttgagatcgaccttcttggcccgcttgtgctcctggagaatctcaagcggcagatcatcctgggccagcttgaccgtttcggtgacgatcacgccgtgatggttgacgttcggttcgggcatgggcatgacgccctctcggaccgttgccatctgaggccaccgatcgtagttgatgatcgtggcgatgatattgcccccgaaggccggacgaatctggaatagcagattctcgtggatctctccgtccttggcggtcttatggtcgccgatttgcagatcggtgcagtcggctgtcaggccggccttggcggcgctggcgatgcgcggcgccagatcgcgaccggccaccgtcgcgccgtacagaacgatctgtggttcgtgtttgtggatcaggtcgaggatgactttggcgtagctgttagtctgataagcgcccaaaagcgggtgctcgaccaggtagaccttgtcggccccgtattggatcagcggggtgcaaaggtccttgacgccgtctcccaagagtacgaccgccagcttcactttcagcgtatcggccagatgcctggctttgctcatcagctcgaccggtgtctcttccagcgcgctgccgtgctgctcggcgaacacccaaacttcaccttctctatttacatcgatcatgaaaaacctgaatttgcaaatgaaccttgtgattccaggggcctcaaggcgaagggcccgcgcacagagtgctggtgtacctaagcgatgatcttatcctggatcagttcgtggatcatgtcggtgatgccgtcttcagtcggctcgatgtccttgctttccttggccgcgaggactacgctttgaatccgatggaccttggtgggtgagccgtttcggccgcaccagctcagatccgcttcgagatcatccagatcccagtgcttgattagcaggcctcgggcttccagagcctcgcaacgcgttgcgatcaactcctgcatctcggcctcgaccgcgtccggattgatcgcctgaatctcctgggccacctcaagacgggtacgcgccttcttgcacttcatcaaatgcttggctgcggccacgcgcggcgtgttggtctcgcccgttacggtcaacaggacgggcaactgggccttgacctgttgccaaccgttgccgatattgcggcgggccgtgatttctcggtcctccagggcctctagcgcctcgcagtacgtgatctgcgtgagccccagcttttcagccaattgcgggccgacctgggcggtatccccgtcgatggcctgacgaccacacagcacgatgtcgcaatccagcttcttgacggcgcaactgaggatatagctggtcgccagcgtatcactagcggcgcaacgccgatcggtgaccaggatagcgccatcggcgccccgatagagggattcgcgcagaatccgcgtcgccccgggcaatcccatcgtgatcacggtcacgcgaccgccgaagcgatccttgatctgaagggccagttcgagggcgttcaggtcttcgggattgaaaatagccggcagcgccgaacggttcaccgtgccatcgtcgttcatgacctggccggttattctctgggtgtctggcacttgcttggccagcacaacacagtgatatgccacgtaagatctcctatcagcccttccttgcctgacatttgttttcggaaacgccttagtttaccggccttgacgctcaggtcaaccctaaaacgaaaacacgaagaagggtgatatttccgggccttagcgaaaaactactaaaccgctatgcccaaaaggccgattgagttcacgatggagccgtctccagggcagaatgcgcagtttctttttgacaacggtgtttataaatcgataatgatcgccagcggtggtgttatcggatgtgaccaccggagccgacaatcaggcttcttggcgtaaggatgcggcccctgggacagccaggggatttttacatgacgagtgaaaccagttacgatacggtatttggcaaactggcggttgaccaggggctctgtacggacaaggagctccgcaactccgtgaaggaattgcaggaacgccgcaagatcaatcccgtcatgctccaggaacttctgatcgagttgggctacattaccgccacgcaggctacgcggctcaaacgaagcattcggggcaacaaggcggccgttcaccagatcccgggctacaagattctgggcaagatcggcgccggggccatggccttcgtttacaaggccaagcaactcagcctcaaccgcaccgtcgccatcaaggtccttcccaagcgcttcagtgagaatcccgagtacgtgcagcggttctataaggaaggccaggcggccggtaagctcaaccatcccaatatcgttcaggccatcgacgtgggcgaagcggggggctaccactatttcgtcatggagtacgtcgagggcaagaccatcgccgacgacatcgccgagggcgccttcccggagaagagtgcgatcgaggtcatcatccaggtgacccacgccctggaacacgcccactcacacgggctggtccaccgcgacgtcaagcccaagaacatcatgatcaaccagcaaggcgtggtcaagctggccgacatgggtctggcccgggagacgacggatatcgaggccgcccagagtgaggccggcaaggcttatgggaccccgtactacatcgcacccgagcagattcgcggcaagatcgatatcgacggccgggcggatatctacggtctcggtgcgaccttctatcatatggtcaccgggcaggtccccttcacgggcgacgattcctcggagatcatgaagaagcatctgcgcgagaagctggtcccgccggatcatctcgttacttcgctctcggccggtgtctccgaggtcattgagatcatgatggccaaaccccgcgacgaccgatacaacaacatcgaggagttgctggtggacctggaggccctgcgcgatgggcatccgccgttgcaggcgcacaagcggttcgatgtctccgtcctcgagaagttggaagaaggggagaccgtcgaagcggaggatatggattacgccgaggagaagatcaaccggctctggatggctgtcatggtcctggcagtcgtctcgttcgttgcggtgatgatcattgtgctgatgctggcgttctgaggccagcgccgcgttgcggtcgccgggccgtatcgaaagaccttcccaatgcccagaggaggagccaatttttcgtcggaggagcttgtccgcgtcttgagtcactacgacgtgggggtggttcaccgcgtcaagccgctctcggcgggcaaccgacgggcccccaaggtgatcgtgcgggccgacaagggtaccttccttctcaaacgccgtccgaaaggtcgcgacgatctggcgcgtgtggccttcgtccatgccgtccagaagcatctggccagccaggcgtttcccgtgacgtccctggtgacgaccagcgacgagcataagacggttctgaacatcgatcgtcatatgtatgagttgttcacctttgtcagtggttcgcgctgtgacgcgtcgcccaaggcgaccgaagacgcggggcgacaactggcgaacctgcatcttcggatgggggattttgctcacgactacgaaccgtttcgaggcagctttcacgattcgtccaccgtccggcaacatctcaagatgattcggtcggaccaacgcgccggctcagcccgacggaccgaagctatcaccgaatcattgctgatccgctacgatcgctccagcaatcgcgtcaacaagctgggctacgaatcctggaaacgccaggtcgtccatggcgactggcacccgggcaacctgttgttctttggggccaaggtcgtgggcgtggtggatttcgattcgatccgaatcgcgccgcccctgacggacctggccaatgggatgctccagttctccatcgtaggcgactgttccgatccgacccagtggcccgacgccttcgacgagcccaggctcttccagttcctgacgggctaccgcgaggccgccaaggtgagcaaacgcaagctgcgcagtcttgtcgatctgatgatcgaagcgatgatcgctgaagccgtgctgccggtagccgccaccggttacttcggctatcactccggcgtcgacttcctccagatgatcctccgcaagaccaagtggctccgccaccatcgcaaatcaatgaccgagactattcttggtgtcacagcagccgacaagtgagccgctctacttcttctccatgggcggcagtggaggctgtccaggtgcgagtccgcccatcccgcccatgggcaggccgacaggcggtccaactggcggcgtctcggattcatccagtgtcttcctctgtgcttgagtcaagaccacaagcctccctggcctcggtatctcctgacccagggattcgatctgccccccgtcgatgagcactatcttgtccaggggggtggtcacggacgtctggacctcgacggtgctgatgatcgggaaggtgtagggatacctccccttgtgcattcgctcctcgttccccaagacggaggtgatctttgctttgacttcgagatagacgttgtccgaacctttctgcagatggggcgtggcgttgaactccacgccggcgtgaatcgactcatattgagcgaccggttcccccgaaggcccgtccggttcgctgaagccaacgaattgaggcaccgctcgcccgacgcgcatctccgcggattctccatccaggaccgtgaccatcggggcagcgagcgaacacgcatacctggtcccttgcgtcgctctcaagagaaatatgacttgcgtgtcatccagaagggcggcttcgcgtatccgctctccctcgccaagcgtcagtgccgtcaccagttcctccggcgtgttcggatcttcgaccaaccccttcaggaattcgtcactgacgtgcaaaaaccgcgcctcgatctggaccgcctccttcacttccttcgggtgctgggcggtcgcgtgcggctgtcctgagaacacgcccaccatattattgtaggcctgggcgacggcggcaaactccttcgccgctccggctacgtcttcatccaccgccttccgcaacgcggccagggcctcggccatctgggtgacgcttgcgtccaatggggttcccttcgccagggcggcggtctcggcggtgcgcgacaaggcccgtgcgacccactcgctcatctccgcctgctctgggcgacctgggcgtgtgagaacggacatagcgctgaacatcgtttccttgaacgcctgggcgagttcggggcctggaggccaggagcgggcggggccgctctcagagggtgcgatggtgatgtccatgggcggactgaccgcgcgaatcgggccgcctgttctcacccgggacgactccacgatgaccgccagccgaatcgtgtgtttgcccggtgccagttgcagggacgcccgtctgtaggtcgggtctacgccccaggcaaagccgtcgtctcgccattgcagatcttccggtttcgccttcgaccagatgggcgagagggtgacaggctgatcggccagcgactgtcccatgcccagaccggccagacgcacggcccacgagtcaggcggccatatgtaccagacgccgtccacctccaattgcgacctgcgctgtccggtggccaagtgcagaaattcccgcgcgccgacattctgtacgtcccagcgcaaagccgggatctcatctgttcgccaggtgtgtctgtccgcccgcaaccgaatctgcacaccctcctgcgccgccgaccagtcggtttgcatcgttgccggtgtggccgtcaccgggttcgctttgggttcgactggcagcacctgggctcggaccaggaggtagagaacgtcgtcctgctcaggttctcccgtctcgggcgtcagacgcaggacgagggtcgtgtcgttgtccagggtggctttggtgcggatgctgtgtgtgctcacgcgaggcctctggtcgtcgtcggcggggatcatatccgagacttcgacggccatctccaaggtgacttggccgctgctttcggcatggggtgtgacgctcactacggtgccgtactcgatcatctcgattgccggcggcgtgaccgtttctcctgacgcctcgcggcccaccggttccggcgcttcgtaatgctcctccgtgatgatcctgacttcggcacgcttgccgtttatggcctccaagcgaggtttggaaaccacctgcacgtattccccggattgcagtagatcgcttagtatctcaagtgcatccgagtctccctggccgttctgggcgcagcgtttgaagagctgtgccggtggaacttgtagttcctggatgtcaggcagtgatgcgcgcccgattcgtgcgacctttcgcttcccgtacatccgatcccacagacgcgatagccggttcgccgcctcacgagttaacgggcggtttcccgaagtgtccagaatctcaaagtccaacaagatccgcgtcttctcatcgattgaggacgcgctgtcgtctgtggcttccgtcagcacgcggatgggtgtcgattcgctggattcctccttttcaacgacgggatcatgggatgattgctccaattccttctgcctctgctcaagacgctggttcagcgccgccagcaactgctccttctcgacgattgtggggtgttttggcaccaggttctgctgagcagcgatgaggtccacttcaacctcggcgatcttcttcgccaattcctgggccatgggatcgataggagtggattccgattcctcacggctttgcgcgagacgccgggcaatgccggcatagaccccttcctcccattcccttcgccgctcctcaagacgcttcttcatcgccccaagcagcgcctctgtccgagtcagttcgggatgttttggccccaaagtctgtcgggccacgatcagttcttgctcgatctccacaacacgcttcagcaaattctccacgacgggatcggagttcacgtactctcgacgcgcagcgatcatcccctcgcctttttcaagaccggtctctgggaccaggcgggcggtcacgaagactgcgatatccttttctgaatcgggattgtttgtgccgactccggccacaaccaccgtgccgccatctttgattgtcacgacatttctgctggtgcgacgggtcacaacaggcagcttgccaccttgggccggagggatgctgtcactgtattcgagggccagttccagtatgatttcattgttgtcggcgatcctcggcatggccgaaatcaccgtcccggtcgcgatgctcacgcgttccggttgatccgttgtcgcggccggcggcatcgagaactgctcttccgtggtggcggtgacgcgggccagtcgcccgtcgattgccacgatccgctgtctcgccaccaatcgggcccgaccctgttggcaaagtcggtctagggtctcctgtacagagttcgtaaaggcctcgtcggctgtatagcctatctggacaccccagggcgacccgcttgctgcgccggacgcggaagccggggcgttgccgaaagctccggcgctgatctgcggggcactccattcgacgcccagatccgcgaggtcgctgcgctcgatggccacggttcggaaatccaacaacacctgacgcggacggttgtcgctctggtgggttgatgggacagacagaggctcctgctgagccgcagacttgacgatggttggcttgaccagcaggagaacaatgctggttcttgtgtccagcctttcacttgccggttcggtagtgacagtgagaggatacatagcgtatttgttgttgcggaaggttgacgttatgtcgaacttggctccttccatcctcatgcttacgttgccatcgttgtcgagttgcgccaagctccgaatatggaatcccaaagacaacctgatggtgtcctggtcgtcctgaaccgttggcgtgacgtccaaacgcaggcctataccctctgcgttgtccgaggaatccggggcatctgaattggggtcctcaccaacaattatcgaggcgggtcggccgtcgcgtgttacaatatgcggtctgctcagtatctctccatagcctctcgatattagcagatcggtgaacgccttggcgccgccggcagtcaggttcaaggagttcgtgtatttcttgaggatttgccagagtggtttctggagttcctccacggttggcagggtgaagtcgtcattcactacaacatctgcaaggagattcctggcttggacggccgtttcgtggtccagcgttgcgtcggaagcgaccttggcgatgacaaagtccaacaagacttgcctggcctcctggggcttctcggtggccaccgtcgcagccggcctctcgactggcaactcggggctggccaggacgagggcggtggggatgatgatggtggcgacgaggaggagggcgatcaggccggggagccaggcgaagcggcgctcggctggggtggggcggcccaggaggcggccgatgcgggcgacgaggctgcccccgttggcggccaccgccagttcggtcccgtggtggcgcatttcctccaggcaggtcagggcgcgggcatagcggaccgaatcgccacacactccgacggccaggtcgtcacagcagttctcccgctcatcccgaatttggcgcgagacccaccagaccgccgggtggtagaagcccaggatttccacgaccgattgggcgatattgacgagataatcgtagcggcggatatgcgccagttcgtgggcgaggatcgcttcgagttgttcggcttccaggcccgtcagggcgctggcgggcagcagaatcaccggcttgatccaccccacgacggtggggacgtcgacaagcgccgattccagcagttcgaccgcttggcggacgcccagacgctcggccagttctccgagtttcgtctgcacaggggcggcgacctctcgcaccatgcgccgtcgcatccgctgtagttgggcccagccgcccaggtgccaggccgagaggccaaagacacccagcagccagcccaggaccagccagggcagggccggttcgagagcggaagcgacccgttgcctccagggcacgcgaatggttgcatccgccacctccaggaccggcgcctcgatcggctcgacagacaactcggccacctcgattacttcgaccggcggtacctcggcgatgggcgctggggcggtgacaggacccgcctccgcgacgggtcctgagacctccacaagctgcatcgtaaccattggcagtgcgacgattagcgccagtgccaggcatgagacgatgtaccgcaggccggcgcttcggttgctcaggaatctcaggacgacggccagtagcagggcgatagctgttgcttgccagacgaaatggatcagcgtccagcccagccgctcgaccatcccctgcgacagtagttgctctaacgttgccatgactatgctccctccatttggtccagcatctcgcgaatgcgtttgagttccttgggcgagaccttcttggcgtccagggcccgcatgacgagcttctcagccgagccggcgaagaccttctccagcatgtcgcccaccacctgtttctgagtacgctcttcggagaccgccggtgtgtagatgtgctggcgaccggcgcccttgcgggtgagcaggcccttctcggccatgatctgcatcagcttgagcgtggtggtgtagcccgtctcgctgttggcgcccaacgcctcgtggatcgcccgaacggtgctggggccgcgctgccagagcacgccaagtatcgccagttctcgatccgtcggtccggggcgcttatgtcttgccatgagggtctccttggtcgattgtttttccgcatcactatctctatcggcaagtatacgaaggaattcgtagtaaatccacgaaaaaattcgtacttcgcagaaaagatttgtgcgatctcatctcacgaaccaggaaaggctcataccctataggcctctgtcatccttgagccgaaggcgaaggatctggccttggaatgaggggcaaccttcgtacgcagcccagatccttcactacgcagagctgcgttcaggatgacaagcggcgtatggactggccacaatccacgccatagctcgcctccttgcccatgaaaaagcccccgccagactgagtcgggcggaggcttctgtgttgcttgtggagaggtggttagcggatcgtgtggaactcctcaacctcctctgtctcaacccttttctggctgcgttcgaggagttgctccaggagctttcgcatctgcgtcatctcctcgtgcatgccgttgatcttgccacgcagttcttcgacctcgacctcgatcccgggtcgttcccgcggcgcatcgcccagtcgcctggtctcgccttcgagcgactcacggcgctggtgctgtgaatcttccagttgctcctcaacgtgaatcatctcttcgtggaggttgtcgaggtgggcgcggagttcgcgagccttgtcgctgtcggggtcgtccattcgttccagcctgtgcttcacctcggtcccgtgcgcctgcagttcgtgcaaatgctccgccagtttctgtgtatgctcgtgtgctccggcggcccgctgttgatccaggtgggcgtgctcgcggtccagtgacttcatgtgctcgtgaatctcgcgcagctcgacgatgatctgttccctcttctccgacggcctgtctcccaacgcctccaactcccgttccatcagacgcatcttctcgcccagttcttcctggtgccgcgccaattccctggcgtgcgcctcggtgtcgtggagttgctcggcatgcgcgcgccggtccttcaaatcttcttcgtgtgtctcgttctcctgcttatgtctctcgttgcgcaaggcctccaatattttctcttcgtcggctattcgcgcatggagttgattgacctggtccttcagtacgcggcccgtccggctgtcagggtcctccatatactccaatcgtcgcttgacctgggtgacgaattcccgatcgagttgcaggcgttcggtcagttccagttccggcacccgctggcgggcctcgtcaggcagatacagctcgagatcggccaactcctgttccatgggctccatgtgttcgtggatctctcgcagttcggttgagagtcgctctcgcttttcggactgctcttctcccaaggcttcaagctcttgctccaaagggcgggcttgcgccgccagttccccacgatgccgcctcaattccacgaaatgcatcgcgagtttctcggtgtgttccgcccgcttgcgccgcgcgtcggtccgtcgtgccttctgcaggctgccgagctgtcgctcgatgattccaatgtggtcgcggagggcgtccagttccgagcgcaggacgtgaccccgggcgcccggttcatctccctgtgcgtcgagggccgcttcggtctcgcggacctggtcgacgagttgatcgagcatgcgttccagcacattgcgccgcccggcgaccgccagttcgtgttgctcctcattatgctcgtgctgctctcgaaactcttggtgctcggtctgtccgtgttggtcgtgctcggcgggtcggtgttgggcgaaggccacgcccaccatgccgaccagcaccaggacgcagacggttcccatccagcgcgttccgattctcgggtctccgcattcctcgctcacgattctctgaattctctccttcatcgctttctcctttcccaggacggttggcacaaacgccatttctctttggggtgacaaatcgagcagtgactcggcgtaatcgacgcccgcctggccgctcgccagcacccagtcgtcacagacttcttcactcagtttcaacaatcggctcttggcccaccacagcagcgggtgccagggcatgatgcagaccatcagctcggccagcaatccgctgagatggtcgagccgcttccaatgcgccagttcgtggcagaacacgcccgccaggtcgtttgtctcggcggctctggcgatatcctgctgcaccaggagcaccggcggcttgcgccaacaccagatgaccgggctgcgcacgtcggtgctgcggcggatctccaacgcgacgtttaggccgaatcgggctcggacgctctccaacgtctccaggagtaacggggcctcgaccggttcggttttggccagcagtcgcagtcccaggccgaatcgcaacaacagacgactcaataggaggacacttgccgcgatccaggcaactcgcaagaccgtgctccacggtatgcggacggctgttgtctcttcgacgggggccgagactggaaccgccggcgccgtggcctccacagccaaaggttcgtattccaccacgccggcgactggtatggggggatcgatgttactgagcgggcccggcgcgacgaactctagcggttcagaaggtgcgggggccctggtggtcagtagacccaactcgaagtgctgcaccgagacgtacagagcaggcatcaccaccgaggccagcaagccgaccagtaggatctggtgggcccgtgcggcccggcggcgccagagatagctgcccgccaggcccagtccgagacaggtggtgccttgcagcaggagcaccagcccgagatggttttcggagactatctcgcccatcatttccgcatctccttcttcttctcgctgatcatcttcctcaggtcgccaagatcgtcctcgctcagatcgctctcgcggatcaagtgttggaacatggcgatcgcatcgccatcgaagacgcgtttgaggaaccccttcaccgaaccggcgcccgcttcgtcccggctccgcgtggggaagtagacgtagctcttgccgtcggggcggtggctcagccagccggtcttttcgagcttctgcagcgtggtcaagatggtggtgtaggccagcggcttttcgcgggccagtcggtcgcgcacctggtggacgctggcctctccccgctcccagacgacctccatgaccgcccgctgcaactgccctagtccgtcgagtgaatgcttgctcatcgcatgaacctccttatctttccgctgatactcgtcctacggttgactatcgtactatgttctatagtaggtggcaacaaaaaagaaaaattctctcagcaggggcggcgcaaggcaaaggcctccgagaggggacggtctctcggaggcccgagtggcggctatgggcttgtttgggtgcaggtaaacgcagcctgctaattgtactagtactgcccggcgctgccgaccgtgctcgggtggtcctccagcagcaaacgctccaacagttcgttggtctggcactgttcggccttcaattgctccatctcctcgcgcagctcccgacagaggtcctccttcgcctccctctcggcttcccgcacttctctgagttccaactccattcgttcgagctgttctttgtgctcaagctcgtgggggggcgggcccatgggccggtgcttcggcggacgaggcgccggggcgtgatgacggtggagttgcccctcgatctcgcggatctgcgcccgcgtctcatccagggcgcggcgcagctccatcgcttcggcgtcttcgtcccccatctcctcgagcatccgttgcatgtgctcggcccgctcctgcagggcgtgtagatgtgcggtgagttcctcgacctcacgccgggttttttccatcaggtggcgccggcgttcctgttgctcacgttcgcgctgggccaatgcttcctcgatgcccttcatctgctcgtgaatttcgcgcagctccatgtggacttcgtgacggcggcgctcggtgttctcacgcaactcttccaactccatctcacgctggcgggcccgctcggcgagttcctcgcgacgtcgcatgagttcttcgatctcttcctggataccgcgtagctcggcgtggatatcgcgctggcgatcctccaggttacgctgaagctcttccatttccatctctttgtggtgggccgcttcgagaagctcctcgcggtgccgcatcagctcttgaaggtgtcggtcgggctcacctctcggttccggcggcgcttcccggcccattctcgccaagcgatgctcgaccacttgagtctctgcgcacaactgttcgagtttggcctgcagatcgtgtttctcgtcgttcgtttcggtgtccatctcgcgcaggcgggtctcgatctcattggtttcgttgacaaggcgatctaatcgtgcggccatggcctcgcgatgttcggcctgctcgcgctgctcttgccgttggattctttgcatcgcgacccggtcgtgttccggatggtgatattgaacgtactcggtcgttgccttgtcgcgcgcgaccacatcgtgctcagggctcggcggctgggcataggccgcactggccaggaaaagcagcgccaacagcgcgatgatgaatgcccagggaatcccccttcggcggggcgcacaaacttgttctgcgatccttcgaattctctctctcatgactctctcctttactccgatgcgttgggtgggaccccttcttagcctcccccggtaagcgcgtgacagtgtctctctctcaaagcgaccgtcgacagcgtgggtggagatgctcggggtgggtttgacgcgaaggcgggggcctcgatcgtcccgatctacgtggtttcctcacatccatggcgctcctcctgagcggttcttcaccagaccctcctcgatccgactaacgttcaggattcacccgtattctaccgacacccatcccgggcgtctacctcggacaatacgtatttttttatctctcggtgcggcccatcccccgacgcaaagaagacagcccccacgcctctgcaagcatgggacccgtcataagtcattgttgagaagagagttacggtgtgtccttctctcgtctccaggccgcgacgcctatttcgattcctcctccgtaacaagccaaacctccgccggttgcgtctggatttcgaattgtaactcggtctgggccgtcacattggccagtagagcctccagtcgtcggcgtttctccgccatatcccggatggttcgcaccaggggcttgcgcaggtagacctgaaacgggatgatcgtctcctgctgtcgatctgtctggtcaatcattgttacgccgagcatcggtccgagtctttcgaggaactcgcccaccgatctggctccgtccatgaaccttccggcttcctcttcgcgcgtgggctgcgcttcgcccgcgaagatgcgaacattctcatcatcgaacaccgcgtggaatttgaattgtcccgttgcgatgacgacggcgtgctcggcggggcgctttttgaatcggatcgtgcgtcccatttcctcggtgaggagggcctccatcacgcgcagtttcgcctcccgaggcgcatcgctgcggacgatccaatcgcccggtcgttcgaggttgagcagttccttggggccctcatattcgtgatcctgcagtccgaccacatcctccagcagccggtggatgcgagatgtactgttgatgaacgacatgccacgtagctgcaatccaccatcccagtggaaacggaactggtggggcggttccgtcttgcgtgactccggttcgctcgcttcattgatgtaatagtccttccgttgcgggatgaacggcggaatgatgcgccgcaggatctcgccgtcctccaggcagtagactctgtcgaacccttgtcgccaggccggcgtggggagggcttccggttcctcagggggcacgcccagcatggcactgatcatctctctggctgcgttcagattcagagagccgaggacgtttccggcagggccgatcaggacgttcgtagaccaccgtgtgatatcgtatcgtccacaggtcgcgccgggacgctctctgcccgaaccctcatagaacgtcggctctccgccatcgatcgcaatgcggaaggggacatcggtcactccgccaaggcgttggtaggtgtcggtccagcgtcgctccagctccgccatcgagtcgcagttgtagatcgcgatgatggtcaggcccttgtcgcccaaggctttgtgaagcttcaccagtctgggcagatcgcgcggcacgctgggggattggccgccaaagtgaagcaggacggcctggcctcgcagttgggccagtgttaccggcccgccgttcttccagctcttgatgggccccaactgtggtgctgctttgcctatcagctttgtcagacccgtcggctcgagttccaccgtgccgaggtctaattccgattggtccttagggatcgtgacggtcagacgcttgtccctgagcgatgccgtgataggcgctgggatcccgttcttgccgcccgaaccgccaaattccaggacatactcgccgggtggcagcgggaagtcgaagggatacggcttcttccttgggtccgcgccaattacgacgttgtcggaccaacgcacattcgcggtggcccatcgcaatggcatgttcacgctctccaggtctggactgccaacgttgccgcgtacccgacagaccggtgcgagtcggatggtaaacgatttacctgcgtcggccggcgccagttcccataccgcaccgagaccccgctcctcgtgcaggatataaagccctcttgtcttccgtcctgctgggaggacgtccttcgtttggaagcgaaccgacccaccctcgctggatgtttgctcgtcgatccattccaacgtccccccgagcatgtcttcgcggaatgcaaccgacgtggagaccttcgcccccacgaccggcagcctgtcgtcatcgaccagtcgcaggaagatttgactcggatcgaggaggctgttcatccggattccggctgtttcaccaacgcccggctcagttaatgcggtttctagcaagaaaacccccaggtcgctcaggtgatccctcttcctatatctgtcctcagcgcgggccggcagaatcgattgccatgggctcaactccagatacgcctcgcctgattcagcagatacgcggtagatgtacttcgtgcgtacggcgatgttatcttgaatccccgtcccatcagggattcccattccggcaagcgtgaagcgcttcgggtccactgggacattcggatgaaactcggtgagcttggcgactgtatgatccgccagagtcctatcgtagagccaacgccgggcttctgcacgccgataccagaagacgccgttaccgtagtcttctatctccatgacctgctcacgaagcagtctgtcgtcgcgcacaaaccactgaaactttgcgatggagtgcccctttgccggcagtacccagattctgtatatcgagccatcggcatggctctccagatgccattccagaagcaggcagggctctccgttgagtcgtgactcactaacggtggggagatccccacgcgccgccagaaaacgggtgtgctgctctagggtgtcgatccactcgccaaagcgtacgtagcgtagcagcgtgggtccatctccgcgcccagtgcgattcggatcgtctccggctgtgatccacgccatgtgaccgtcgcggtcagagtcccgctgtaactgagtggtgacgatccggttgccccgcgtgatgatcacccgatggttgtccgaaggcgtagcgatgtaggatgatccctcctccgttgagtgaatcagtatttggcgcggcccttcagggtctggcgtgacgcgggtatcgacgcgggccttatgcccgtcaaaccactccgagcaactctcccgccacaagagggttcccttgtcctttgcgacatctctcctttcgatttcgagagttgcccgggcgctcttgagcttgctcaacgtacgtgtattcgcgcggatgatacgctcaacttccttgggcaactccacggccggcgaggcgattcccgccgaagcccaagtgggcggtgctaccgcctccgaccgcgtttgggcgaaggcgatggtgacagccagacacgccgcggcggttgcagtcgccagagaccagcgccggccactgtgaggactgctgcactggtcttctacaatccgccggatgcgaccggccagggttcgcttgcttgtcaccacgctcagtgccaaggcgctctggggttggaccgacagattcagcagggtgcgggcgtagcgggtgccggtctggccggcggcgatgacccaatcgtcgcaggcctgctcgctgagctgcttcaggcggcgctgggccagccaggccagcgggttccagggcagcacgcagagcaccagttcggtccagaggccgctgaggtggtcgcgccgcttccagtgggccagttcgtgacagacgatgccggtccagtcgatacctttgccttcgcccgccccgtgcggcacgagcaggatcggccggacgccccaacaccagatcaccggactgcgcgtctctgcactctttcgcagcagtacatcagtcctgaacccgagcttcgtcttggcgctttcgatggcgcgggcgatctcgtcgacgttgcatggctcagaccgctgggccagtcgaaaccccagcagaagacgcacgaccaagcggatcagcagggcggcgctgaagagggtccagacggccaggacaagccttgtccattcgataggctgagccgttgccgttgccgtcgccggcaggacgggcagagtcgcctcagaaacgctagcctgatcgatctctctgtcctgtgtcgattcgacggtagccggagcgtccagggcgacaaacgctggagggcgaacctcgaccaccaccggtctggactccagcatgccccattgatgctgcttgactacctggctaagcacaggcgccgcgatcgccgccaccagcgccaacagcaaaagctgatgagcccgaaccgctcgtcttctcaggaccagactccctccaagacccatcgccagggccgccgtgctctgccacgccagcggccagagccacgcatgttgcaccagtatgtcgccgatcatggtttcctctccgcttgctctgtctctttttctttgatcattcgcttcagttcgccgagttcgtcggcgctgagattgccctcggtgatcaggtgctggaacatcgccagggcgtcgcctgcgaagatgcgtttgacgagccgctggaccgagccggcgccggcctgctggcgggtctgggtggcgaagtagacgtagcttttacccgcagcccgatggtccagccaaccagccttctccagcttctgcatggctgagaggacggtcgtgtacgcgagcttcttctgacgggtcagacgctctcggacctgatggacactggcctcgcccagttcccagacggtctccaggacggcccgctgcagttcgcccagatcgtcgagtggtttccgcttcatcgctacttcctcctgaacgtgaccgctgtttctcactactccaatacaaagtactccatgccgtagtaggagtcaaatagaaaattaaaatcctctcaaattttcttttccgggcgacgcaggatttcacttgacggctcctgttccatggggtaaagtatatacacaacgaaactattgttgagatataacgatgaataatcactcatcaacaatccatcatcgatcaagcaggaccctgctgtgctggccgagcggcggaaaaacgggcggatcgggggaggtttattatgcaaaacaaacccaattatcgttgtttttgggccaggaatgcggatcgagccgggaaaacaaagccaaacaaaccgaatcaaagccaattggggtggcacggcgactatgcggagagccctggatgcgtgtctcggcgagaagcgaattgacaggcgaagggaaacaccgtagtttagggcagcctaaaaatgagtgaccacccaacacaactcagcgacagtctcgaggattatctcgaagcgatcttctggatcgcctcgaagaagggggcggcgcgggccaaggatatcgccaaggcgctgaaggttcgggccgcttcggtgaccggggcgctgcgtctgttggccgagcggaagctcattcactacgctccctatgaggtcattacgctgacgtcggaaggtcgcaaggaggccgagaagatcatccagaaacacgaggttctcaagggcttcttcgtcggcctgctgggcatcgacgaggacctggccgaagagggggcctgccgactcgaacacggcctgcccgatccgattatggagaggctactggcgttcaccgagttcgttcagtcctgcccccggtgtggggaggactggcggcggcaattcctggatggttgtacggcgcgtcgcgacgcgccttgctcagattgtctgaaggattgcctggggcgtttcgagcggggcgaatcgcagatgcaggccaccgccggccggcccctgacggagattcagccggggagcaagtgcatcgtcaagcgtatccggaaccggcggacggtcgcccggcgcctggtggagatgggggtccagtgtgggacggtggtcgaggtcaaggccgtggcgcccctgggggacccgatcgcggtgaaggtgcgggggtaccatctctcgctccgaggtgaggaagcgaaaaacatcgaggtggttccggtatgagtcttccgtctttcgggggatcgtacggagatctttcacatcttcggttcaggacggacggggcggtggaggtatagatagatacggtggggagggtcgtgtcggaccacttctgctgggcgagtgaatgaaaacgggccctgaaccaactgattcagagcccgtcgtatacgatcgaagaggccggaggttactcggtttcctgcgccttcttgtgcgcggcgacgatctgctgctgcacgttgggcgggaccggctcgtagtggctcagggccattgagtagctgcctcgtccaccggtgacgctcttgagctgtccggtgtactgggtgacttcggacagcgggacctgggccttgatgacgatgaagttgccgggcagcacgtcctggccgatcacgcgtccgcgtttggaggacagatcgcccgtgatgtcaccgacgttgtcggccgggatagtcacttccatatcgacgatcggttccaatagggcgggcttggccttctggatcgcgtcgatgaaggcgcccttgccggcggcgcggaaggccacttccttggagtccacgggatggtgcttgccatcgtagacggagaccttgatgtcctggagtggatagccggcgaccacgccggtgtgcatcacgtcgttgacgcccttggcaatcgccggttcgaactggcgcgggaccgagccgccgaagatgtcccaactgaactgcatggggggctcactgttgcgctcggtcggctccacccggagatagacctcgccaaactggccggcgccgccggtctgtttcttgtgtcggtagtggccttcggccttgcccgtaatcgtttcgcggtaagggattttcggttccttggtgttgaccgaaagcttgaaccgcttttccatcttctcgagcactatccgcaggtgcaactcgcccaggccattggccaccagttccttggtctgcgcatcgtggctaatcttgaagcaggggtcttcctcgcacagcttctcgagggcgccgccgatcttctgttcgtcgcctcgggaagccggttccagcgccagggagaacatcggtgacgggacgggcaacatcgggaatgagccggccacctggccgccatgtacgaggtcgcccacccggagttcttcaagttttgccagcgtgatgatgtccccggccacgccggcttcgacttcggtgtagtcggttccctgagacttgaggatatgtccgggccgcagtcccttcttatcgttattgtgcatcagggtcgtatcggacttgagcgttccgctgaagaggcgaacgctcgagtacttcatgttggatttcggatcgaagcccacccggaacacgagacccgccagcggaccggccgcgtcggccttcagttccatgacggtctcaccatcgattagcttcgccggatcagcgtcggccggcgacgggctgcattgagcgatcaggtccaacaactccgtcacgcccacttcctctcgtgcctcggtgaagagaatgggcatcaccgtccctgccttgagcgccgtgacgaagaccgaggccacttgctcggacgagatttcctcatcattcaggtaacttatcatcaaggcatcgtcggcttcgatgacgctgtcgatcagctcggtgtgcgcctgggccacatccatcacgggggaatcgccactgtcattggtgatgcagtcaatgacagaccccttatctgccgagggtagattggcgcaggcgcagcggcactgcgagccgaaggtttcctggatcgtctggaccagttcgcccatctcgacgttctcggcgcccatcttgttaatgacgatgatgaccggcttgttcgcctctcgggccagttggaacatcttgcgggtgttggtctcgatgccggcggtggcgctgatcacgagaatggtcgtctcagcggcggggatggatgtaatagccgggccggtgaagtcggggtaaccgggcgtgtcgatgagattgatcaacttgccgccgtgctccacgtggacgatggctgagaggatagagtgctgatgctccctttcttcgtcatagtagtcacaggtactggttttgtcgtcaacgctccccaggcggcttgttacgccggttttgtggagtattgcctcggccagcgaggtcttgccgctgccgccatgtcctagcaggaccacgtttcgaatgtcgcctgttgctgccactttacaacctccaaaaaggttttctaccgcgtttctcttcctgcctccaaaaccctgaatgttataagaattggggcggtccactcaagaggtttttcgtcaaattgccgacttgggcctgttttacacaggaaaaacgcaaatgtcttggccgatggcctgtggttggagcgcattggcgtagttaggtgagggcaattcttgacgagaagacccgcgttagaggtcctggacgaggcggtgtatccgctcgtatagggggatcagcaagggcgtgacgatacagcctttgcaggtccaatgaaacagggtttcctgctcgtaaatggggaattcgttcggggcatacggctgacggacatactgagcgacgcaacaaggggggtagccgaacaggaatccctcgattctgaccgtctcggcggatttgtccacggggaggttatcgaagtgactggcgtacgcctcccggtaggccggggtcctgctgaagatggtttccgtgaacgccttgccggttcggaccgtgcgggacacctgccggacctgcaggccgctctgttccagggcctcgaggccgggcttctccagggacttttcccagcggctcagtggcttgagaccctctcgcgtcagcagggccagataggccagttcgaaatcgacggttttcagataccggagcgcctgcgctattggacgagccaattccgcctgcatatcagttgggcagtcagaaggggtcattcgtcactggcctcgatagagttctgccaccgttcggcgaataccgccaggtcctcgatatcgaccttgcagtccctgttcaggtcggccggctgatatagggtgcccaggtctccgcactcggagggtagctcgaggatcttcagcagacccgctacgttcgttcggtccgcgccgtggatgtcgctgaggtaactaaatgagccatgttgcatgaaatgccgggcgatttccggcacatccattgatgttcccgagttgggattgacgatttgccagtaccccatgttgaccggttggccgcagatttcacaccattccaggcctctcaacatgtagttgattttatacacgcccttggcgtcggggctgtcgggctcgaggatcggcaggtgatcgatcacctcggcgcaccgttgggccaattgaattccatcgggcaagaggttttcgtcctggtcggcgtcgtagagattcagtccggccgccagttcctcgctgtcggccaataggtctgcgtccaggtcattcgcatccggggcgatccgctcggcggatgccgcagtgtaatccagtgacagttggtggtcgttgggctcgtatgggaatcgaagctcaagtgtcctggcgagcctggcgatatcgaggcggcctcgatggatgtccccggcatggctgaacgatccatgctccatgtagtgcgaggcaatgatgggaatatcgaggttgagtcccaaccttgggttgatgattcgcacagagcccatgttaacagtctctccacagacgtcacatgtctccagtccgaacaacagccactcttccttgcaaatctgatgggggctcgtgacctccgccttcaagggcagttctgcgatgacttgcgcgcaccgcatggccaactcggctccgtcggcggcgccgttgttgttctgatcgccttggaatggctggtgtccgagggcgacttcttcgcgatcggccaggaggtcggcgtcggcatctgcgtcgagggcgacctgatgcttgtcggccagcgccccgaccggcggatcggccagcacggcgtgggttgccaatgataatgatatggcggtcgccgtaccggcggtgaggacatgacgtctcaaacgtcggcctgcttgggcgtgttttctttgggttctcttgagctttctcatgtcaatcctctctagggataaccgttcaccgcaacactcgaatccatcggcattgtatcataaggacgaggcgcggtccagagaccgcgccgggaccacagcgttgccgccggttcttatgaagcgactcggtttcgcctctgctctcaaatacgccgattggtaaagagcgtttaaagggaggtcggcaaaaagtcgtgggaacgtcaaaaaaaatcggctgctctgccgaccagtgtcacgattgattttattggacagttgcagacgtcgccacttgagaccgaattgttgatcaatatgttgtggttctggctgcgagggtctcctatgtcgtggcttcggttatggggcgttcgcctctcggctttggaggtgactaaagaaaagggcgccttcctgccgatatgccacaagtcttaagggcagagcacgacgggttattttaggatgcttgaggatggacaagaacgaactgattgactgcatttgcgaaatcaaccgcagcgcgaagacagaatttctcgcccagttctcggaagaggatctgaccgcctacctcgagcatttgatggaactggatctgcacgagttagcggtctgtagctagctgccggtctctgacgttgtctcgccgccgccctcggactatgggtgggctgatgtcgcgatgcccggtgacatcagcagtatcgtcccctcgccaggctttgtttctccccccgcagtagccattgcgtcgctgaacttgacgccagagtcccctccgtggtcctcgttacgatcgagggcgctgtcggtcaggagttgaccggccaggttgaggcaggctgccgcacctgccttcatcgcgaggccggcggccgtgcgttctagcgcgatccgtcgcgggaaggggcggcctctgagtcgttctctttgggcttgaacgaagcatcgaacgagatcggctgtggggcctcttcttcggcgaccggcgccgagagcagttcgagattgttctgtttgaaaccgagcagggttgggaccattggggtcggtacgtaaaaggcaaaatcgatctctatggctttcttctctttgtcggagctctgaatcgacatcacctcgtggagcggcttaaattccaaccgccctttagcgccgatgtagccgatgggatacacagcttgcccctgtccggcgagagggtcatcggcgtcggctttcggaacgcaaaccacgcgcagttgagagagcgtgaactttcctgcgtcctgcagcgcgttcttcctgatcccgacgcgtacgagcatgagcttctcgccactacgagccggcagcgcctggccttccgtgtcgcggagcgaactgggggcctcccagacggccttgtcggacacgctcagcgcgggcttcgtcgtcgcggccggcacgtccttcttgtgccgattcagatggagttggtcgacgtaattggcatgcagaacggcaaaactcctgggcttgcccagggccgcaaagctgcccttgctgacggtcccaaagaagccggcgatgaacccgtcgggactgagcatgggcttgttcggctgggccgggtcgatgttccgctcgttgaaccgtgcatacggatagctctggggcaggggggccgtcgccaaggccagcagcaggttgccggtgatgatatacccgaggatgatgccgcaaaccacgcgtccgatgcgctcgggccacaggccgagttcaaccttttccttgccgatctgcatgacaatcgtctgtaggattgccaaggccagaacgaacagcaacaagaagcagatcatctgggcccaggcggcgatggcggccgagtatttggccaacatcgtggccagcgtctcgaagaatgcacaggccacgaagctggcgaacagcgcgttgaagatcaacgcgagtccttgcgtcagggtccccttgaggtatagaaccgccgcacagcccaatatgattgcaagcattaccaaactgaccattccacgttctccgttttctcagggatgccgaccgcttcgaggcggcaccaggatgttcttacttggctgcggggcgccccggtttcttgcccgacgagagcactcggagcacttcgttgatcgcggtttttccggcgatcacctttctgagggcctgctcctgcaagtacagcatcttggcccgtcggaattgcatgccgagttccggcaactgcttcacctggcggatggccttgcgcagttcgtcgttgagtacaatcatctcgaagacgccggcccggccgacgtagccggttccctggcactggtcgcacaccgaaggcttgcctcgtttgtcgtagacctctttacccggacgatacagcaccttggccttttcggccgggaggttgaatttcttcaataactctttgttcggagcgtagccttgcttgcactcatcacatagcgttcgcatcatgcgctggtcgctgatgccgatgagggtctcggcgatcaatttcttgtcgccaaccatcttgatccatttgcccagggcctgcaagacactgtcggcctgcaggacgacgtagacgagcttgccgtcctgggcggcggcgctggcgattttggcggtctcggcgtcctcgcactcgccaatgccgaccacgtccgatcccatcctcaccatggactggagtttcgtcgcatacgtgccggttcccgtgtcggtgggactaaagacgtgctgagtgatattgagcagttgcgtcgccggctgtttctccagcgtattgatattattaagaaaggcgtcgtgatgtcgcaccagggcgtacagcgtcgtcgtgattccgctcttgcggggcccggcgatgaggaagagcccctgagttttctcgcgcatatggtccaggtgttcctgctgatcgggggccaatcccagttcgccgatacgcaagtcgtgttctttggagacctgtttcaagcggacctgctctccggccgtcgagccggcggacatcacttcccattccacgttttgcttcttctgtgccgtgcggaatttgcccttttgcggcttgcgcttctcgctggcgtcgagggcggccagttccttgaggaagtggataaggtactccatctgttcgcgcgggacggcgggctgcttggtggcggccccgtcgatgtggtaggtcacctcgtagctgtcgcctttgggagcgaacatgacggtgctggctcgacgccacatggcgtctgtgagcacgtcgtaggcggttcggtagccgaagaacatcggggtgcgcggctcgggagtcgggacttcgttgttgttggcggtgatgaactggaagttctccatcgcctcgagcttttcggacttggcgaaggtgtgtttgatatgctcgatcgtcaggactcggtcgaaatcaagcacgcgggtgttgcggtgcctgacgtaggccagccccgtgccgccgacggcggccaggaaagccagcaatccgacgatgaagaccggaatcagccaccaaagcaggatgcctagggcgccggctccaacgatcagaccgatccagaagccaatgtttgtgtcgactgcttttgcatccttgtgggcccaggtcaccagcagaaaccagaggaaatacaggatgaggaaggcaatcagcttgacgattgagacgtagccgccgtactcgatggacattaacagaaaatctggcattgaacgctccgttaccacaaagttgtgaccgcgcgatgaacggcacgcgcggtcttcgcgtcattgactaaaggatgcctccggtggttgttcgaatccccttcagcgccatcttgagttcctcggtgtttggcgccacggggtaggcgtccttgggatcgacccatccgtcttcgatgagtttgcagaggctgtccgtcaggtcgaccatgccttcgcgctgggaccctcgaatcacgctgggcaagtcggcctcgcggccctccgagatgagctttcgcacggaaggattggccaacatcacctcgacggccggaacgcgcgggatgccttctcggatgcagggcaggagggcttgactgacgattgctcggagggccagcgccagcgtctgtcgcaccagttcacgctcttcctgggggaaaaggtccagcaagcggtggacagcctgtgaggcgttggacgagtgcatggtccccatgacgaggtgtcccgtctctgcggcgcgcatcccggctgtgacagtccgggcgtcacgcatttcgccgacaaacacaacatccgggtcctgtcgcatgaggtaggtcagcgcctcgacgaagtccggcacatcgatcccgatttctcgttgcgagacgatggctttgttgtcgttataaaggtactcgatcggatcttctacggtcacgatgtgacaagcacgcgtttgcgtgatatggtccagcatcgcggcgatggttgtggtcttgccggagccggtggcgccgaccaccagaaccagtccctgatgcgccgcggccacctgctccaatacggggggcaggtgcaggctctcgaacgagggcacatgggcgctgacgcgccgggccaccaggctgatcaggcctcgctggcgaaagacattgatccggaaccggtgctccttgccaatctcatgcgcgaaatcgagtgtcccgttcttgatgaagaagtccttctgagtcggactcaggatctcgaacactaactcttccatgcgctcaggggtgagcacttcgccggttgtgttcttcagactgccctgcagacgcagcttgggcggttgtccgaccttgagatggatgtcgttggcctcggtcttgatggccactttgaagtaccggttcagctgaggctcgtggtccagtgccttgtgggcatccaggggttgatctggtgtcatgatcttgctaactccataaacgaaaagaccggccaccgtgtgccggttgccctagcacaagccaacaacccgccgaccgtctgcgagaagatttgcagcgacaaacctttatgactacgtattataagacacagttccacctgttgtcaagcctgatactttcaggattcgcccgattctccgcctctcttaacaggattgtttttggtttagttgccgtgtcctcctgatccgtgcatgtggctcctggtgggcccgataatctacttcctggaggggcctgccggcgtgctggggcttttgtctttgattgttgcctggagtcacgctatagtcggcctgcgcggcctccggatgtccgggaggctgtgcgattgggatgcttgtgggaattggagccaagaagggtctatggcgcgtggcttgttttacaatctcggtagaaaagtgggccccaaggtccgcaaggccaggtgggtctgggagtccgtggcgggcaccgagaccgacaccattcgactggagcacggcgttggtatggacctggcccaggaggcccggaggcagcttcaaggggaccctgagacggcgcaggtgctggaggaggtcggtggccggctggttggtcgggtggcgaacaagctgcgttccttcgagttcgaggccttccagggcggtgaaccgaacgccttcgcgctgccgggcggcttcgttttcgtcagtcgtcccattgtagaactctgccagtgggacaaggacgaggtggccttcatcctggcccatgagatgggccatgtcatcaagggccatgccattgatcgcatcgtcaccaattcggccgtctctatcgcctcgcgggcgaccccggtgcgcggcgttctcggcccctggctgcagcgggtgggggtccagttcctggagaccgcctattcgcgggatcgagagctagaggcggatcgactcggcgttcgcctggccgcggcggccggctacgatccgaaggcctctctgaagttgttcgagagcctggcggcgataaaggcctcccccgatccacttgacctcggggcgtatttctccagccatccgaccttcgacgtgcgcatggagagcattcgccagtatatgcggcaatggtaactcagataggaggcgggccggttccgccggccagggcgacggccagggccatgtagattgtgacgctgatggagtcgttggcggttgtgaccagcggacctgaactgatcgccggatcgataccgatgccgcggaacaggaaggggagcatcaatcccagcgtggtcgccaccatgatagctgagaacatcgcggtgccgaaggcgaacaccaggcgggcgggttctatggccttctccgggattctcgtatggatcagaatggtgcaggccagagcccccatcaggccgcaactgagggctaccagaaacgcgatgcggacttcccgagtcaacaccgtgctgaatttcaatgccgccaggtgaccggttgcgaggccggagaccacgatggcggaggtctgaagcccggcattgccgctaatggctgcgatcatgggcacgaacgaggcggcggcgaggaacacgacctcgttgtatgtcttgaagaaggtcatcaccagtgccgtcacggctgtcccgatcaggcagggcagaagccaggtcatgcgaatacgggcggcgtgaaaggccgagaagctctccaactcgtccgggtccgtaccggccatcgtgtagaggtcctcggcggcttcctcctcggcgacctcgatcacgcggtcggccgtgatccggccggcgagtcgatggtccttatccaggacgggggccacgattagatcgttcttactaaagatattacggacctcttcctggtccatgtcggtctgcacgtagatggtgtccgggtcgatcaactcgccgaggcgcgtctgctcgggccgggtcagcaggaaacgcagacggacgtcgccgacgaatttcccatcctgatcgattacatagacggaatagaagtcctcatcgatctcagcggcgcgaatcttgctgaccgcctcggcgacggtggcgtcctgggccacgctgatgaccagcgggtccatgatcccgccggccgagtcctccgaatagcgcatcagcttgtggatctggagacggtccgtttgaggcagactgcctaatacctggtcggcgaactcgtcgggcatctccgccaagaggtcggccgcgtcgtcgtaatccaactcggagacgatcttcgggatctcgtgatccttgagcaactcgaaaagacgctcgcgcgtggcttcattgaccttttcgaggacttcggccgccaccggcgtctccagcatgtcgaagatctggcgtcgccggtcattgtccaccaactcgaccacttcggcgatgtcactggtccgctggtcatcgagaagggcgcggaggctcgccgcgtcctcggattcgagcaagagtccaatctcttccagtagttgtttctgctcttcggccatctgcgagcgcacaccgtttcccgttactcgtgctatcgaacgtggcaccaccatctgtcagtcgtgacaaaatcacccacctggcggacaagaatagtcgaatcagttatgtcgggcaactgttttgtcatgcgaccggtcctgacagatggggtcggccttggccaggccgggagaaggccctcgatttccggccatgcatttgctatactggcccataagtggtttatctgtgaggagagatgatggtcggcccagggccgataagaaacacgtcgaaccatcacgcttgctcctccaccggtctttctgagggttgtgtgaagaccgccgtagctgccgccggaactctgacgacacaagggacgcgctatgccaagatcgatcgttgcctactttgtttatgggatcatggctctcgccatggctggttcagcccggggggcttgtcctgtgggagatctgacgggggattgccgggtggacccgctggatctgtcggctctcttcgaccaatggctgctggaggttgacaccggggcggacctgaacgccaatggtcgggtagagctgggggattttagcagtctggcccaggcgtggcgcgccgcgccgattcccttggtgatcaacgaggtcatggcttcgaacagcaccttcgtgcaggatttgcagggcggtttcgacgactggatcgagattcacaatgccggtcggacgacgatcgacttggcggggatgtacctgacggatgatcccagtgacccaacccaatggcagttcccgaccgacaatcgcactcagacggcgattggtcccaaagggtacctggtcgtttgggccgatgaggataacaccggcgtcatgctgcatgcgcacttcaggctggacgccgatggagatgaggtgcacctgttcgataccgacggcgtaacgctcatcgatagcctggtctttggggaacagacctccaatatgtcctacggacgttaccccgacgccggcaactcccagcggttctttggctttcccaccctggggcgacccaacaacgaagggtatctgggggaggtcggtcccctgcgattcagtcatgaacgtggcttctatgacgatccgttcgatctgacgatcacttgcccgacggagggtgtcgagattatctacaccaccactggcaaggcgcctgatgacgaaagcggtcgtttccgagcgggtctgacctactccgacccccttcggatctctcggacgaccgccttgcgggccatggtcgtcaagcctgggtggaagccctcggagatcgcgacccacacgtacatcgtcaatgcttcggagagtattcgatcgctgcctgtcatctcactggtcggcgacaaggggcaaaccttctatgagcccgaaggggtcatggcgatcgtcggcggcacctacagcaacggcgtctggacctcgtcgggagcgggcagttataacaacgtactgaaccggggcctggagcgtcccgtttcgtgcgagtggatggaccccgagggggacgacatcttccaggtcgattgcggtctccgcgtgcacgggagcggttggatgcggccgcggtacattcggcagaatggtcagtggaccgggaacggaaaattcagtttgcggctctattttcgaaaccaatacggtccctcgcgcttgaccgtccctctctttgacgagtccgacgccgagcagttcaagagcatagtccttcgcggcgggcataacgatcggacgaatcctttcattaaggacgagcttctgcggcgtctgcacaaggacatgggccagcgggccagcatggggaacttcgccacactctttgttaacggggagtacaaaggctactacaaccccgccgagcacatcaaggaggaggcctgccaggaatggttcgatagcgaccagccttgggacatcatgacgatgaacggcattcgggacggcaaccaggagtcctggaacgagatgctcaattcggcctgctccaacaatctggccgtcgatgcgtcttatcgcgaggtgatgaacaaactggatatcgtctcgttcatcgattatctcattattcgcctctggcccaacgactgggattggccgcagaataactgggccgcggcggccgaacgatccgcgaccggtcggtggaagttctttgcctgggatgccgaggggaccttcgtgtcgagccagttgcatgtcgaccgattcggagaactcaacagccagaacaatgccaacgcgcaactctaccgggccctcaaggtcaacaagaacttccggcaactcttcgccgaccggctgtacaagcatttctacaatggcggcgccttgagcccgggcaatatcgaggcgcgattctccgacctccgcgatcagttgcgcggcgtcatcccgaatatgaacacgtatattatcgatggatggacgccgaatcgcgcccaggtcttcattgacgcctgtcttcgagaaggcatgtacaccttcgccggcccgaccttcgccgtcaacggttccagtaagcagggtggttacgccattgccggtgacctgttgcagatgattccccctcgacagggcgcgccgatctactacacgctggacggcaccgatccgagtggctctcagatgtcgaccgagacgcccatcgtgacacttgtggatcgcgctgcggccaaacgcgtcctcgtgccgaccgggccgaacgtgggggactggaccaacattcggggtttcaatgattcgaactggattctcgtcgaaggctatccgggcggtgtcggatacgaacacagttctggttatgaggactatctcggcgtcgatctcgagcgtctcatgtacaacaccaacggttcctgtctcattcggataccgttctctttctccggcgaccggggcgaactgggacagatgaccctggagatgcaatacgatgatgggtttgtcgcgtatctcaacggggccgagatcgcccggcgcagtttccagggcgaacctacatggaattcgactgcgacggcctcacatggagacaccgacgcggtggtcttcgaggccatcgatgtttccagctccctcctatcgttgcgaaacggcaccaatatgctcgctatccaggggctgaacagttccgtcaccagttcggatctcctgatcacccccaagctgaccgttgctcgcgatgttgtcgcagaggtgcctgacggggccatgctgtacgccgcgccgatcccgctgacgcaaagcgtgcgcgtcaaagcgcgtgttcgcaatggcaacatttggagcgcgctgaatgaggcgtcttttgccgtcgggccggtggccgaaagccttcgcatcagtgagattatgtaccatccggtggatatgggcggcccggacgatccgaacaccgagtatattgaactgatcaatgtggggcctgtgacgatcaacctgaatctcgtcagcttcaccgatggcgtcgattttactttgcccgagattgacttggcgccgcaagaccacgtgttggtcgttagagacctcgccgctttcgaggggcgatacggctcggaacttcctgttgtcggggtctatcaaggcagcctcagcaatgccggcgagcgcattgtgttgcaggatgcggtcggcgccgtgatccaggatctgcgatacagcgatgattggtacgacatcaccgacggcgccggtttctccctgacggtgcggcgtccagtcggcggtgtcccgatcgcccggaaccagaagagcgattggcgacccagcgccgccgcagggggttcgcccggtttcgacgacgccgatcagacgccgcctttaggggcggttgtcgtcaacgaggtgctcgccaattcggccggtggtgttcccgattggctggagctccacaacacgaccgatcaggcgataagcatcggtggctggttcctcagtgacgatgacgacgccctgaccaagtacgagattatggaaggcgccgtcatggctccctatggttatctggttctcagtgaggatcagcatttcggcaatgacggcgaccccggatgtcacgaggcgttcggcctgagtcgcgacggcgagaccgtctatttgcattcgggctttgaaggcgccctggccggctataacgagcaggtgacgttcggtccttccgatccgagtgtcacgctggggcggcatcggaccagcaccggcgctatcgatttcgttcccctcagcgcgcccacgccgggtcaggagaatgccgatccacaggtcggaccgatcgttatcagcgagatcatgtaccatccggccgggtccgaggacgccgagtacgtcgaattggtcaacgtgaccgatgcagatgtgacgctctatgatttcactcaggcggcgccctggcgtttcaccgacgatcccgacaatcccagcatcgaattgcttttgccgaccgacccgcccgtgacgttggcgccgtaccgttacctcgtgctggtcaaggaccgggcgcttttcgagagcgtttacaccgtgggtgcaacggcgcagattctcgaatggccggccgggagcctggacaacgccggtgaagtcctgcaactcagcacgccgggccgtctggatgacgaaggacagcgtccctgggtcgtcatggatcgtgtggcctacagtgacggtgcgcatccggaaaatttacctggcggcgtcgatccatggcccgtcggagccgatggccgggggctgtcgctgacacggaccgttcccgcccattatggcaacgaccccaacaactggcacaacgccgtcgattcacccggcgccagtcgccgtcgtcccggctagaccttgatgaaggtcttcttgcggtacatatagaagaggatcagccatatcacggcgacgctggcgacggcccggacgaagctgtgccaatcccccgtccattggctcagtccctggaccaggatgtcgcccaggtgccggaagtcgaatacgtgcgtcatcatgtagatggcaatggcgttggtcccgatgacgacgaaggggaaggccagaaagcgaagccggagcacgtcgatgaccaggtagaaaacccccagcagcagaaggctccagccaccggcgtagagcaccatcgaactggtccagaggtgcttgataatcgggaagatccgtccccaccagtgtcccaagtagatgcatgcgacgcccgaggccaggaggaagagcacttttctgactttccccaggtcggatcggagcaattggcctgcgaacgcgcccatcattacggtcgtcgcgaaggtcatgccgctgagaatccacgtatacgtcgtgccatcctggtagggacccaggatcagtttgtcaagatagatggcgagattgccttgctcggtgagttgcccggcgccgtgccccggtacggggaccagcatgagcaacgcccagtacagcagcaggagcgcgaccgtggcgattgcctgccaatgcgctttcaggttcaacaggaggaccgaggcgatcagatagccggcggcgatggcctggagggtgttgctgtagagacggagcgtcgccaagtcgtactcgagcaagcggccctgggcgatcatgcccagaacccacagaatgaccactcgaagcatgatgtgcaggtagattctggccttgctctgaccctgaccgagccgcttggcgaaggaaaatggcattgccgcacccaccacgaagagaaacagcggcatgatcagatcccaggcgacgaatccctcccagggcatgtgccgggtgtggggcatgatgacctggtcaaaccatgggctgttgagacccttggccagaccgccaagtatcccgcctcccccgatgatccatagcatgtcgaagcctcgcagggcgtcgagcgataccaggcgtccttccttcgcaacggcgggtttgtccacaggtatatccattcgagaatctccttcttcccttgtatcacaaggccactcctgcaccggcagggggttgacacgcatgccccggccgcttgtcgggggggcatgcgcaacgttgcggccaaaataacgccgcgcagccgcaaattcaatcctcattgtgcggcacacttttctggggggatatgcaagatatgtgtaaccgatgtgccttgagcattcactagacacttgagttggtgtgcagaggcctatctcgccggcgaaaatccgtcaaatctggatttggccacaataacgcggcaatttcctgcgtctatacctgtctgatggctttggcttttatcgggtctgatgcgctgtgaccgtgtcgtcaaggcgttttctcattgactttagtggtgtaaatagagaaactacattatttgggcatgcttatgaagcaacgcaaccatggagaagtggaccggtggaggctcaggtcgggagggacgcccctggcgatgctgctcttgctggcgggcgctgtcctggtcggctgtcggtctccccagcaacatcgcgagaaggctgatgaggtcgcttcggagattatcgcggccaagcagcaggaggcgctgggcaagaccgagccgttcagcatcgaacgaccgagcgatctgcttcggcgtcgtctgctggtcgagcagggtctgctttttgccgatgaggcgtcgctgggaaccgaccaactcgaacgcatcccacactggcccgaggacaactatccgctttcagtgacctcgcccgatgcggcgatcgcgattgagccgaacaagccgctcaagctcaccttggacgatgtgctgcagatcggggcgcggaacagcttcgactatcagtcccgcaaggagagcgtctttcggaccgcgcttaacctcgatctgacccgcaacgacttccgcaacatcttccgagccgacggggacagcacgctgaccgccgatacgaggggcgacgagaccgttacgacggtggactccggcgccgtggcgggcgtgacccggaccctcaagaacggcatggacttgagtaccgcggtggcgatcgatctggcgaacctcctgacgcaaggcggcgcctcctcgctggggctcagcgccgatgcgagtttctccgttcccttgctcagaggagcgggaaggcatattgtgaccgaatccctgacgcaggccgagcgcagcgtgatctacgaaatatgggatttcgagcgtttcaaacgttcgttcgccgtcgacgtggcgcgacgctacttcgatgtcctgcgccagatggatgcggtcgccaacgcccgcgacaactatcgcagcgccattacctcggcccggtggtcgcaacgacgggccgatgccgggcgcatccgcgagatcgaagtggaccaggctgtgcaacgtgagctgggggcccgcaacaattggatttccgcgcaggagcgactgaaagggaatctcgattccttcaagagtgcaatcggcctgcctcccgacgcactgatcgaactggacccgaacgatctcgtgcaactgcgaacgctctcggaagaaacgctcgaaacgatgcggaaggcctctcagcgagagacctccgaaacggctcccgcggccgatgcaccggtcgaactggtgccggccagctacgaggacgccgggacgctggaactggacccgatggtcgccgtgcaactggcgctggacaaccgactcgatttgcaggcggcgatcagcggagtttacgacgcccaacggcaggtcgtggttagggccgatgccctgagggccggcttgaacctgggcggttcggcagcgctggcagacaatgacgatgatggcagtttgagcttcgatggggcgcggtatagagccttgctctcgctggatctgcccatcgaaaggacggccgaacgcaacgcctatcgcaacagcctgatcaatctggagcgggccacgcgggacgttcagtcgctggaggatgacgtcaaactggccatccgcgatcagttgcgcacgcttctggagtcgcgtgagagtctgaagattcaggcccaatcggtggtggtagccgaaaaacgcgtacgaagcagtacgctttttctcgaggccggccggatagagattcgagatttgctggacgcccaggattcactgctctcagctcagaactctctgacttcagccgtcgtaagctatcgtattgcggagttggaactgcagcgcgatctggggcttctcgaagtaaacgaaaagggattgtggcgggaattctcgcccgaggacaacgatcatgacagctaaaaacggcaacaggaccagtggtggcggcaaatccttcaaggtggctggcgccctcgtgattattgtggcaatcggcctggcggtcgtttggctcaaggtggtccgagggggtgagtcggcttctatggaaatgtccaccttcgcagccgaacgcggacctctgaccatcagcgtgctcgagtcgggaacgatcaaatcccgcgagcaggagatcatcaagaacgaggtcgaggggcgtacgacgatcatttccctggttgccgagggaaagcgggtcaaggagggagatctgctggttgagctagacgccagcacgatggacgacgacaagatcgagcaagagattcggacgatgaacgccgaagcctcctatatcaacgccaaagagaccttggagatcaccaagagccagacgatcagcgatgtgaacgtggcggaactgaccctggagttcgccatccaggatctggagaagtacaagagcgggcagttccccaacgacgagacggccgctgagaaccagatcgagattgctcgtgaacgactcacccgcgacgaagagacgctgaaatggtcgaagcggctcttcgaagagaagtacatctcccagacggaactccaggccgacacgttgaccgtcagccaggccaagaacaatctgcagttggccgagaacgattatcgactgctgaacgagtatacctacaatcgccagatcaagcagttgggtagtgacgtcgatcaggccaagatggccctggaacgcacccaggcgaaggcccgggccgacgtggttcagtcagaagcggatttcaaagccaaggagcaggaattcaatcgtcagcagaccaggctcgccaagctgctggatcagatcggcaaagcgaaggtctacgccccggccgatgggatggtgatctacgcgacgaccgccaaacgcgggggctggcgtgataaccggcagccgttggatgagggcgtcgaagtctacgagcgtcaggagttgatctatctgccgacggccgattcggcgatggcggaggtggatatccatgaagcgagtctggagaaggtcaaagttggccttcccgccatcattacggtcgatgccttgcctggccaacggtttatgggcacggtcggtcgcatcgctccgctgccggattcggcgagcatgtggatgaatccggatctgaaagtctacaactcagatgtgtatctggaggatgaatcggaggaattgcgcaccggcatgagctgcaaggtcaatatcgttgtcgcgcagtaccaggacgcggtctacgtgcccgtgcaggcggtgattcgggtggccggtcagcccaccgtctacgttgtcaaggaggatgggacgatcgaggagcgaacggtggagatcggtctcgacgacaacaagatggtcgtgatcgagagtggtttggacgagggggagatcgtgtggctgacgcctccgctgaagtccgccagcgtggagtccggctcggaaggcatgctgggtggggtcagggacgccaatggtgtctccgatggcatcacgcagcagatcagtgacaagctcaaagccgccaatgaggccaagcccgaagcgcctcaggttggcgaggaggggcaggagggctctaaggggccggcctcgaagcagatggaagatatgcgcaagggtatgcagaacatgacggccgagcagcgcaaagaggtcatgaagcgcatacagaatatgacgccggaacagaaggcgcagttgcagaaggcgatgcaaggtgcggccgcgggcggccagggaggtcgcggcaggccccaggggcagggcggacaacccggcggcaggccggccggacgccccagaccgccgcagggcggcgccagagggggtcagtagatggctgaccaagccccttccagcgatcattccgatattgtcaagctcgtcgaggcgcgcaagacctaccagatggggaccgaggaagtccgggctctggccggtgtggacatcgccttcgaaaagggcagcttctgggcgatcatgggaccgagtggatcgggtaagagcaccatgatgaacgtcctggggtgcctggatcgcctgacctccggctcctattacctcgataatcaagatgtcagccagatggatgacgattcgctcagcgaactgcggctcaaatatctgggattcatcttccagagtttcaatctgattccccagttgtccgttcagcggaacatcgagctacccctctactacctgggttgggatgccattcgcagcgctgagcgagcgaaggaactggccgaggaggtcggactgggcgatcgcctgaaccatcgaccgacggagctttccggcggacagatgcagcgcgtggctgtggcccgggcgctggccaacgatccccacatcatttttgccgatgagcctacaggcaatctcgactccgtcacgggcgtccagatcatgcagttgttgagcaaattgaacgagcagggcaagaccgtcgtcatggtgacgcatgagcccgatatcgcgacctacgccgagaatcggttgcacatgatcgatggcgtgatcgatagaatagaaacaggtgcgcatgagacagacgaagatcgccaggaatatctggctcggcattgagaatctgctgctccacaaactgcgttcgttcttgaccatgctgggtgtggtctttggcgtgggcagtgtggtggccatgctctcggtcggtgagggcgccagccaggaggccctggctaatatccgcaagctgggcagcgacaacatcattattacatcggtcaagtcggtcgaggatgagcagtccagcacgcagcattcgcacatgagtatctacggcctgacctatgacgaccaggaccggattcgcgatagttttgcacgcattcgcaagacggcgccggtcaagctgatgcgcaaggagacccggctgcgcgagcgcgccatggagctgcgcgtggtggggacgacgcccgaatggttcgcgctggtgccgcgtgatattatcgccgggcgcgtgatcgtctcggccgatcagcgcaaacaggccccggtggcggtgctgaccgagtttggggcccgcaagatcctggccaccgagagcacgatcggtcagaccgttcgcatcggcggggatgagtttgagatcatcggcatcgtccagagtgagagcggccaggcgggaaacattcagatccctgacgaagacgtggacatctatatccctctggaagtcgcccgcgactacttcggtgatatgtttaccaagcggacctccggttcgttcgagcgggagaaagtgcagttgcaccagatcattgtccaggccgatggtcccgacgctgtggagtccaccgccgcgggtatcgagcggatgttggagcgctttcacaagaagaaggactacacgatgagcgtccctctggcgctgctcaagcaggccgaggcgaccaagcgaacgttcaatatcgtcctcggttcgatcgccggaatcagtttgcttgtcggtggcatcggcatcatgaacatcatgttggcctcggtgaccgagcgtacccgggagatcggtatccgccgggcgatcggcgccaagcgtcgccagatcatctatcagttcctgattgagacggtcgtgctctcgatgtttggcgggttgatcggtctgggtgtgggcaccttgatacctttcctgattacctacttctccggcatggtcacggtcgtgaccctggacggcatccttctgcccctgttcatcagcatggcaattgggatcctgttcggtctgtatccggccatgaacgcggcgcgggtcgacccgatcattgccctgcggcacgagtaaggtgtttggtgggccgtctgccgaaacggacggacctatgctgagctaactggttgcgggaggatgtgcgcatgagacagaccaagatcgcacgaaacatctggctcggcattgagaacctgttgctccacaagctgcgctcgttcctgacgatgctcggtgtcgtgttcggggtcggcagtgtggtggcgatgctctcggtgggcgaaggcgccagcaaagaagccatggcgcagatccgcaagctgggcagcaacaatatcatcgtctcctcagtcaagccggccgaagatgaagcggccaatactcagcggtcgatgatgagcatcttcggactgacctacgacgattacgagcgggtcgccgacagttttgggacaattcgtcaggtcactccggtaaagttgacgcgtaaggaaacgcgcctccgcgagcgatcgatggagctgcgcgtggtcgggacaaccccggaatggttcaaactggtgccccgtgagattctagccggtcgcgtgatcatgccgggcgatcagaccaaactggcgccggtagtcgtgctgaccgaattcggcgcgcgcaagatcctggccaccgaaagcgtcatcgggcagaccgttcgcattgggggcgatgagttcgagattgtgggcattgtcaagagtgagagcggagaggccggcagtatccagatccccgacctgcaggtcgatgcctatgttcccattgaagtcgcccgtcggtactttggtgatatattctccaagatgacctccggctcgtttcagcgggagaaggtggaattgcaccagatcatcgtccaggtcgacaaggccgaccacgtcgaagcgacggcggccggcattgagcggatgctggagcggtttcacaagaaaaaagactacaccatgagcgtccctctggctctgctcaaacaggccgaggcgaccaaacgaacgttcaacatcgttctcggttcaatcgcgggaatcagcctgctcgttggggggatcgggatcatgaacatcatgctggcctcggtgaccgaacgcacccgggagatcggcatccgtcgagcgatcggcgccaagcgccgtcagatcatctaccagtttctcattgaaacggttgtgctctcgaccatcggcggattgatcggcctgggcgtgggcaccctgatcccgctcctgatcacctacttctcggggatggcgaccgtgatgactctgaacgggattctgttgcccctgttcatcagtatgggcattgggattctcttcggtctctacccggccattaacgccgccaaggtcgatcccattgtcgccctgcgccacgaataggagcgccggcgctgatctgaggaatgcgcgacagaacgcgtaaccttctctgggcagggtcccactaccctgaggacaagacataagtctgaaagaagtcgtcaatagattgtaaccggcttccgtgcgggctcactgtatgcgggaggcggttccgtgggggatcgccttcgtgttggagtaacggtctgatgtttctcccaaaggagacttgcgtcaggaccggcgtggtcgaacaaggatgctgaaaggagtgacagatggcaagaagggcgatggtcggtctggttacggtggtgatgctaatggttgtgggatcgctcatggcccagccaccgtcgctagcgcggcccgtcccctcaacggttgggcgtgtgcctgtcgccgatgtcctccgacgactgggggcgaagcttgagcagggagcggcgaccaaggagtccgacgattacgcaagtcatttcaaccggctggacataaaccgagatgggaggcacacgagggcagaatacgtcgagaagggcagctacatgacccctcaggcgcgggcgggcatttttcgagccgccgatggcaatgccgacggaattgtcaccaaagctgagtatgttttgaaccggatcattactgatgaagccaaagcgatcgttcaggggatggacgatgataaggacggtttggtggagcgagcggagttcgtcgagcatgcggcgaaactgctttccgatcctaagttagccaggcaggtttacgcggcactggatacgaacgctgacggcgggattcccatgcccgagtatctgcgcgtgtgggggcagtgggcgcgggttggacgaaagtcggctgaacagcgcctcgcggtgcgacaggtggaattcacggattttgcgagccgacccggtcaacagccggatcgtccacgcggcccgcgggggatgggacagttcatggagagcaaacctgccctggccaagacggatttcgagaagaaggtcctggcggtgctggatgatatggacagaaaccagcggcgcggcaatatgaacgtgcccatccaggacggtcgactcctccgacttctggccgagacaatcggcgccaagcatatcgttgagttcggcacctcgaacggctattcggggatatggcaatgcctggccctcaagactaccgggggcaggctcactacctttgagatcgatgctcgacgcgccgctatggcgcgggagaactttacgaaggccggggtgggcgatcttgtcacgctcatcgagggggacgcgcacgagaaggtggtcgaggtcaaaggtcctgtcgatatggtctttctggatgcggacaaggaaggctacgtcgactacctgaacaagctgttgcccaaggttcgtccgggcggtttgataatcgcccacaacatgaacgcgcgtcaggccgatcctcgctttgttgaggtgatcaccacgaacccggacctggagacgatctttctcaacggcgtcggtctgacgctcaagaagcgtagtctgccctagagagacgatgtcgaacatgcgtgacatggtcgaccagcgatcttccttcacgagggtggtgccgatgtgatggcgccggccaggccggctgccttggaatagccgcatcggcacccctttttttcttcacggggagtgctagggatgaataggcaggcagtcgcagtagttgtcacgttgctgttgtgtgctcaagcggtttcggcctcggattggcccggtttccgaggacccggcgctaccggtatcagcgacgagactcatcttccgattgcgtggagcgaaacagagaatctgaagtggaagcgctcgcttcctggttccggttcgtccagtccgattgtcagtgggaagcgtctcttcgtaacctgctactcgggatacggccttgacgatcgcagccctggcaaaccagaagaactgaagcggcacctgctctgcctcagcgcggttgatggcgcggtcctgtggcataaaacagtggacgcggctctccccgaggatccctatcgcggttacatcagcgagcatggctacgccagcagcacgccggtcaccgatggacagcacgtgtacgttttcttcgggaaatcgggtgttctggccttcgatttcgagggcaaccagctctggcgcagagccctcgggaccgagtccagcaatcggcggtggggttcggcctccagtccgattctctatgagaaccttctcatcgttaacgcctcggaagagagccggaccctgatggcgatgaacaaactgacgggcgatgaggtgtggaaggtcgaagcggacaagaccgagttgtcgttcgcgacgcctgtgatcgtcaaactcgccgatggccgggaggagttggtcctggctgttccctcggagatctgggcgttcgagcctatgactggaacgctgaattggtatgcacggacgacgctgggtggaaacatctctccgactccggcggtggccgatgggatgctctacatctttggcggtttcccttccaccgaggcggtcgctctccgcgccggcggcaaggacgacgtcaccgaaacccacatcgcctggaccagtcgcgacgcgtcgtatgtcccgtccccactggtgcacgatagacacctgtactgggtcagcgacaagggacgcgctttttgcgccgaggcgaagacaggtaagatcctttttgaggagaagctgccggtcaaggggggcaagcccttctatgcctcggttgtcctggccgagagccggctgtacgccgtcagtcgcacgggtggtacgttcgttctggccgccaagccgaagttcgagcaactcgcgcacaatcgcttcgtatcggacgacagcgatttcaacgccagtcccgccatcagcaatggcagaatcttcctccgctcaaaccgtttcttgtactgcattgccacgccctgacaccatcaccctcgacatgtccatccatgcaggctatgccctctctacaaggggcatggcccgatttctcttacggattcacgactccccacgattcggcgagagaaccacggcaaaatctgcgcgacgaagaattggagtaaccgatccggtcagaggcgtcacaagtatggtgaaatgattactggataatgcggaggtgtgccatgagaatcagcgtatggtttgtgttgtcgaccgtgttccttttcgtatccccgagcttcgctcaagatgaagacttctacgatgagaccgtgctgaggaccctccatctggagttcgccgaacccgactggtggcgccagttggaggccaactatgacgcaaaggagaacattctcgccactttgactgtcgacgaggtcgtttgcgagagtgtcggcgtccgatttcgagggaatacgtcataccggatggccggagactcacaaaagaagtccttcaatatcgagatcgactatgccgttgaggatcagcgcctcatgggctacaagacgctcaatctgatcaactgctggggggacgccaccttcatgcgcgaggtgctgtactcgaacacggctcgcaggcaggtccccagcgccaaggccaacttcgtgcgtctcgagatcaacggcgagaactggggcgtttacgccaacgtccagcagctcaatgccgagttcattgaggactggttcgcgagtaacgaggggacacgctggcgcgcccaaggcacgatgggtggcggcgctcccggcccggacggaggaggccctcggcccgttcctcgggcggtcgatgagagtgatgatggattgcctctgtccgaagagggtggcgtcaccagtggcgtggcggcgctgacctggcagggcggcgattcagccacctacgaagcggcctacgagctcaagaataccaatcaggaagagccctgggcgagtctcattcacacgtgcgatgtcttgaacaatacgccgctggcgcaactgcccgacgcactagattctgtgctcgatgtggaccgagccctgtgggtttgcgcgttcgagatcatctttcaggatgacgacggctatgtcaacaagcggggcagtgactatggtctctactacgagcctgagaccggtcgattgcacctgatgcagtacgatggcaatgagtgcatgtctaatgagcggtggtccttgttctaccgggacgacgacccggtggtgcctttgatgcaccgcttgctggccatcgaccagtaccgacagcgctacctggcgcacgcccgcaccattctcgagtccttcctgacggaggaggcccttttcgcgaagatcgacgcctatcgcacgctcatagaggatgaagtgaagctcgacgacaagaagcggaattccagccaggccttcgaaagtggtgttgagggcttgaaggatttcgtgcagaggcggcgcgactatctgctgaccaaccgggcactcactcgatcggtccccgagatcgtaggcgtcgagcaggaggctgtcctgaatgatgacggcgagacgcttacggtgacggcgaccatcggcgactctgttgctgtttcagaggtgcgattgttcgtggcgtccggcccgtttgcccttttcgagtcggtccctatggtggatgacggcctaaacggtgacggacaagcttccgatggtgtttggggtgcgagtctctctggttatctatcgggttcgcaactgcgttactacgtacaggcgacctccgatgacggcaacggcaccgtgacattcaacccccccccgcgccgagcatgaggtctacacgcacgtcatgacctattccgatgccgcgttttcttcgatcgtcttcaacgaactcatggcgcggaacgatacgacgctggccgatccgcagggtgagtatgacgactggattgagttgaagaacatcggcgaccagaccgttgacctggccgggatgtacctcagcgacaacccggacaatccgctcaagtggcaattcccggaagggactctggtcgagccgggcgggtatctgctcgtctgggcggatgaggacgggagcgatgagccgggcctgcacgccaatttccgattggccggcgatggcgaaacagtctggttgttcgatacgatcgaacagggtcatgctctcctggattccgtgacatttgaggatctggatgaggatcaatgcagcgggcgttcccccgacggtgaggggcccatgcaggtgctgtctgtgccttcgcctctaggtcccaacccgatgccggtagcagcgggagacagtccgtagggccatcgacacccaactgcggcttggcgcattggatacgtcagaccgcagtattgcggattggggcggcgcgcgatatgatcctggtgtgacattcgtttggattgccaaccgggatcgttgaaggggtatgactgatgatgcgaatcaaggcgatcatcttaataggtttctgctgtgccgcggcgtcctgggccggcgaagtagcgaaccccgaccccaatcgattcgccaaggatatcaagactttcatggcgtgggacagcaagaatgctgtgcccgtcgattcgattctcttcgtcggcagttccagcattcgcatgtggaagacacgggagtcttttccggacctgcccgtgatcaatcgaggtttcggcggttcgcacatctccgacgtgatccatttttccgagcatatcgttctgccttatgcaccgaaactcatcgttttttacgccggcgacaacgacgtggcgggccgcaaatccgccagtcgcgtcctgtgcgactatcgtcgttttgtcgaattggtccacaccaaactgcctgacacctcgatcatcttcatcccgatcaaacccagtggaagtcgctggtcgctttgggcccagatgaagaaggccaacgatctcattgaggcattctcggggaaggactcacgcctgttttttgcggacctggcgacgccacttctcaacgctgagggcaaacccgacgacggtttcttcctgggcgacagacttcatctcaatgaccgggggtaccaagcctggaaccgcgcactgcggcctgcgatcgagaaggccctggacgcgcatgctgcacgcaaatccggacgttagacatctaccgagagccctgcagcccgccgctgaccgggcaattctctggacaaaggaaggcggatttgttacaatacaggtttgggtgtgagtgatgcttcttgtcttgtcctcgttgggatggggagccgcagttgaggtcgttcaaaacgccggaaacgccactcagggggcaaagaatcggcttcaaacgaggaaaatcggggaaaaagcgttacaaactgcatttcggatggcactaaccagagactgttaaacatccgatttccaggtaattttttcggaggaggttacgcatgtactgccgaccccatcatgtgtctgtactgatcgcactaatgtgtctatctgtaatcccggccaccgtgttcggtaggacgttagaggtggaaagcaccggcaaggtcggctacgccagtattcaggcggcagtggatgcggcggtcgacggcgacaccattgtcattcatccgggcacctatacaggctacggcaactgtgacatccgtctgcagcgtaaggccatcgatattcgcagcgccgacccggaagaccccagcgttgtcgagacgacgatcatcgattgccaggggaccgctggtgtatcccatcggggtttctacgtgactgattttgccggagagatttccggcctgaccattacgaacggactggcttccgtcggcggcgccatttactgtgagaacactacgctcgtgctgtcgttctgtcggatagtggacaacgctacgttgcccggtggggtcaaggtcggggtcgacggtggctccggcggcggtctttacggcgttgcttcggctatcgagatcatggactgtttgattagcggcaacgctaccggggccggggcagagtcccgagtgagcgccgggggtgacggtggtgacggcgccggcctgtacgcgcgggattcggtcgtatacgtatcggactccacgatggttgacaatatcaccggtgctgggggcagttccgatatttttgcgggaagcggtggcaccggcggcgccgttcgctgtgactcgctggtcttgacccatacgaccatcgccaacaacatcaccggcgccgggggcagcggtcccatcggaggccatggcggtctgggggcgggtctctattgcatgcgggctacgatcgaaaggagtgtcatccagggcaacaccgccggggccggtggagagagtacggacttcgccaagggcgccggcggtcagggtggttccggcggcggcgtgttctgtcaggattcgctggagatcgcggactcgctcgtggccggtaaccggtgtggtcgaggcggcactgccgcaacggccggcgccgacggtcggggtggaggaatctggtgcgcccttggtcgcattgaccattgcaccatcgccgagaatgcttctattcagcaaagggcgggcgtggccggccagggggcgggcgttttttgctcggccgatacggtgatcacaagctccatcctgtggggcaatatcccggaccagttggccggtcagaattgtgacaatgtgacctactgcaatattgaggggaacacctgcccggccagtggcggcgttctctctgacgatccgcttttcgtccagttcggtcaatgggccgattcgactggttccaaggcgaccgttgagcctggcgatcccacggcggtctggacggcgggtgactatcgtctttccgatgggtcaccctgtatcgacgcaggcgatcccgactatcgctacgatccgaatcgaatggacatcgacggtaatccccgcgcctccggagcggccgttgacatgggtgcttacgaggtccagagtctcgcgccggtgtatcgcttctggtcgccgaagacaggcagctacctttacaccgctgtcgaagccgaaaaggacaggatcatcgaagtgtattcggagtcatggaccttcgaaggtgttgcttattacgcctatctccgcgccacccaggcaggtctgatgcctgtctatcggttctggtcggacaagcttggcagtcatttttacaccatagatgaggccgagagagacaagatcctctcccagcaggctcatgcctggacgtatgaaggctcggtcttctacgcctatcccgtgggcggtcagccgcacggggccaaacctgtctatcggttctggtcggacaaggtgggcgcccatttctacacgattgatgaggctgaaaggcagtggttcatagacacgctggccgatgcctggacatacgagggggttgtttggtatgccttcgacgagccggggattggtgagacgccgggcctgccggacgagacgaccctctacgaattcagtgccgggcctgacgccgcctcgtacgggctcgtgctcaaagcctatctggatggccaggaggcccggatcgacaatccgaatctggagttcatccccgccagaagccagatgcagatggctgtcaacgccaaagccatgacggcggagctgacggaattccacatcgaaagtgagttcctgcagtacaccggcacggccaaccagattggcgggacgatcgcgattccgttctccctctacgtaagcgggttcttcgacacgacggcgccgagaggtccctacgccatcgatccgaagacgcagtccttccccacaggcctcgaaaccggcgctgtggctgccggggaggcctacgcggtcgtcggctcgggcgtcgtggagggcgagaagtttgatgtgaacctggtcctgagcccaacagatttcctgatggatggcgtggccacgtttgatggtctcaacggtaccgatcgcctggacgtgaacatggccggtcccttccagtggtatcgccagcagcaggaagatctcttgatggaaaccacgtttaagggacacgtgctgcaactttatgtcacctcggcccgaattcgaaccacgggtctctgggcaggaaagcgtgttcctgacgctgaaaagacagaaaaatagttctttgcgcgcgttgttacgctgcgataattctgggttcttggtagtttttctccgggccgcttgccagaggcaggcggcctggggtataatcagactgccgatgcgggcggggcaggaatgtcaactatatgatgcggacggctgctggtcgggaatgcagacctccgtgtgaggagaacgcagcatcatgacacgcacctctagggctttcactctaatcgaattgttggtggtcattgctattatcgccattctgatggccattctgatgccggcgttgcagcgcgtcaaagatcaggcgcgagaccaggcctgtcggggcaatctcaagagcgtgggcctgggcgtcatgatgtatttgcaggacttcaattttgtgatgcccgacatgcatacgcatacgggcaacacgaatggccatctctggtgggacaccgccggcaatccgttgcgggccggtgacaatcaggcctactggggtatcgcctactatccgtatatcgaggatcgggaggtcttcggctgcccagctttccgcacctttgccgagaccatcgccaaggaaatgctttacggaggcgaccccaagctgatttacacctccgccttcggcgccaacgggtggttgaccaaggagaatacgatccgcattaagcgtcattccgaggtcatcgtcgcgcacgaccacatggaaccgcggattgagaacggcgacagggacatgctcttcgccggtcccggtgggacgaacctgacgcactatcgccagagcgggggccgctccgactggtatcgaggcatcttccggcacaacatccgctccctcaatgatttcgagaccgccggcaccctgaatatcatctggctcgatggtcacgtcacttctctgcgtgagacgaccggcgaagacgtcctgcaacgctggtacgatcccctcaagaagaacttgtagtcggctttctctgagttgcgcgccaacgcgatcaaggcgtcccatcgatatctctattccacttcgggactgatctgattccccgccgtgagactgggttgcgcatttggcaggcgaggctctcgcttacgtggtctctatggctcaagaggaatccgccgcctaaccgaagcattcggtacgtgggggggggcttgatccacgtagcttgttgtggagatcaaccgaccgagttggtgcgtcgtcttaggatcagcaacgttgcgagtatcgctaacacccccaggagaagcccccagatcggggccagcccgagactgctggggatgtacgccatggtcaacgcgatcgctgcgatgagaaggctgtagggcagttgcgtccggacgtgctggacgagatcgcacgaactggcgatcgaactcatgatcgtcgtgtcggagatgggggagcagtggtcgccaaagatggcgccgtcgaggaccgcacccaggctgatcattgtcgtcagtccataggtctgtccgtcgatggcgtaggcgatggggatcgctgtgggcatgaggatcgccatggttccgtagctggttcccgtggcgaacgacgtcagcgaggcgaccaggaagaggatcggtgggaacatgtaaggctggacccggtcggccaggatggtcgccaggaattcgcccgttcctagcgtgtcgcagcagttcttgagcgaccaggccatgatgagaatcacgaacgggatcatcgcccgccggatgcctcgcttgaagcactggacgatcacgggccggctcagcgaaccgcacagttgcgagaagatcagcgccagggtcagcccgaacgaggaggcgcacgccagacagagtggtgtgtgcgtggcgtggccgatcacctcgcgccagtagatccaactgcccggcgagagggtctcgatatcgacgggcttggccggcatctcctccagggcggtcgtctggctcagcgtctgccattgctgcatgtcatctttcagggtggcggtcccatcgaaccagagccctgtgaagtgaaagagcactaggcccgccagtggaaccagtgctttgaaggcccggtccgagcgattggccgatggggtcggtcctacctcttgtgacgccgcatccttgtcgccaggctcattcgccagcgctgtcttctgagcggtcttcatgggcccgaagtcacagtccaggaggatgtgcaggaaaacgaacgcgatcatcagcaggcagtagaagcggaagctcagggcgtcgaagaacatggcgtatccgctcttaccgatgccgagcgtgccgccgatttgcccgagaagaccgacctcgaaagcgatccacgtgctgacgacggccagtcccgcgatgggcgcgctggtggcatcgacgagaaacgccagtttctctcggctgatgcgaaaccggtcggtgatcggctgcatcatcgacccgacgacgatggcgttggtgtagtcgtcgatgaagcacaggatgcccatcagtgcggtggccgcttgagcggacttgcgccccttgatccacctcaggagccagacgatgatccctcgaaacccgcccgaggcgataagtatctcgatcatcacaaagatcggtgggatgaacgcgagaatctggaggtaggtgacgtctgtgaccgtggccgtgacgtgggtggccgatgtcttgaagccctcgaaccaggctccggcgctcaatggagtcggcggaacgtggctgagcaggccgcctgtgaggatggcgattcctagactgggcaggacgcgacgcgtcagaaaggccagtacgatggctagcaggggggggatcacgctgtaccagactgccccagtctcggtttcctcggcccgcccgaaccaggcggccagggcgcatactccggcgaagacagtcgcggctgctgcaattttggtgtatcggcttgctttcaatggactcccggcactgatgggtcgatttgcagccgtcggtacgaatcggcgcccggcggcgtgactgtcaccagcattttcccgaaaaaggcccacaaatcaagtccaaatgtgttagttcgacgcgaagggtcttctgattggacggcgcggctaagctggcccccgcgcgccaccgttccgatcgcgacccgtggcgtgggtcctatatcctcggcgatggtggtccacactggctggttgtgtgcgtcgtggcggggcgccgaacgttgcgggcgatgtcggaaaggccagcctcgacaggggctatggggccggtcactggcggacttgcaggtaaaatctgcgttatcagtactagtatctgggttttgtgcttgcatgttcccgccgtcattcataaattgaatagtgatagcgaggtggaacgcctgggtctgggtggcggagcacacggtggtttgaggttgtaggagtgcaaggaatgaaggtggtcttgttcgtagtgctcgcgttcacgcttcttctgggtggttgccattccacaaatcgcaagggcctaatccaggccggatacgctcctgagtacgttgacggctatgtggatggctattcggcgggatgccacacaattggccatcccttctatcgcttcgaaagaaacacctctcgatacgaagaagaccatcagtacaagaggggatgggaagacggtttcacgattgcacgctgtgattacgccgccgtgtggtaggagaggggccggctcaaggggttattcatttcattgagtgttcagcgctgtcgcagatgttctccagattgcccatagacgccgccgcagacgggtggcgcaggttttttcgtccacttatgtttgtcaaagcgacgcgcgttcggagcgtgcgcgggccaagcgcggccttcccgggagaggctgctgccgcgccaacgtgttggtcaggcggcaatgggcgctcgcccgctgtgagattctgcggtttgtaggttcctggtaggccgtctacaggagcaccacctggtcttcctcttcaatgggttcttgcactggttggccttgaggtttgacggagacttggattccttccgggctctcgcaggcatcgagaggcgaccagcgactcttggccttcttgacgatctcgatcagtcggccaatcacggtatccggcgtgtcgtcaaacgggtcgacgacgaggcccttcagttcttcgaacaactcatcagatactttgaccgttctcatggtcttcctcccatcaacggggcgattcgttcctggtgtcgcacgccggaggcgtacgcatttgtgctacctaaacaatagaaacaaaccgacccgttgcccaactcgctaggatcccctcgtggagaaatgagtcttttgcgtcgatccccagggggaatctctgcacgtgaggattcagtattgtggtaactacgtatttttgccttttccccaagatgtgaaggatttgttcttaacctccgtccaattccatcgagaacaagcatggcaaagcaacggtccttttccggggcctggctggacgatcgagatgcgctgagacgcgtcgttatacgtcatcggtctggatgagaaagccggctcgatggcgaattggtgcgccttgagcatcttcgcagcggtgcgtggccccggagtgatctcgacggcgttgtgaatctgtatctgtcagggaggctcgatgaagccgaatggaatccaggatacagcggagaagacaaggtatcgcatcgaggtcgccagctcgaaggatctcggggagcttgtcaggatgcaaatggccctgcaagagagtatggctggggtcgggacgaatatgctgcatctgaatcgcgatagtgttgttcgactctatgactattatcaacagcagatcggcgacgaccaggcgcggttgctggttgcctgcgacagtccgtccgagcagatcgtggccatgggatcgggccggatctggcggcatgcagactatgtcccggctcgctccggcgagttgatcgatctttgggtcgagccggatcacaggcgacggggattggcgggacgcatcgtcagcagtctcctcaagtttttcagggctaaccgggtcgagtttctggccgtcaactacgtgcggagcaatccgggggccgaggcgttgtggaagaagcttggttttcgccctatgctcatcacagcaacagccgatcgtcgtacggccgaagcggtgatgggcgcggagtcccggcgcattgtctccgttgcccgcggggcgacggtgggcgagcaaccggcttacgccggcatgagtctgtcgggatgacccggcccgtgtggaccggaccatccgcaagagcgatgcgctgccctctggctaagcgtagggcaagttgagaatcgaattaaccaggatcaccaccacggcggccgcgatggtcagccggccgctggcatgcttggaccgggtccaggagagcaatcccagagtcaaggccaccaggcccaatatattagcgacggccaggaatatcgcgatatcaccgataacgtccggttgggcctgcgcggcgaccaggcgaacgcggttagctccctggctgatgagtccccacggtacggcgccttcggctacctcgttttcctggttggcgttgttgtagttgcacgcactgcctgttgccagaagcgcctgcccgctgatgaaaacccaggcgagcacaaccagcacgagacttctcgtttgtcggttcttcttgcttctatgtgatagagacatctcgtcccccccttagtcgtcatggacggctatgtgaattcagatgtgttctcggttcggttcgtcatcgccatctgtccagacatacttcaactgtgcccatgtaaactatgcgaactgtgaaacgtttgggcaagtggacgtcccattcgatggcctcgcgcgatgtgtatcggtgtcgttaccgggccttgcggccggtctatttgcgcgcgaaccggattcccggggcgatggcgggtttatgagggttgtgaaggcgtcgtggccgacacctggggattgttgtccgagaattgccccagatgcgaggcccagtcagccatttgggcaacctggggcatgccattcaggaaagtctgcaggttttccatgtcctgcatgatatatcggacgatgtcccgaagttggccggtcatggcgatctgctcggtctgtagccgcgccagttcggcgcggaccgcgaccgcgatgtccgtttgcgtgacgattccgctaacctcgttgtcgaccatgacggtaagccggtgaaggtgcatctggtccatcttgatgcccgcactgaggaccgagcagtccagcggaatcgagatcatggggaatgacattatatcgacgacctgcgtttgggcgggatcccgacggagggccacaacgcggcggagcacgtccttctcggtgacaatgccggctgcgcctttgtggtgggtcgcaaccagacacgaaacacctcgagacgtcatgatctgagccgcttcggccaccgacgcgccggtattgaccgtgacgacgtcggtgctcataatctgggatacggctttgaggggactgatggagatcagacctctggtgatatccgtctgtgtggcgatgcccacgagtcgaccggcgtctacgaccggcagacgcttgatgcctttgacttccatggttttgccggccgctatcaccggcgtgtcgggtgagacgacctctacaggactcgacatccgatcgcccacgcacaggcggtgaaattctacattggaaccggcgacccctttgagtacatccttgtcggtgagaatgccgatcaccatctcatcgtcaaccacaatgacacaggagatactgttatccgacatcttcttgacggcggaaaagacagtgtcatcagaggttacggtgatcatctcgcaattcatgatgtcgcgcatccgcaggtcccgacgaccctcttggcgggggcgacaagagagctgctccgattctgcgatcagtggagggatctgtgtgatgtatgccatcggtgtattcctctaacaagcctgtgtttttcagcacgcgcctcgtttgcgtttgaccaaggtgatcaccaggtgctcaagcaatactatcggtgtttgcaggctgaggcttagccgaaagctgccctgattgggcatcttacgccacaaaatacgtatttccccttagtcgtgccgtcggacaaggatttccgtttttgcccggattctatttgacagatcttgcttgattttgtacactagccaacaaacttctgccggtgtcgatcttgagtagtcaaccatcaacgatccgctgaaacggggagttggtcatgatcagggaacctgccgccttcctcggcgagagacccagcgtcgggagtactgtcgccctcagcttgggcgattatgcgaaacaaagccaattctcagtggtctatatgaaggctaaagtatgttgcgaaaatgggttacatggattatgcttgaagccggcgccggaaaacaaacccaatttccagggcaaacgtaacgtctttcaatgagatttcgatagtgaaagaggatcgaggggcagggcgtgagtgatttcgaaaaggccaaagaccttctataccggttcaggggggattcgtatctgtgtgggaccgatgtcctgtctcgggtcggggccatggtcggtcgtgtgggccatcgggcggcgctggttcgcgggacgtttcgtcggagtgatgactatgtccgcatgatatgcgagtcgctgacccgggccggggtgtgtctctgtggggaaatcaagggggctcggaccaatgcgccgagagaggacatgactcggatcgcgcaggaattgcacaaggcggcgcccgatgtcatcgtcagtttcggcgggggaagcaccatcgacgccacgaaggcggccaacgtactcggcgtcctcggtggcggcatcgacgattacttcggtctggggcgggtcaccgaagggcttcgccaggcggatcgggtcctggcctcacacgttgccatccaaaccttggccggctctgcggcccatctgacgaagtacgcgaacatcaccgacctggcgagcagtcagaagaagttgatcgtcgacgaagccatcgttcccaatcaggcggtgttcgaccatggagtcaccagcgatgtgccggcggacctgaccgccgatggagcgctcgatggcgtctcccatatactggaagtgctctacggcgccgtgggcaagccttgttatgagacggtggccgagattgcccaggtggggctgggcttgattctcgaacatttaccgcgcgcgatgtcggaaccctgcgatatccaggctcgagaggccctgtctctggctacggatctgggtggatacgcgatcatgatcggcggaacgaacgggggacacctgacgagcttttcgcttgtcgacattctgtcgcacgggcgtgcgtgtgccgtgatgaatccgtactacacggtcctctttgctccggcgatcgagaagccgcttcgattggtcggcggcctctatcgacgagcgggtctgacggacactgacttcgagaccttgcagggcagagaccttgggattgccgttgccgaggtgatgctggctttcgcccgcgagattgggtttcccacgcgactggccgatatcgacggttttgctccctcgcacatcgaacgggccctgacggcggccaaagacccgcagttggccatgaagctgcagagcatgccaatccctctgacgaccgagatggtggatgactacatgggcgccgtactggaggccgcccgggtgggcaagctggagatagtcaggaatgtgccggggaaaggtgagtgccgatgaagattgtggtcgccatggattcgttcaagggaacgctcactgcagcgagggcctgtgctattgtcgccgaggcgatcgcgtcggaaatgcccgaagcgcagattgctgtcaggccgatggccgacggcggggagggaaccgctgccgctttgatggcggccgccgacggacgctggatcgagaagaaggtgatggggccgttgccgcaaatgcaggttgatgcgggttttgtctggttgccgagcgaccggaccgccgtggtggaaatggcctcggccagtggcctccagctgctcgacgacgagcagcggaatcccttgaacacgactacttatggcgctggtgaacttgtcgatgctgcggcgcggtatggagcccggcggactttgcttgcggttggaggcagtgctacagtcgatggcggcgtcggggccgcgatggccttgggctggcgtttcctggcgaacgaggggcggataatcccgctcggcggcggtcacctcgggcaaatcaccgagattgacccgccgcaggggggcatggatgttcctgtggaggtgctttgcgacgtggataatcccctgtgtggcccgcatggggccgctcttgtatacggtccccaaaagggcgctacgcccgaaatggttgagacccttgatgccgctctggctcatctggccggactagtcagagattggctcgggatggatgtcagggagctccccggggcgggtgccgccgggggactggcggccggcgccgtagcgttcatgggggcgcgtctcgtttcgggggttgaggttgtcatggatcgggtggagcttcgtcaagctgttgcggatgccgactgggtcattacgggcgagggctgcttcgatcgccagtctctgcgaggaaaggtggtctccggggtcgcgcgagtttctggccaggccggcgccaaggtggcggtccttgcaggtcgcgtgctcctgccgcttccggcacagagaacgctcggaatcgaggcttcggttgcctgcatggagggcgctatgacgctccaacatgccctggcgcacagcgaggaacttctcggtcaggcggcctgtcggttcgcacgcatgcatctggcccgttgaatggacagatccgatgggagtctgcggtcgaggatgtgtccgggtttcggtcagaatcttcttggcttctggcccgttttgatgtaaaatggggaaaccgtggaatatagtgtattcagcaactatcgtgctctcaggagaggggtactggatgagtaaatatctgttttatgggacatttctggtcgtcgcggtcaatctctgtatggcggcgccggagccggccattgtccaggggcctgggcattggaccgtcgaggtcaaattcgagcaaccgcagcaactcgtgctgccatggggcggcaacggtgcgacgcggtattggtacacgattctcagcgtgaccaaccggacgaatcaggatgtcgatttctacccgcgatgcgagttgatgaccaacacgttccaaatcgtcccggccggaagaaacgtgcccccggtggtgttcgagcggatcaagcagcgccatcagagccggtatccgcttctcgaaacgctggagcgtgcgaataatcgcatcctccagggtgaggacaatgccaaggatatcgcggtcatctggcgcgacttcgacatacgggccacaggcttcaaggtgttcattaccggtctgagtaacgagaccgcggtggtgaaccacccgatagcagtggacagtgctgggacgccggtcaaggtgttcttgcggaagaccctggaattggactacgccttcaggggcgatcctaccttgagggactcggtcgaggttgtctacaaggacaaggcctgggtcatgcggtagtgagtcggttagcgtccggcgttggagttgtgacaccggcaggggggcgcaacgcgtcttgctatcgcttccccagcgtgcgtagccgctgaatcagttgcggcagtgcatcgtaacgattcagacggattcccaaggcgccgcccccggagtggagttccacgaactctggaaccggggcaaggccaaaacgccggtagaacgcgcgcttcaagaattccttcacctcgcctgcgctagccttgtgcgtgtccacgtgtacctggaaatagtccccttgtcccgctgcattcacacgcacggccactgtctccgggccgaacgctcgcttgagcatcgcttcggccaggtcgatcaaggccagtccccgaaagaaattggagccttccagatgacggaactccggcggattctccgccgagagcgactcgtcgcccaaaccccggttgtagtccaccggcatagcgccatgtcgctccagccagcgctccagcaagttcggccctgcgtgacctcgttcccagtcaagttcgccttccatctccacgcgggatggcaggcgctccggagcgatatcaacgcatcgatcgccacgctgcgaccaggtgatgtactcaatccaccggtcgggatgatggatcaaatagaagcacttggccacttcaccaaaaaggtacgccagcatggcccgcaaggggactcctttctcctgcacgatggcccccgatcttgtagcacgccgcaggattgggtctcgccaccccgtcaatagtgacgccagcgtagcatccgcctgctggcgggccgcagaccggccgagtcgattgacatccatgagttcctggacgtaccagtggcgattggcgtcaatgcgctgctgcaactcgtcctgcttgaccaagagcggtatgcgacgcagaagtgaacagatcgagccgcgattctcttgggacagcaaaccatcagccaccaaatcatcttcgacctgcttgaagaaatcgctactgagcggtgactgagtgaggatagcggcaatttcggcggccttccccgtcatctttcgcatttcactggtcgtcagagggccggcgccggcagtctcagcatagctgccccacgaccaacgccatgcggatcggtcgcgttcgacactgtacgggaagacaatctgaaaccggtcggtgggaacaggataggtcccgatgatgcgatagttgtccttcggattggacgagatcagcgtcccgcgtccggcccgtcccttttgttcggtggcctggtccaacgacccggctcgcacgcccgtgccgtactccgcctggcaggccaggtgcaccagcaggtccggcgggatgtcgatctcgaacagggcgttgatcgcgtttttcgtcgccaccgtcacggctgaggaactggagaaacccccctgggggatgtcacccgtggagaccagccgcaggcccatgaagttgtcgcggccgagatgcgcctggactttcgctcccaggttgccgccgcgcagcgtgcgcatggaagcgatggcgttgccgactaatgagaatggacgtcgcatgttgctgctgacccacagcgacggcggcggcaacggcagccccttcccgcgtcgctgctcgagttcatcatcgctgaagtaccccagcgagagcaggagcgtctcgctcatgtgggtgccaaactcctcgtatgcgtgcaagtcggagacgtcttcgcccggatacatgacaggactgtcggagggaatggaattgacgttctcgcgatacttcaggtttgttgggtgtaagtggatccggccatcgcttgtgccctgggcgagcatgacgatctgctcactgcccgattcatcgccggcgccgatgggcatctgccaggcgggcccgaagaatcggaccatatccgggtgcataaaggcaatgcgcagacgccctcccgagatgccgattcccagcggttggtcgcccttgaacttaagcccttcccgctcggccatcgcgacgagttcggccagttgacgggcgatcgaagcgatctgtccctggggacggtcggcggcaatcgcctgcgcggcctcgtctgtttcctgctcctcgggaaacggcaagcagccggtcgtcgccagaatcccctccaggagggccaggtctctgggctgtgtcacgtccgagcacagcaggtcatactcagggtcggtgggcgtcgttgtcattgtgcggatatccccaccgtcccggctgatggcttcaatgatgtcggtcaggtagtactgggcctgggcgttggcgttgctgagatcctgcaggtatcgcatcagggtggcggcgcggacgacatacagggggcagttcccctccgttagatccagaagacgttgacgcgccgaagcatcctgttcggcgacaatgtccttttcttcgataatgcgagtgacttgccggtctttgtccctcagtatgcggcctttgcctcgattcctcggcggttcgtatcgcgcggtcaggagcgtgagatcagcctcacgcggtccgctgcgatgacgctcgcagaggcggcgaaacacagaggagggcaccacccgatcgcccatcgtgatgacgagcagggggtccttctccaggagcgttggaatgctgaacgcctcgaacgcggcgaaggcggttcctcccgtggggttgtctgagcgaatgtaggtgttgtcatttcccagtgctgtcgagacttcctcgtggcgatagccgacgatgccgatcacgggtgaccggctgaaacggcggaacgcctcaatcgaatgacgggccagtggcgttccgtgtaccggctggatacacttcggggcctggccgaaccgcgtgcctttgccggcggcaagaatcaccaggacaggcgtctccgtcgtgataccatcgaaggaattgagactctccggattgaggatctttgcctcgtcaagcggggtcgcctctctgaggggacgactcgcctctgatccctgtgtctctccattgctcatgtgtcccatccaaactgtctcaacctacttctgcgaaaaccctgccgcatggcgtgtgccgcgagtttatcagacaacccattccctagcaaccctccttgacctggcgaaaggaatgcgcgggctgcgattttttatctccgattcgcatttttaggtttaattctcacggcgatcatgtggtatctcagagaggatggtcaaattaaccttcccggccccagatcgcgtgatcggcgcgtcggggcagggcccttctctgggaacgaggttctggcggaacgatgggaatagacgaccagaaagagaatcggctggatggatcgctgaatccggagccgttcctgcgccagttgaccgctggtcagaatcgcatctacgctttcatcctgacacgcgtcgccaattttgccgacgccgacgacatcatgcaggagacggtggccgtgatgtggcgaaaatacgcccaattcgagcccggcacggatttcgtttcctggggtgtgcggatcgcgcattatgagatcctgagattccaccgaggccgtcgcggattccagtttcgccaggaagtggatgaagcgctcttcgagctggcgatctccaagggccaggagatcgatcgtcggatcgaggcgctgcgcggctgtctgtcgaaattggaccgccgcgaacgtgagatcatcaggatgcgctacgaacagaacttggcgtgcaagaacctggccgagcggatgcgcgtctcggcccagaccatcagcaagacgctcggacggattcatgatgcgttgctccgttgcatccgagggacgctagcagcagaggagattgactgatgtcagacgaggcgaagcccggtgatacgtcgcaactgagcgaattgatcacggccatgctggatggcgccatcacgcaggagcagttcgaccaactggatgaattgctggctggtgatgaagggacgctggagtactacgccgagtttttgaccctttgtgccgtactacgcaaatactacggcgccgaactgccggcttccgaccgaggacctcgcggtttcgatcagacggtcgttctatccgaggttatcgagcaggatctgcagacgcaggcggaaatcgaagctgacgtggcaggaatggagaggcaagcacgtcgcgaggttgtgcgaagggcggccgaagaagccctggagcggttcatggccgaggagcgtcgacgtcaggaagaacttgcccataaactatatctggcccggcgccgtcgactgctcgtgggaatgggatcgctggccgccttgctggtcgtggtcttgtgcgtctggctgtttgagccccgtcccgaaccaccggcggctgtaacgccgacgatggcagcggcgccccctgtggtcgccagggtcaccgactcgctagacgctcaatggcggccgcggggcatgtccaccgagcccgggaccgaactgatcgccggacccttgtccctgcgccgcggtcttgtgcgcattaccttcaactgcggggccgatgtgatactcgaggccccggcggaaattgaaatagaagcggtcgatcaaatgctgttgtggcgcggtcgtgtggctgccaaagccggcaaagaggccatcggtttcaccgttcgcacgcccggcgcgacggtggtggactacgggaccgagttcggtgtttccgtcagcgggtccggccaaacagaagcccacgtcttcaaaggccaggtggaggttcgctccgggcccagtgtgcgcgtcttcgacgaatcgcgtcgggtgactgcccagcaagcttgtgccgtcgatcgagagggcaagctgtcgcagacgaatctggccgcacggcctgagttgtttcaacggcatgtgccctcaccgtacgaactggccgtgtgggatacgcgcccggcggcctactggcggttcgatgccgatgatcccaatcagtttgtcaatgtcctggaccaacgcaccaacctgggccacctcgtgggccccgtccagttctccatgggccccgacctgggagcggacaagcaggcgcaggctctcgaacttgacggatacagtggtcgcgccgttgttgcgaacatgactcctccgagcggcactcaaacaacgggatacacttacgtcatgtgggtgcgccccgatgagattcgggaccagttcatccttgccgccgtgaacaaggccggcgcgcagcgcgtggtggcgatgacagccgacgggcgattcgaccattattatgttagcggaaagggcaaacccgtcgcgcgtgtccagagtcaaaccatcgcgcgtcgtggtctatggtatcatgtggcgatcctgcgcacgggccacggcgaccggcgactgtttgtcaatggcgtcctggacgccagcgcagaggcctcagttcatggcacccctggattcctccgtaaattctgcctcggggcgatggacgaggagaagcacatggcgggattggccccctggcggggcgggctcagcgagatggcgatctactgcagggccctcagcgaacgggagattgccgatctgtacatgtcatcacaggaaaggtgaggagcagtgagaaggtcggttgcggccatgttcatggagaagtcacattcttgaggttcagaacgatgaccaggaagttgggcggcagaggtttcacgttgatcgaactattggtggtgatcgctatcattgcggtgttgatggcgatcctgatgccctcgctgcaaaaagccaggcaccaggcacagcgggcgacttgcgcggcccacttgaagtcgtgcggctacgccggcgtgctatacgccaatgataacgagggccgcttccctgggtgtcacatggagttgtctccaggttccggcagttacgccgtttggatcagcggtcgtcaggacgacccccagaccaagggctatatggcgcacggcttgttcttccaccatcgactgatgatggatcccaagctgttctactgtccgggcaacaacaaccccacactcaaatatggacaggccgacctctcctcaccaggaggcgggtggcccaagggggatatccccgatgatctcggtcccaaccaggcgtgggtccagacgacctatcactaccgatccctctgggatggaaagaagtggcgggcggtcaatgtcgtgcgagacagcgggggactggccttcatggccgatatgttctccgatcccactcggggtctcgagtaccaccataagaacggatacaacgtggcctttacggatggtcacagcgagtttgtgaaggatctggacggccagatacaggactttggcggtggcacgacgtaccacgtggaccacagtcgtcaggattatgtctggaagagatacttcgacaagatcaccaggtacaagccgcacaaggagtactgactctccgtggcggttccctttcgacgtggttttgcgttgagggataatgacccagatagacgaaggaaaatggtaggagagcgttaatgaaccgacggatgttcctgaagaactgttttgccgccaccggtgcggccctcacggccggcacggcactgaaagccgctgaaactcatcccgggcggcaacggcccaatgtcgtctttatcatggctgatgacatgggctatggcgatccggcctgtctcaatcccgactccaaaatcccgacgccgcacatggaccgcctggcgcaggaggggatgatcttcaccgacgcccacagtggttcggccgtgtgcacgcccactcgatacggggtcctgacgggtcgctactgctggcgcagccgccttaagaagggagtactcaacggctacagtcgggcgctgattgagccgggacgcacgaccgtggcttccttgctcaagacgaatgggtaccgaaccggttgtgtcggtaaatggcatctgggactgaccgatacgcagccggccgactacagcaagcccctgcgcccggggccaaacgaagtcggcttcgactactggttcggcatccccgcgtcgctggacatgacgccttacgtctatctggagaatggattgcccacgcgtcctcccacggagacggtcgctggttctccttatccggccttttggcgcggcggtccgatcgccgacgacttcaagcacgaggacgtcatgccccggattaccgagcaggcggttggattcatcgaccactgttgccaggaccattcggacaagccgttcttcctgtattttccgctgacggcgccgcatacgccctgggtgccgctggagcgaaaccaccagcagagccaggccggcgtttatggcgatttcgtgaccctggtggattggacggtcgggcagatccttgagacgctggacgcccatggcattgccgacaatacactggtgattctgaccagcgacaacggctcgcacgaggcccagatcggcaagcataacaatggtgtttcggtcggctcgcccaattttggccatgaggccaactacatctatcgaggccagaaggcggatgtctgggacggcggccatcgcgtgccgttcctggcgcggtggccggagatggtgacgcccggtggccggtgcgatatgccgatctgcctgaccgacttggtggcgacgtgtgcggagatcgtggaccagaccctgcctccagagaccggagaggatagtgttagctttctcccctatctcaagggcgggcgccccgctcggcccacgcgtgaagcgatcgtacaccattcgatcagtggcgtcttcgctctgcgtaagggcaagtggaaattcatcgacggggtgggatcgggcggttggtcgggcaagggtgatggcctgccgggccagctctatgacatgcaggcggacccgcaggagcggaacaacctgtacagcgatcccggacatcaaaccattgtctacaatctcagggcgctcctgacgcgctacaaagaacagggacacagtcgtcccgtgacttaggatggagacaaagaatgcatcgacgtgagtttctaaggcggtgtgcatgggtgggcggcgccgcgagcgtgtttccggtggtcaacgcgactcgggcggcccgtacgcctgcatctgacggcggcatgagacgaccgaatatcgtcttcatactggccgatgatatggggtatggcgatctggcctgtcagaaccccgagtcaaagatccctacgcccaacctcgaccgcctggcgcgcgaaggcgtgcgtttcaccgacgcccattcaccgtcggcggtgtgttcgccgacacgctacggcgtcttgaccgggcgttacgcgtggcggacccggctcaagagaggtgtgctctggtgctgggacaggcccctgatcgaacccgatcgactgactgttggcaagctactcaagacgcacggctacgatacggcgtgcatcggtaagtggcatctcggttggaactggcccactacggatggtaaggaccccgtcggtatgggcaagagcgcacccaacggcggcaccaacgtggacttcacgcaaccgatcacggacggcccgacgaccagaggattcgattactacttcggaacggatgtgccgaactttccgccgtattgtttcattgagaacgatcgcaccgtggggataccgactgtgcccaagccgggaaagatgtttggcgcgccggggccaatgcttgaaggttggaaactggaggagatcttgcccggactggggggcaaggccgtcgagtacatcgatgccaaaggccggttgacgcgcaacgaggcatttggccagaccgaaggcaatcctttcttcctgtacatgcccctgacggcgccccatacgcctatcgcccccgacccggcgtctcagggcaagagccaggccggggcctatggtgactttgtttatgaagtcgatcgggtcgttggccaggtgctcgaggctctggagcggaacggcttcgccagcgagacgctggttgtcttcaccagtgacaatggctcgccgggtcgcgacgggacgaatatgagcggggcggtcaacgccgtgcgtaagtttggacacaatcccagccacatctatcgcggcatcaaggccgacgcttgggagggggggcatcgcgttccgtttctggcccgttggccgggacatacgaaaccgggttctgtctgcgatgagaccgtctgccatgtggacctgatcgctacgtgcgccgagatcctcggatcggatcttcctgagaatgcggccgaggacagcttcagcttcttgcctcttcttctggatgagccctccagcgggccggcgcgagaggcggttgttcatcactccggcaatggtgtgttcgccatccgtcaaggcaagtggaaattcatcgatggggtgggatcgggcggttggtcgggcaaaggcgacggcctgccgggccagctctatgacatggaggccgatccgaccgaaaaaaacaatctttataaggatcgcaggtatcaaaacgttgtcaacggcctcagggatctcctggaacaatacaagcgccaggggcatagcagatcaatgacgtagtctctgcaaattgaacgattttcggcgtgtgccgagacatagatactactttgtagtgtggaggaatgagccatgtataagaaagcactgtgttggctttttagcctgagcctcttcttggtgatgagtaacacgggctcggcgcaaatcctgatcagcgacaattttgacggaggcggcctgggcgccggtgacggttcatcggtcaacggtggatttacgctgacggccaatagcatttcggccgccagtgccaccgcagaggcggattcctatgccgaagtcgtgaccacgggcggtgcgaatgggaatgccggcatttgcagtaacaccagcttcgattcgctcagtgccgcggccatgagcaagggattgaccgttgaatgggtcgtgaccagtctgtcgcaaacgaccaatgccaacggcaacacgtttacccttcagcgtgacaatgtgttcttcaatacactgccctatgtcggtgtgatgttttccggcaaggccggcaccattcccgatggcgtgagattcgtgggcaagaacaacaccaccgggggtccaacccacaatctctcggaactgtacaattatgatcaggcgtctttcctggacggttttacagtgagattcacgatcaatgaaaccggatgggcgtttcaggtggaagggttggatattgatgttgcggaagaggggagttggcctgctgatttcgctctcactgatgttctcgatggcgattcgtttgtatcagcgcatgcccagactccaggcgccgatctcacggctcgttacgacagttgcgaggtatggattggcaagaaggatgcgtcaagggcgaacaccccgcaaccggaaaaccagactgaggacgtgttgcgtgacgccgttttggcttggaacgccggcgagtttgccgcggcgcacgatgtgtacgtgggtgtctcgttcgatgatgtcaatgacgccgaccgggccaatccgctgggcgtgttggtcagtcaggggcaggtggatgcggcatacgatctgccgggtctcgaatttggtcagacctactactggcgagtcgatgaggtcaacgccgccccggacaatacgattttcaagggcgacctctggagcttcacgaccgagttgttcgcctatccgatcgagaacgtgaccgcgacgagcaacggtgtgtccgaagaaggcgtaggaccggagaataccgtcgacggctcggggctcgacgccgacgatcagcactcggtcgagagcgccgatatgtggacggcaaccctgggagatgagccgctgacgattcagttcgagttcgaccgcgtccataagctccatcagatgctcgtctggaactacaacgtctcgttcgagccgctgctcggcttcggcgtcaaggatgtgaccatcgagtattcgaccgacggcatcgactggacggtcctgggcgacgtcgtgctggcgcaggcgacggctttcgacacctatacggccaacaccacgatcgatttccccggtgcggcggtcaaggtcgtaaaactgacggtcaacaacgcctacggcgactcgggcaagttcgggctcagcgaagtccgcttcctgtccatccccgtccaggccgccgagccccagccggccgacggcgccgccgatgtcacggtttcggatgtgaacctgagttggaaggctggtcgtgaggcaactgggcacgacgtgtatctcagcaccgatcccaacgccttgacgctgatcgattcggtcagtgacaacaccgtcgatcccggcgccctcgatctggggaccgcctactactggaagatcgatgaggtcaacgaggccgaggaggtcagcacttgggaaggcgacatctggagcttcaccacgcaggcgctcatcgtcgtcgaggacttcgagagctacaccgacgacatcgaggcgagcgaagccatcttcctgacctgggtcgacggctacgaaatggccggcaacaattcgcaggtcgggtatcttgaggcgcccttcgctgaggacacgatcgtccatggcggcggtcagtccatgcccctgatctacgacaacaccgacggcgggatatcggagaccactctcacgttcgatgtcccgcaggactggtcggccaacgccatccaaaccctctccctgttcgtgtatggtgacggggccaacagcggtggccagctctacctgaagatcaacaacgccaaggtctcgtatgcgtatctggccgatgtgctccagcggcagcagtgggtctcatggacaattgacctggcttcgaccggcgccaatctgtccagcgtgacgagtgtgacactgggtatcgacggagccggtgcttccggcatgatcttcgtggacgatatgtgtctctacccccaggctgtggaactgatcgagcccgtgctgcctcccgagaacgatccgaacctggtggcccactatgagttcgagagcaacgccaatgacagtcgaggaaattatcacggtgcggccgaaggcacgccagcctatgcaacgggtaaggtcggtcaggccatcagtcttgacaaggacgacgatcacatcgtcaatgattttgatgatgttgtttggcctgctttcagcgtctcgttgtgggtgaagacggatgtcactaaccaggtcaattactccggtttgttcaacaacaacagcgccggcgccgacttccagcttgatgtcgatggaaccgacccggggaactacaaataccagggcggcaacagccgggtcttgggtccggtgattaatgactgggtccatttggcagtcagttgtgatggtgccgggacgagcctctactataacggtctgatcgtggcgaccgtcaatgcagtggataatgtattcggccagatcgccattggcattaatcgtggcatgagtactcggtttggcggaatgatcgacgaggtgcgtctctacaaccgcgcgatctccgaggccgaagttctcggattggctggtgtcacagagtcggtcccgaaatcgctctgacagtgaggctattatggcgtccggccatcaaggcgtacgctgttatgtgaaagtactcgaatcggagagggctgtgggcatcgctcgcagtcctcttcggcagtttagactctttctggcaatcgctgtcaccggggttcactgacggtgaggccaatacgcccgtagggtgcataaactcatcggggcgtaacgtgagtcatttcagatcgttagcttcgaaatcacgatgaaagatgaggtggtagggcgagggatcgtggggcgtcggtccctgaaatccgttcagattccgcgtattggatgtggagatcacagacggcgcgcactacctccaggagcgtggcacactatggcggtgtcatgctgcttggcgatggtaggatttcagcagtccacccagacgctcaatgcaaatgaggtgacctcggtttccttcatgcttcgggtcgatgatccggttgataccctggtggatcctctcagggtggtagtgctcaagatattcggagaggacatgattaagctgctgttcagatgagagaatgagcttattgaggcactcctctttgatggatctgacgaagcgctccgcgaaggcattgagattggggctgcgtggtggtagtttcactgattccagaccggcgtctcgtaagattctcctgaacttcgcggtatacagtggatcgcgatcatgaatcaggtatgcgttacctgccagaaagttgtcttcccacgtgagattgcgagcaatctgctccatccatgatgccagcgtcaaaagtcccgaactgcgaggaagaccggcgtttttgcgccacaatcggggctggaactgccaaattccgacttttgacgcaggcgtcatccatagaccgttgggtttgggtctgacgccaaggatggccactttgcgtgtggacaaatccatggcaaatagcaccatgcagcggatgagcttgcccttgactagcagctcaaccgagaagaagtcacatgcggccaaaacgctccagtggctcctgatgaatttcttccaggttgtcttccgggtgaagtctggctcagggtcgtagccattcgcaaggaggatatttttgacggtggtctctccgatcttgtatccgaggtagacgatgtagtccttgattctggtgtagccccaatgcggattctcctgcctgaatcgtagcaccagttcgacgatctcctgagacatcctcggcggccctggattcttgcagttcttgcttccatcatacttctgggcgatgagttttcggtaccagccgagaacggtgtcgggcgtgaacaggacagtggtttcctccagaagccttcgcgtcagccgtttagcctttgctgccagcctgatcctctggtagtcgctcaatagggtgcgtctgtccttttcctgctgctcctgcaggaccctgacctgctccttgaggtagtcgatagctctccagagttccttgtcgacacaatacgctaggcaggtgatcagtgtgatccataatctctgtttcatagtcccgagaggctaatgcacagggaggcggcaggcaagcgctttcgtagggcaatggcataaagtccttgatcagaggcatttaggataggataatacttgcaccctacgcgagatcgattgccacaccgacatgacaggaagccagcgcatgaaaaagcggggcttgcgtcatgttgacacaagccccgcctgcgtatcacgatacagatcgcatactaactgagagcgatgctcccaacgatacacaggaacaacgcagc

SEQ ID NO: 507 - DNA, 168632 bp, Artificial Sequence
  Synthetic Oligonucleotide
gacggtgaacgtctttccgaggtcgctgccgtagggcgtgccgcaccgctggccttcgcagacctgcaggccgatgtcggtcagaatcacaaagatgtcaccgtcccggcgataactcaaaaagagcttatagagcagctgctggaaattgaaccggccggtcagctcgcacggttgatcgagcatttcctctcgccagagggcttcggcctgtttgttccaggccttgctcttggtgcgggcctcgatgtgcgtctgggtgccgacgacctcgtcggcctccgagagcaacaggcccttgaccatcggattattgcgggcctggtcccggcagatctcgcgcatcatgcccagggccgactcggtcagatgcgcatccccggggccgcccagcccgctgcgctgggtgtggaggcgcgtgttcttgatggcgttataaccgaaccgggcagcggcgtcggccagcttggcccgggccaagtcctggcggcgcgaggcaaaccaccggggcgagacggccttggccaggccgtcgatcttcgagctgactcgatcgctaagcgtcatacgtgcgccacccttgtgcctttgtcgttacccttggcgatcttgcgcagtagccgctcctcgcggcggtacagcacacccagatcgtgcttggtgaacgactggttgcccacggtgtaggccgagacggtcccgcgctcgatggcggcgatcgccgtctggacccggtcgagttgtattgcatacgattctgccatattcgcagaatacagtggccgggcaggaggtgcacagagggccgttactacagattagtaacgactcgaaaagtttctaaagcccctaggatttcgggatttctcgatttgcagttcaatttccggcgtgtttctgccgataaacgtgatggaggcgggtcgaagaggcgtagtgcgaatgcccattgcaagtagtctggatcttggcgagcgactgttacggtgactagccggtaggggtgtttccctgaaattaccgagagtaacggactactcacggggacggagtgcgcccaccggcaagaagcagcgggcattcaggaacacaaaaggcgaggtgacaatgaattacaacctattggacgaaaagtggattccggtcctttatcgcaacgggaaatgggatcgcgttgggattcgtcaggcgttcaaggatgcgggctgcattcggcaaatcgcggcgagcaaccccatggatcgtgttgcgatcgtacgatttctgcttgcgctattgtattggtgtaaggggagtccaccagatgatgcgaacgcagaccttagtgattctcttccctctgactggttctcgaaactgcatgacaacagagataacttcaatctcttcggtgaagggaagaggttctaccaatgcgcttcctcgggaaatgtgaactcccctgcaagactcgcggcggactatcttatccatgagatccccacaggtacgaacaaatggcactttcgccatgcgaccgacaaggtcgatggcttgtgtccggggtgttgtgccatgggtctgttgaggctgccgctcttttcaacatctggaggccgtggcaagccgcctggggttaactcgaaaccgccggtttatgccgtaccggtgggtgtttcactcgcggagactctatggttctcgtggcagcaagcatcgagattgggaacaccagcgtgggaagagccggatttgcagctcccgacaataggtgaggttcctctgctcatgggattgacgtggttgccgcgacgggtgtggctgggcaatgccgaggagcccgaagccgcctgtatctcatgtggacgcaaggagcgactggttcgactcagcgtgtttgctggcatagggagcactaagacaactgaaggtcgtcccaggcgaatctggcgtgacccacacgttctctatgttgcttctccgaaaggcgaagtgatatcgcaccatgcaagtgatgcccttggtgccgccgatgcggcagccgatcaatgggcaaaaaccatgaccagaatgctccaatctagcgcgatcggcagtgaaagtgttcgtgtctgggtagtcggcttctccacagttcagaacgacaagtatctggaggctgcagagtacgaggtgtcgttccagtgttcaccaagtcgtgttcgggagagtattgagagaatggaacaatggcaaaaacaggggtatgggctaaagaggcggatagccaggtcgaaggtcgagggttcagccttcgtttcagtcattcgcccccatgtggaaaagagagtttccacaaaagccggtgatctaattgccgggggggatgaggtgtggcaacaggcggcggcggaataccacccgcttatgaagttgatcgccacgtcgctatctcccggtttcacgacggcagcggttcaacggcgactacacattaccagggtggctccggatatgcggcccaaaacaaaaacaatcaagaaggcgggccggaagaagggaggagccaagtgagcgcagcagagcagtacattgatactttgacaaagctcaaggtggggcaacttggattgctgcgcacccatgcgggacaggggctcgatgaatcagttgatggattcgacctctttgctggattgtggtggccgttgcgacgacagaagggcgggcctccacctcgccgtgaagtggcttggctggttgccaagctttacgccttttgtccgattccacattcacccggcagcacgattgctcgccaattgtgtcactgccagccagccaagagccccgaaagggaacgattccagcagaaattcgaccgtatggtcaccctgtcgcttgagcaactcgaaccggctcttcaatgggctctcaaccaagtcgcctcaaacagggaggggcttgattgggtgcagctcacggacgatctttcaaactggcaccgcgaaggcaaacgcctgtcgtgggcgagacaattcattccggacacggaaagggacccctcatgttgatccagatacatgctattcagaaccacagccccgccaatctcaatcgagatgacttgggagcacccaagacatgctatttcggcggcgttctgcgatcgcgtatctctagtcagtgcatcaaacgaagcatccgaactagtgaagcatttaagtctctgtgtggcgggattcgtacgcgacaattggcacggctcattgctgagaacatcaaaggcggagccagtgcgcagaagcgagcagccaagattctcaagaaatgtggcatcaatgccaaggatgacgaaaagagcgatatgcttgtttacacaacgggggaggcgattcagaggatggccgtatgcttgcaggacggtgacaagaagaccgatgacgaattggcagcagtgtttggaacgctcatcagtgaacaggtagccgtgccggacatggcgcttagcggcagaatgctcgaaaccggtgttctgaaagataccacggtcgacgcagcgttgcaggtggcccacgccatctcgacgcatgaggcccggcctgaagtggattactatgttgcgacggatgacattcccggggccgatgccggcgcgggttacgtggatgaagccatgtttgcctctgcctgtttctataagtactcttcgattcactgggagacactcgtcgacaatctcgatggcttcgacggcaatacggagtatctagcagcccatacggttggcgcattcatccgtggagcggcgaggaccaacccgacgggcaagcagaacagtttcgctgctcataacgctcccgatgggatgttgatagaaatcgggaacactcccatcagctacgccaacgcgttcgccaagccagcagtccaaggcgagcgtgacatgatcgcccagagcatcgcccagctcggtcaatatgttcgcgacctggacatgggatatggccctccgaagaaacgcttctggttttcgcccaatctccgctatcgcttgaccacgcaagttacagaagaggagaacggcaagaagaaacggagtgaggtctcgttgacgaatgatgagtactcattcaagtctctcaacgaactgatcgccgccgtgattaggagccttggtcatgattgggatgccgtccagacggttgtcgtgaatccagaggtagcctcatgagtacgaatactctcttcctgcgccttgaagggccgttacaagcgtggggcaatcaggagtcgaagttcgtcatccgacggacggccgaggctccgaccaaatctggactgatcgggatgctctgcgcggcattgggtgtttcccgtcccgatgccgccggcgagtggcttccaagactcggtggcctgcgcatgggggtacgcatcgacgcgccgggtctccgctggtgggactatcacaccgtcggtgccaagatgcagatgcgtacagccgaaggtaagcacaaagatggcccgattctcacccggcgtgagtacctgtgcgatgcttcatttctcgctgcacttcagggtgaaccgtcgctggttgtcgaactggcgcaagcgatgaagaacccgaaatggaccctctatctagggcgcaagtcctgtccgccgtcccgtctgttgatggagcatccgccgggccttttccccgatttgctttctgcgttgatatcgattccttggcggcgacggctcaaggctgacgagccacggcgtactgcggattgcctcctcgactggcaaccgtcggacgaacagcccgaagcgcccgacgatgcgcttatctggtacgatgtgccgttgacgtttgagccaccagcgcatcacccacgctttgttattcggcacaaactgcgcgtgggtccgggaggtgaggtctccatcgcaaaacaaggcacgcaaagccccactccaggaccgcttcgcccgcgcgctgactatggcaacaccaaatacaggaagatccgacaagagcggcttgaccgcgatcatcagttatgtgttttttgtaagtcgcctgcaaccacggttcagcatgtcacgtatcgccatgctggtggagaggaacgtattgaagagttgcggtccctttgccgcctttgccatgatgccgtgacgatgatcgaatacggcttgggcatgggcctggatcggatcaacccagaagagcagcgatggcgggatcggatcatccagaaacgagaggagatcatcaagtttcgctcgcttgaaacgcgtcggcgtaaactcagcgccgaggaggtcgaatgatgtacctgtcccaccttatgatcgatgttggaaacaatcctgatcgaccccggcctggacggcgatggttgcgaaatgcttaccgcgttcaccagcgactttgcatggcgtttccatcgaaggaacgcccaaagaaggaagccgacccggagtttctgatgccatattcacccgacgacttccctgaagcccggcacatcgcagaccagaaggcagcacaggttggttccgaagcactgcgtcatgtacacacaccgcgcgattccagcagcggtttcctgtttcgaatagaccccttgccagactcatcagtatcgattctggttctgtcggccgtcaaaccggattgggactatgcttttcataatgccgcttatctcttggcagcgcccccctccaagccgcgttccatggaactggccatcgcaacgggcagtcagtttcacttccgtctgacagccaatcccgtccggaaagttgcgaccattccaagaaggtgccgggaacggccggatcaaccgggtcgccacgggcgacgtgttccagtaccgtcggaagacttcggaaagtggctggtggcgcgcggtgagatacatggctttcggcttttcgaaccgcttgaggagactcttcgcactcagcccggatacgtttatgtcgccaagggccgcgacaccggtaaggggcagcggttacggagtgtgcgttacgatggtcttctcgaagttgtcgatgtggagcggtttcgcaaggcgttgctctcaggcatcgggagcgccaaggccttcggcttcggactgttatccatcgcgccggtgaatcgatgaccaagttgtgcggctacggcaaaggagagattgcactcatcgaataacgctctttggtgtccagtacgaagggattctggaagtgacggatacgcagaagttctttcggacgctctgctctggcattggcccggctaaaggactgggcatgggtctgctaagcattgcaccggcttaggagattcaatggctgacttgcatgaactgccgaagtttgaggatcgctggactcatctgtacttggagcatggcggtctggacaaggacaaagagggcctggtcttccggcaaggggaaggtcgcaccctgattccgatcgaccaactttcactggtcatgttgggacccggaacctctgtcactcagcaggccgccaaggcgctggccgcgaacaactgcctgatgtgcttcgtcggcgaacagggtgtgaagatgtatgcctttggaacgggagggacacacagcgcccgccgactgctgcgacaagcagaactgtatgcctctcctgaacagcgagagcgcgtcgcccggcggatgtatctgaaacggtttcctccaccaatcccggcagatgtgaccatacagcagctccggggcatggaaggagcccgagtgcgcaaaacgtacgagcagatggctcaagactggggagtgaagtgggaaggccgcaactacgatcaaaacagttggtacactgccgaccccttgaacagagcaatgtcttcggccaatgcctgcctttacagcttgtgtcacgccgccattctctctgccggttacagtcctgccatcggcttcattcatacaggcaaagtactgagcttcgtgtacgacgtggcggatctctacaaaacggagatctccgtcccgctggccttccaggtagccgctgactccagcgagcatgtggaaagaagggcgagactggcctgtcgggatgctttcaagcaaacgaaattgatacggcgtatcttgcccgatattgcggaggtgctcgatgctcgtgatgatcttggaaaaggtgccgacgagtctgaagggcgagctatctcgctggctgatcgagcccaaggctggggttttccttggaagtccgacggccagaatacgggataagctgtggcagaaggccgtcaagaaacgtaaacggggatacatcctgcaaatatggtctgattccagcccacaggggtacagtttccgttccgagggcgagtcttttcgccaaatggttgacttcgagggcattgcccttgtggcccgcgtgggcaagggctagttcgagtgagtcccaacatattgcggttaggcaattggtggcatacaatgccgtggtattgtccccacgcacgtgggggtgaaccggcaaaacgtttcatcgcgttgtctgcaatctcattgtccccacgcacgtgggggtgaaccgggcgtgaggtcggccggacgatacccttcaagtattgtccccacgcacgtgggggtgaaccgcgataaaacagaaaacccaccctatcgtatccattgtccccacgcacgtgggggtgaaccgatagggaacgaagagatggcattgacgcgacgattgtccccacgcacgtgggggtgaaccgtaaggttgatctgtgcaagcttgtccgtaacaattgtccccacgcacgtgggggtgaaccgctagaggctcacgacagaaagggccaccgaggattgtccccacgcacgtgggggtgaaccggagccgaggcgtcgatcgtcccccagacggtaattgtccccacgcacgtgggggtgaaccgccgaccgcctgcccgcctccgtcgcccgagccattgtccccacgcacgtgggggtgaaccggccacgtaaagcccttgtatatctatggttgcattgtccccacgcacgtgggggtgaaccgacgacgcactacgccatcactggggcgattaccattgtccccacgcacgtgggggtgaaccgatccaggggccaatacacacaatcctgattttattgtccccacgcacgtgggggtgaaccgcattcccttccaccgtaatcgcgggcgtcatcattgtccccacgcacgtgggggtgaaccgaacagtgtgcggaatgactacattgcgtgggtcattgtccccacgcacgtgggggtgaaccggacatcttccccgctggtatgacgggcgtgacgattgtccccacgcacgtgggggtgaaccgatggcgattgaattcggcataacccccgtgtcattgtccccacgcacgtgggggtgaaccgtaacgcccaagcaagtccaggtcgttctggatgattgtccccacgcacgtgggggtgaaccgtaccatgggcgcttttctcctttattcattgttattgtccccacgcacgtgggggtgaacccgcatccgacgaattggacagaaaagcaaacatattgtccccacgcacgtgggggtgaaccgccatcgcagacttgacccgcgaagaggtacggattgtccccacgcacgtgggggtgaaccgagagcaggggagcggggcgtgatggttcgtgaattgtccccacgcacgtgggggtgaaccaatcgtatatatcgccgcttctacgctcatgcgattgtccccacgcacgtgggggtgaaccgacaagatacaaacgtggaatggcttcacgtggattgtccccacgcacgtgggggtgaaccgtagtaggtgccgcgaaagatcaccgtgccgctcattgtccccacgcacgtgggggtgaaccgtgctgcatcgtggtacaagcactaagcctcgcattgtccccacgcacgtgggggtgaaccgcacagcgaaattcaggatattcgcagccttgacattgtccccacgcacgtgggggtgaaccgccggccgaccagaagggcgagaagatcgtgatcattgtccccacgcacgtgggggtgaaccgattgctaaattcagattttagcgcccatgatcattgtccccacgcacgtgggggtgaaccggtgggccgggggactaactgaaaggaccaaccattgtccccacgcacgtgggggtgaaccgacagagtcatcataacagccgacctggccagtatagtccccacgcacgtgggggtgaaccgggagacgggaaacttgatgaagaactctggtcattgtccccacgcacgtgggggtgaaccggcggctgccaggctagacatcctcggactcctggtttggcttgtagttgacctcgacgctcttgaacgtcctgccgcagtcttggcagcgatggtaacggacgggcacatggttgctgtcgtagaccgggcaatgcgtcgaaccacacgcgggacagcggacgcgcatgaagggcacgaagtctgggttagctcggcggcgtggttgccgaggccgctcacctggtgttccaagttccggtaagtcgtccaggaagcccgtcattgcgataacctcggcagcccctgcagaaagcccttgttctgttggtcgctacggtcgcttcgtttcgcgggcgctgccggcatcggcggcgcgacgagtgcctccaggaggccgacgccgaccagttcggccgccgccgtcgcgtagaccaggcagtcccagaggtggttgtcgccgccgccggcgcgcttgacccatcggatctctttccgttcgcccttgatgaccgcctcctgttcttcgctgcagagatggttcttgacttcctggctcgtctcgccgtgcaggtgcatgtagccggggccgggaacctcggcttcgaacagcaggcggaacaggcggttcttgatctcatcgacgttcagatcgtaccgagcgacgatcttatcgatcgggctcttccgatagatccgagccttgacccgatcgtcgccgcgcacggggatcgcacgcaagtgggcgttctggcgacagaagttgatcacgacgtcgtactcgtaaccgcaatcgacgcccgtcatcgcggtcggcagcagcagattgcgatcgtgcgaaaacggccagggccgcgcgatcaattgacggacccggccgaagttctctaattccttggtcgcgccggtctcgatgcgcccctcatcgagcagccacgcctcgaacagatagccccagccgacgaccgcgtaccagatgtgatcgagctgcacgtcgatcccgatcgtgatcgcctggacgcccggcgggatcagaccgcgctcgtagctgccgatgtgcggatcgagcttggattcctccggttccttctcgcggaaccgccaggcccgggccatctccgaacggctccagtgttgcagcggccgaaagttcccttccttcagcgacgtttgggcccggacgtacttggccgccagctggccgatcgactggaaacgcgggttgaccatgaacgccgagatccggtaactgcgccgcgcggtctcgggcaactcgcccaggatgtcaccaccgctgttgaccgtgcagccatgcggggcccaccgcccggcggtgatcgcctcgtgacggtcccgctcgctccagaccgccccgcactcggggcagacgtaccgtgcgcggtcgcctttctcgtagacctccggatcgaggaagcggccggtgaggctcttatcgaggaccatatgcctgtcgtcaaacgtatggtgttcgctgcagtgggggcactgggggtgaaactgccgcttgtcgccggcctcgtattcgcggtcggccaggtcgccctcatcgaccgggctggtggtcttaatcaaggtcgcgcgatggccgaaggtgcgcaaccgatcgcgcagcagattcaaagggtccgcctccttgccgacggccggcgggaatttaccgatctcatcggccaggatccgcgcgaccgggacgtcggccagttgcgctgcgctccgcgcccaggcgagatagaggttcatctggtccatcaccgttgcctcgccgatgtgcaggttctccagccgcccgccaatcgctttcaggaggaacgggttggcctcgaagatcggccgcacgcgggcggcgatacgacgcttgaccgtcgattcgtccggcatgacgatcatcgtatggacgggatcgacggcgatcgtataggccaggaccaggtaactgatcagcgtcttgcccgcctgggtgcaggcgtagatggtcacctcggagacggccgggtcgacgcaggcctcggcgatctcacgcaggaagggcgagaagtaaaacgagaacaggccgggcgccgtcgtctccttggccggcaggaacagattcgcctccgcccagtcgcagatcggcgccctcggcggcggcacccacaattcctgctcgcgcggcaggacctccagcgatgggccgagcagttcaaccatcgcgctcctcccgttcgcccagggccgctgcaggcggcgtttcgagccggcccaggaaggccttgaactcggcggccgtcgcctcatcgagacgcagttcggtcgggacctcagtcatctgctctcgcaggccttcgacaaaccgacgcaaccgctgctcgatcgcggcggcggccttgccttcgcagtcggcggccgtcgccggcagatggttctcgacgtaggccagcagattctgcacgcgggcgaccaggccgttctcgaccgcctggcgatcgagaacgtgggcctgggccttccggtagtcgagttccttcatcgctgcgttggcgacgcggaggcggtcctcgcgcttgccgctcttggcctgggccttggtcgcggcctcgaaccagcggacgaactcgctgaggttataggtgcagtcgggattgcggggcaggccggcgtcccgggtccaggcggccagggtctggcggaccttgccggtgatggcctccatcaccttgatcgggacatgctcgtaatcgaagccggtcgggctcttctcgctgcggaggaagttctcgacgtagcgcatggcgttgggcttgccggcgccggcctgctcgaccatcacggcgttgagcttcatgcgcagttgacggcggttttcattccacaggtcggcgacctcggtgtcggtatcgagcagttgccgcagctccggaccggtgacgcccatctccttggccgccgccgagacggtgacggtcgtcgcggccagttgcgagaccttgcgcagcagccgaccccgctcccaggcggcccggacgttgtcgcgtttggcgatcagggcaaccagatcaccgggcccgctgaacagcaccgccgcctcggtcaggttctcgcactccaggcccaggtgccgcacctcggccagcgagaccgtccggcggcgtttcccgtccgccggcggggtgcggggcttctttttcgtcttttttctggccatttcgtaccgcttcagttcctcaacctcggcgcgagacagcggctgattctgccggaccttgcccagcagatacgcgtgacgctgcttctgcgcgatctcaatcgccgatacctcgtgactcaatccttcctactttccccaccagtcgttacaatgcttcgctctttcatggcgacgcgcgcaagtcgtcggcagtggcagctgccggcggggcggttcgaccaccagtcaccgcccgcgtcgccgtctcttttctcgcaccgctttgcgcccggtccacgtctcccagcgcttgaccgccacgtcgacgaacagcggctgctgctcgatcgcgtagcagcggcgcccgagcttctcggccgcgacgatctgcgtgcctgaaccgctgaacggctcgtagcagatgtcaccgggccgggtgtggattcgcatcgggatcgcaaagcactccaccggcttgatcgtcggatggcccagggccggcgcgcgtttcttgccgtcccagcccagctcccagacgtcgctgtaatactccggcgtcgtcggatcgcccgctttctgataacccaccgaccagacggccgtcagcttgttggtgtccgatcgctgccggccgtcgatggcgggcttttgtttcttcacccagatcagcaggcacggctcgtgacgcagggcgtagtaacagaagctcaacacgcaaatcggtttgacccagatgatgttctgatggatgtgcagaccgagttcactacagacctgctcgatgtcggtgcggcgacgatcggcgtgccaaaggtacagggctgtcccttcctggatgacctcgaggccgcacctggtgaaatcccgcatgaaggtaagggcgtcggtgatctcacgctcacggaactgatccgaccaatccttgccgcctttgccgggccggttggtgccggtgtagtcgatgcagtagggtggatcggtggcaaagagcctggccgtctcgccggccatcagtcgtgtcacgtcctcgggtttggtgctgtcaccgcagagcaggcggtgctcgccgagtaaccagaggtccccatcttgcgtgatggccgtctccggcggcgcgggcatctcgtcgtcgggggcctggccctgcttttccgaaggtttttggatctcgctgtagagggcgtcgacaccgaggtcggccagggcggtccggtcgcccagttcgtcacggagctgctcgatatagccgtccagttcggcggtgaaccggccctggatgtgagggttgttcagcgtcaggttcagcagcttttcctcggcggccgaacaggagacggtgacacacaatacccgatcgacgccgcgcgcgccgagcacggccaggcgctgatggcctccgacgacgcgacgcttgccgccccggacgttcaccacgatcggctcgacacagccgaaccgctcgatggacgcggccaggccggccagggccgactcggaaatcacgcgggggttgtactcggcgctctgcagctcggccaattgaaacgtcgctaccttcggaacggcgatggtttttgatgacttcacggtgttgactctcctcaggccgggaccttgagacgctcgaaggcgccggcgtggcatttgggacattgttcgggcggcttcctcgctcgacaccgaggccggctcagccgtaaaagtgcctgtttggtccatctgtaacccctttatttgcagtgcgttatgtatgtaaaaccaaaaaaataaatcccaaagtagccgaacctcgcgatcccgcgaccgctcggcgtctattccggaggaggacccaccagatataaaccctgtctgcgcaatcgtttacacgcggcctgttgggcagtgatcttggtggcattaaaggcgacagtgtcactctgtttctctctcgatcggttcgatgcggtttaacatcgctcacagattcccgctcccggccttggccagcaggctgtcccagatccggcagaacatcgcccccggcctcttgagccggggcttcttgctcgtgtggtgcttgcgagcctggcggcgggcctcgccccacagcgtcgcggcgatcggcggtggcagggcggcccgctcggccttcgtccagcaggcggcgaacgtgcccagctctcgggccttctgggtgcgcaggtaggccaggcccaggtcctcgtagatcgcagcggcgaactccttggcggcgtcgctgtatcgctgctcgaagccctcgggttctgctggcggcccggtcccatcgagcacctggccgatgcgtgccagttcgccggcgattagcgaccccggggggcctttggcctgcgtcggcctgtcggccccccgagcgtcgacttcggtcgcccctggtggtgggtgtgcggctgctctgtccccttgagcgtcggcttcggtcggcacagtcggcgtcggcgtcggcgataacggcggggtggtggtcggggatgtggtggttcctgcttggcttgggggttgcccttggtccttgccggtcacttggtcttgccctgggctttcggctggtcccttcggcgtttcggttcggcttgccttgggtttcggattgggcttgggattctgtttgccgtttacttctttctttttctttccattgcccttgccgttgccgttcccttcccttttcaaagggctccggatttctccggatttttccgcagaccccgccgtgcccggcttctcgttgaccgagaggtcaaagtcgggcatttcgacgcgttcgatcagaccgaccgcttccagccgtttgaggaccttgcgggcctcgggcgtcttgacgttcagcacgtcgcagatatcggcgatccccgccggcgcccgcttgccgttgagcaggtagccccggtaggcgcggctccgatcggccgcctcattgcgcagggcgatgaacgccccatgcaaggccaggtggttgtcgtagcgcttcagcgcccgcagctgcaggcagtagtccttggcgctgtcgtcgttgttgctgaccgcctcgcgacagaacagcagcgggcccttgcgacaggcccgcgcatcttcgctcagctcgaagcggtcctcaaactcgtatatgtgccataccttcgggcgtttcccactcggcattcaagccctccgtggctagcggttctctctgatgcgcccggcctaagcggccttgccttcgccggcggcggccctctcggtctcggagacgacggcctcgtcgcaccaggcctgcagatccagcttgagcatctcggcgatcagctgtattaccgcccggtcctcttcgctgccactgggcggggcgcagtcgagcccctcggtcgcctggccccagagccgcttcagcacgacgtcgaggacgttcgacgggccttgcttgcgggccttctcgatcgcttggcgatagtccgccatcccgtcgtatccgaactgggcatcggtcgcgtagaacgtcgccaccagcgggacgatcgtcagcttgttatccggcagatccgcatacgccagatccatcaggtgctgcgcgaaccgattggccacgaagtcccaccgcgcccgctcggcggaggccttctgctcggcggccgagggcttgcgtgccttctggctggccagtgtcggcgtcttcttgaccttgacgtagcggaccttgcccttgtcccgcccggcgacgatcagcgcgggcgtcgcccctttgtccttcttcttgcagatcgtcacgtcgcccttgctcagaaccttgccataacagcgtttcagcttcgtggcgttctcattgacgaaactcgcgttgctgagaaggaccaggccgtcgtatttctgccgcatcgccgcgacctggcgtttcgccgccgaggcctcgcgcttggcccaacacttcgggtccagacaccgatcgcccggcttgatcgtggtcgtcaccgttacgcctccatcggccgatttcattgtttgcggtgcgtcccacagcagcggctggcagctggtccgcttggtgcacgtgacgcacttgctctcgctactcgtatcgaacggcgctttgcccagcagcttctgctcgtcggcggtctgtttttccagctcctcgacggtccagtcggcgcagtgactccagggccagttccccttcttgagcttgccgtgccaggcctcttgcacattggccgggaaccgcgcgatcgccgccaggtggccggccccccagccggtcaatccgccgggcgccatctcgccgcgccagcagtcggccagctgttcgtgaacggccgcccgcagcgccacccagcgcggggtctgtcccatcagtacgccggccgccttggcattcccttggcacttggccagagccgtggccgccgcctggccctgttccagcggcgtcaagtcctcgcggttggcgttttcgatgaaggcgatacggaacgccgcctcgtcatccatcgccccgtaatcgatcaccgggacctcggggcacttggccgccagggcggcgcgatgtcgccgatggccggccaggatctcgaacttgtccttgcggctcgggtgggtccgcacctgcagcggctgttggacgccgagcttgcgaaccgactcgataagtgcgatgaacgcgggatctttctcgttgatcgttctcgggttgtccgggttcggtaccagccgcttcggcggcaattgttccagcttcataactgtcctttcaagtttcatcgtccgtgacttacaattcgtgaaaagggcaggcacggaggccagcccctactaatccccgccaccgtggcaatcgacgccgtcggggtccttgtgtttgcgcagcacgttgcggccgttgagcttgcgataggcgacctcgcgcccgcactcgttgcagatcaccttgcccagccaggtggtcgtgtccttgcccgcctcggccgccggcttcggcttgaccttgcgcgcggccgttcggtcgatcacggcgttgcgatcgaccacgatctcgccgtcttcccattcggccttgtagcgcgtcaccatcgacggcagtaggctgaaatggcgcagcgccccggcgccgctgattcggaacgcctggcccggccgcgtcttcgaggcccaggccagcgccccgacctcctggcgcgacgtcggccgtaggattatcgcgttggcctccttacagaatccgacccgacagccgtcggtctcttttagattgatcccctcggccagttcgacactgacactgatcgtgccgctaggcgtcagcgtgacaaaccgccccttcgccacccggttggtgtcgccggtgtaaaactcggtctctcgcttgtccttcttcgccatgattatccttcctgtttgcacggttgcacctggcggcgtcgccattcgtcgagccagacgaggtcttctgctgaattgttcgggcactgttccggctcgaccgccaggcactggcccggctcgcccggctcccaaagatcgcacggccgctggcagtactcgcagagcgccgggtcactcatcgtcccgcccccatgcgcttgcgcaccttgttcggcacccagacccgcaccggttcgccccgacgccgtcgccgccgtttgcgtttcggcttcgtcgcggtcgcgcggccgtcggtcttgcgcaaggcccgcccgcgcgtcaataagtcactcagtcgcatcggtccctcctttcgggtccaatttgtcgagcactttcaacacgcgcaggcgggccccagcctgactaaggcccggcccgtcgagatcctcgcagatgattcccttcctcatcggctcacctcacggatgtcggtgttcgtgtagggaataggcccgtcggccaggtattgggccaggtcgaccttgacggtgtaggtcttgccgaacttctcgcagagcacgacggccttgaccgcgtaggcctgccagtcgatggccgcttcgcgctctttgtcgtgattgagcttaccgagcatgaaatggtcgacgtggtcggccgcccgtatgatcagctccagcgattgggtcgggtcaatgaccggctccatcgatgcccaggtgaagatcccggccgccttggcatgcgccagggccttaatgcgactgtgaggtgacgcggcgtgcggttcgtgttctcggcacaggtcgtcatcggagaacgtcagcgaggccccgaaggcgtcacgcgggccgtagaggtggaagtcacgcgtcgcgcggagcccgcccttggtcaggatcgtaaacggcacatcgttgtcgcgcaggatcgtgatggccttcttcgtgacgcgctgctcgaaggcggggccctgatacggatcgcaggtaaagcacaacagcacgcgcttgttcgtctcggccaaggccggggcttgtcgcttcagccccgcgatcacgccgtcccgcggtccgcatttggcgatgaagacttcgcgactcttgtgcaacgtcgccggcccgtagcagtagtcacagccatgccggcagcccttaaacaggttggcggccaggtggctgtattcccccgcccggcccttcggttcgtagatcacttgcattgactcgctcccttccaattccaatgagggcgggcacgggggcaccgcccctacacgtttacacccttcgcactcttgtgacgctgaatccggccgtcagcaggcccagcggccagagccagccgaggatcgggtgatggttcgccggcggtttgccgtcgatgcagacggtgtaatagcccgtcttggcctcggcgtacggtgggtcatcggtgatactgacgtagatgtactgcggacccggcaggacctcaccggccagcgtccaggtcccggtgttcgggtcggatgtcaccgaccagcccggcgtgcggctggccacggtgtaccggtggccgtcgggatcgcaggccgggccctggcgaaacagcttgcccgtcggcacggtgtaggcgacagcaccgctgagcgtgtcgatcaccgccggcaggacgagcccctcgatcagattcggatcggcccagggcggcctctcgtagtggatctgctcgcaaggcggcgcgttcggctcgtcggccacaactaccagcgtcgtggcctggccgatcgagcagagggccagcagcaataaaccggttcttcgcttcatgtccgctcctttcgttgctcgtcgaacttgtccgccttgcgcgccagatagcccataatgcccgccgccccgaagcaccagcagaacgactcgatccacgaaggggagataacggcgaatccgtacaagcccagtgagacaatgcccaagaacagattcatggttgcccctttcgccagcggtagccggccgcccaggcccgatcgaaatagccctggacctcgtcgtagatatcccggccgccgaggtgctcgggctggaggtattggtcgtagagcccgagccggccggtgacgtggaacggagtcaccggccaaaggcccttgaagcaccaggcaacggcgtcgtcgtagatctcgcagcgggccgcttgctcgtcggcccgggtcatcagacggcatcgggccagcagcgtcaccgccagggccttacccaacggcagcggcgtggtctcggccctctcgaagcgcgggtcgggcttctgcgatgagacgatcaggatcggcccgcgccagtcggtcgccttggtccgcgtctcgatcgtcttgttaccgtcggcgatccaggaggcccacggttgtttgacagacagtgccggcaggatcatggttcgtacctccgcaggtgcagcgtcgttagcgttcggcaggtccaggcccgccaggtgtccaggtccatccagacgtcacagtcctcggcgagtgcatcatggtcgacgtcggccagggccttctgctcgacggccaggtaaaccggctcagcgccccagaacttcatgtaaccgatcacctcgccggcgcggccgccgctcgattcgacaatctcgtagacgtcactctgcatggctcagccgttcttgagggtcttgacgttgttggcggtggttgtgccctggcggtccttcagcaccgcgatcgcggcggcctcgtcggtgatctggggcgagtcgagcagcgagtcgaccgaatggatcacgttgaccaggtccttgcccagcgctgtggcggcctgcgactttttccaggccaggtaggcgccgccggcggcggtgatcaggctgccggccaggccgacatagacgccgtagggcgccgggacgtgcgatccgaccgtggtgatccccttgccgagcagctcgatctcgtcgccgatcccctcgaccgggccggcgttggccagcacccgctcccagtcggtcagcacgtcatcgacctttcccttgactccccgggccacggtcagcttttcctgggccaccacgacggcggccgcaatcttctcgatttcctcggcgggcagattcgggtcggccagggccgcctggctcttggtcaggaacgcttcgagctggtcgacgaccatttcgacctgctcgcttttctgctgggccacggcgacggcctgctcggtcgccgcgatccgctcggggctgtccatattgcagccgccgatcgggatcagccaggtcaacgcggcgatgatgcagagtgtcttgattcgcatgtgcttcctttcgctaaaatgtgggttcaaacggttcgggccagtgccgacagaggtgacatccctcggggcactggccgctctcggtcttcagggggcagggcggcgtttcggggtgggccatttcagacgacccccagactcgctcgccgctcaacggctccttttgggtggtgatgtgcatggtacccttccttctgctcttgcctggccgccttcagttgccggttgaagcgttcgatgcgggcgatcgtctctggcgtcggcggcacccagcattcgtagagcgtgacctggctaaagtaacgcgacgccgcccggcgccgcaggcccgcgatcgccgcttcataggccgccccgatcttcgtgcggatcggccagaaatagggccgcagctcggcgtgctgggtgaccgcgaccagctcaaaacgccagacgccgcgattgcgccagccctggccgtcgacgcgagccgcctgatcaaagaacaaccccggaaatggcccctcttcgtcatacgcctcaatgatccgcaccgccatcgggcagctcctcgaacaggtcggcgtgctcggtctcgacgcgcagctcgacgatggcgtgcttctcgcgaaccaagaactccagctcggccaggcgatcgtcgggcaccacgacgtcttggaatgtcaacgtgcaatccttgaccacgccgaacatggagatcggcttgatctcggagtgttccttgtcgggcaccagtagcagggcgacgggtctctcgcgggccttgctcttgagcaggaacgccgactcgctcggatcgatcgagagtttgacgacgccgctcttgacggtgcggtcctcgaccgaagccgggcaggtgaatttgagtttacgcgtcttggccatagccttcctttcctgggtagagtggatgaatcaatagcgggggccggactcgaaccggcgacctttcgggaatgaaccgaccgcgctaaccaactgcgccaccccgcgatcaagccgtgatatttgtatgccccccacggccaggggcctccgttggcgcttgggcaggcaaaagaggcgggccccggcaacgacccatggaaccggggcccaaccacaacaaaaggacagggggaagtgaacgggttcgggcgggcctttcacccgcccggcgggacagttgcagcggcaagctcccgctatgaccaggggccctcggtcgcgacgatccgccgttgtgtcgcaacgtcatggggccagtcgaaagtaattatcgagaagaacagagggcccggggggagaggtggttttgagagcccgccgactacctggtcgggccgctctgtcgaagaatgtcacgccgccgtgtcaagagtgtggcaaaaaactcttggtctcaggggtgaaagctgctagaatacggccttgagagcacgttaagaccgtttataacctggagtaccgagcttccaagctgattacgcgggttcgattcccgccacccgcttttttccccgcgctgtttgcaataggctccctatcgacccatttgccgggcgggttttcggtttttcctctgttcggcccatccagagcctatccttagtcatctccagaggtatgagcaaccacgcggcgcaaggccatgcacctgccgtccgtctgatctgcgcctggtatttgagcccactcgttcccaaaagggggcgagtttggacgtggaatctacagccagatttgacttctccgcccttggcacgcgtggaattgcagatatggctccggatgggtctgggagtgacactgtcttggctggtgacagagccggcaggaggtggtgacgagtgggtggaagtgggacccggtgacggactcgggaccagcggtctctcgatccccgccgccggggcgagactttccaagggggttcacgattccgtgttatagggcaaagcaggggtagcggtttcgtaaatgcctttaacggttgcagttaagttgctactccgtgacggtcctataaacaatcgccccaaaaaaacgacaaaatgcatttttggaggttgacgaagtgggtgtgagtggggataattcccaaacgctttgtgttgagtggggcaattgccatgcttttactaaccggtgaataccagcacgttgtagacggcaaaggaagagtgctcgtctccaacaagcttcgaagccagatcgacgtcgatgagcatggtcgtaacttctacctcgttctcggggccaacggtgtgttgtgcctgtaccccgagaagtactttgagcagatcgttctggccgtggcccctggggcgacggctccggatgaagcggtggcgttcgaacgcatcagcttcgccttggccagcaagatcgaattggacggtcagggccgcctgttgatcggcgagaagctgcgtaagcgggccgggctggcggacgacatcaccctggtcggtgtcagggaccacattgagttgtggaacaatgaagattgggaacgctatctgtcggatcatatgggtcagtaccagaaacagatgacgcaggcccggcagcttgttttgcagaagcaacagaaggaattataaacgctgcgttggaggcaatggacagggatggatagttgctattgtcaggttgtcgccgggactctggcaggggaacggccgatggacgagcatacgcacgcctcggtggcgattctgggcgagcgtttggagcgtctcaaagagcacggtgggctcttcgccggcatcgagttctcaccgcatgtccagcgattgcgacaacgctctgagccggtatcgataggctgaaagggcgtgcaaagttcaggagtgaatcgctcagaagttgaacacgttccggtactttcggaacctttggccgaacagataaacttaccccaggatggggtgatggtcgatgtgaccgtgggacacggaggtcacagttttctgttcggtcagaagctgggtccgcaaggcacgctgatcgggctggatatcgacagtttgtctctggagcgggccgagcaacggttggcgggccttggctgcaaggtggttctgattaaatccaatttttccgcggttgctgaacgtcttgacgaattgggcgttcctgcggtcgatttcatcctggcggatttggggctgtgctcggcgcaattggcggatgcggatctgggacttagttttcgcgatgaagatatgccgttggacatgagaattgacgaaagcttggagacgacagcggccgatatagtgaatgggtacgacgagaaggccctggcggatctgatctacgaatacggccaggatcgcgcctctcgacgtatcgcgcgttacatcgttcgacgacggcaacaagaaccaatcatcacgaccggccaactcgtgcaggtcgtgtgcagcgccttgtataagggcggctcgaagcggcgagccagaaaacacccggccacccggacgtttcaggcgctgcgaatagcggtgaaccgagagttggagaacctgaaaatgttactctcctcggctccggcgttgctcaaacagggcggcagcctggcgatcatcagctttcatagcctggaagacggtctggtcaagcgcgatttcaaggcacaccagcaggcgggcctctatcagatcctgacgaagaaaccgatggtggccgatcgggacgaggttgcggccaaccggcgggctcggagtgcgaaactgagaatggcccgcaaaactgagatcaatgaacaagaataggcatggcaggatgcttttacgaaggaacgggttaacggcaaggaacggagtgcgactatgacgtcagatgcgaaaatcggcttgctcttgggattggtgttcatctttgtcattgcctttatcatcaacgggctacccaactttggcaaccggtcgcaagccgaggcggcgccgatgacgaattttccggacgagaacctgggtgtggccgacagcgcccagagtgcccaggagcagctcgactgggagggtctgctggcgcaagggagcgaagagcaaaccgagtttcagccggtcgaagcggaagtcgaaccgagcgtggcgctaccggcgacgacggttgcgacggacaccgagaacggggccgttcgctccgttcatacgcttgactcgctgatgggaggggtctcccggaccatcgaagacgtgattaagggaattggtgaggcctcgcagtcggtcacgctgcaggccgaaacgagcgaaccggccccggcgatcgagatgcccgggcggcagccgatcgcccaaccggtccagacggcgcggtcccaaaggccgacgccggcggaaaagcccgcccgcaagcccggaaagaagtctgcatcgcgggtctacgtggttcaggatggcgacgttctggccacggtggccaagaaggcctatggtcctgaagagggcaacaagctggccaatatcaagcgcatttaccaggctaatagcatgatcttgaatagccccgacgagattgtggtggggcagaagctggtcattccgccgttgcccaagggtaaggtcggagccgccgatccggcggccgtgctggctgggccgcacttcgagaaggtcggcaccgcctccagaaaggccctggctgatgtgaaacagggcaagcctaaggggtggtactacgtcgttcaggatggtgacaacttgtggaaaatcgccgtgacgcaactgaacagcgggtcgcgcagcgaggagatcgccaagctcaacagcgatatcctcaagagcaaggacgctctgaccattgggatgcgcctgcgccttccggcgaaatagaatcaagccggcgagcccggcgtgtggagacaaggacttctcaacggcgacaacgacatggcttctcgattgtgcttcgcgtttgtcatcttcttctttgcagccatcctgattctggcggtctatctgcgcagcgccaaccaccgtgttttttacacgttgcggcgacaaacgattgagcagcatcagcttcagcaggagttgtggcagaagcagttgagggtcgaggtgttgaccagtccggccgccgtgctgcagcggttggatcaataagacggacgctggtgtggcaaccgcccacgtgcgctcgtgctcgatgaacgaatgtcaggacagatagcagcaagcgaaggatgccgtgtatggagacaagggacgtcatggggagcgaatcgacccgcggccgatcccctgatgattgttcgcggcgcgagcgaatcacgatcgtcgtattcgtctccgtgatcatcgcggctttcgcggccctgggtgggcgatgctactacctgcaatacgctgcggccgatcactatgagcaactgagtctgcgccagcaatgctcgtttcttcccctggagccccaacgcggggccatcctggatagtcgtggtcgcgttttggccgccagcaatcagattcgcacgatcttcgccgagccccgcgtcatcgccgagcccaaggagacggctaacgtattggcgccgattctcgatatgggggggcacgagatctgcaagctgatcaccgagagtcgcaatcccggctacgtggccctcaaggtcgatgccgaagttgagacgtgtgatctggcccgcgccgtgtacggcgtcggcgtgcagtctgcctggcgtcggcattacctgacggggcgtctggcctcccatgtcgtcggctttaccagccgggataatcgaggtctgggcggcgtcgagaaccgattcgacgcggagttgcgcggtgagggggcccggcatgcgttcaatgtggatgtccaacgccggcctctgtccttcgccgtggcccagaatacgggtgataacgccgtcccgaccaacggcagcgccatcatcttaactctggacgcagcgatccagcaattcgcgcgcgaagagttgctcaagcagtacaaggagtacgacgctgaaagcgctttggcggtcgtcgctgatccgcatacaggcgccattttggcgatggtctcgctgtccgatttcgatccggacaacgtcggacgcacgaatcccgatcacttcctcaaccacgtgctgaccgaccaattcgagcctggcagtatgattaagcccattgttgccgccatcgccctggacacaggggcggtgagcaagtacgaaacgatcttctgcgagaacggcaactaccggggtcatggcttcggccggatcggggagttcgacaagggtttcggcgatctgacgttgcgcgagattctcgtgaactccagcaatatcgggatggccaagatcggacagcgcatgggccccgagcggctctacgaaggattgacgctgttcggtttcggcaagaagatcggcttcgacctgcccggcgaggccgaagggctgctgcgtcatccatctgcctggacgggctacagcatcacccgaattcccttcggccaggagatctcggttactgctctgcaaatggtgcgagcctactgcatgctcgccaacgggggacgcctggtgcggccttacctggtcaaggttgtggttcagccggacggatcgatggtggatgtcaggcctccggcgctgcgtgtcggctacgtgatcaaacccgagatcgccaagtgggtggtcagcgaggcactggtctccgtcgtcaacgaaggcaccggccaccgggccaagttggagaaatggcaggtctttggcaagacgggcacggcccaactggcgcgcagcgacggacgcggctacgagcccaaggcctacgtggtttcgttcatctgcggcgccccggctgaagatccccgagtcgtcgttctcgtctcgattcgacgaccgaacacggcgatcaagggacgcttcaccggcggcggcagcgtcgcttcgcccgtcgcggcggcgattctcgaaaaggtcatgacctatctcgaaggtacggaccctgccaaggcgaccatcgcccgggccgcgccgtagagcggcagacgtgcttgctgggggcaatcgcctcgtcaggtatcgacttccggcgttgtcggcctcagccttttcctgcatcgccatagtgttctactgtgattttatggggcgtgcacagccgaagaacagatgggccccgacagggcgtcgagccacgttggggacctggggcacattgtgcatggacggaatatagacgtttggcacgaagaagggggcattatgccaacgatgctgcaagcggattgtcatctcgatatcgaccgtctgtgggagctgttcaaggagacgggcgaggcttgctatcggaatcttctggtggatcgttaccactatctggtcgaacgcactgccacgcatttgcatcaaaggctgccgggcgctgtggagcttgatgatctgatcagcgtcggcgtttttgggttgatgagcgcggtggagagcttcgatcgaaaccgggccgtccagttcaagacgtactgcgtgcatcggatcaggggcgctatcctggacgaactacggcagacagattgggtgccccgcaccgtccgcaggcgggctagcgaactatcgactgccgtgcagtctctccaactgcatctggggcgcagacccaccgaatgcgaaatcgccgacgaacttggcgtggacgagttcgaagtagagaagctgcggcgatacagtacggccccgcgcgtgacctcgtttgatgagatgtgcggtgagggtgaggatagcgagggcatgcggcggttgaatctcgtggcggccaagaaagcccatacgccctgtcggcgagcgcgccggcgcgagttgctggaccagttgacccacgggctgagccggaccgagaaactcattctcgtgctgtactattgcgaagacctgaccatgaaggaaatcggggtaacgctggggttatccgaatcacgcgtttcccagatgcactctctcctggtgactcgtctgcgggccaaggcctccagggggcagccggcattcagtgcgttacggcccgctctctgaccttgggtggggcactcccatcgctgtatatcatggccttttaggcgcctaagcggacccacgcccgcccgggtcatcattagaaactagctaaatcctgttttgcggacgcagttatggtacactattcggctgagtacaagatgtacggatgccggagcgtaacgccgcatggccagaataatctatgccgtcgcaggagagggatatgggcacagtagccgggcccatctggtcgggcagcgcctgcttgacgcgggccatgaggtgatgttcgtcgcctcccagaaggccttgcgctacctccgatcgatttacggcccagaggtcaaggagatcttcgggttgtcctttgcctatcgtcgcgggcggatcgaccccgtcgagacattcacgcggaaccttttccaggttgcgcgggccaagagtctcaacaagcggctcttcgagaaggtctatcgttcgttcaatcccgatctggttatcacggatttcgagccgttcaccggctggtgggcccggcggtctggcgtgccgttcatcagtctcgacaacgagcacatgctgaccgtgtgccgtctggagcaccgtttgcggtacgtcttgccacgcctgactgcgacggcggtgaccaagagtttcggcatcggggccggcacgtatgttgtgacgaatttcttcgacgcgccggtgaagaccgaccgagcgatcctggcgccacccattgtccggccgatcgtcaccacgatggagccttccgacgccgggcacgtcgtgatctactggaccacgggcacagaggaaacgcgcctgcggacggtactgcggaagttcccggggcagcggttcttcgtttatgggtttgacaagtccgcgaccgtggggaactgcgtcttcaagcgcccttcgaccgaggggtttcttgcagacttggcctcggcccacggggtggtggcctcggcggggctttcgttgctcagcgagtgtatgtactggcgcaagaaaatgctgcttctgcccttggccggccagtacgagcagattgtcaacgcgcattacttcgagaaactcggtttggggattaccgccaagcgtttgaatgaagcggttctggctcgcttcctggaccgactggacgaacccatttcgcaggacgaacgcattctctggcccgacaacgagaagttcttcgagacgctggagacggcgctgagtcgcctgcagacgccggtcagcattgccatacgagagattggcccgaaacgtcgttcgacggcgccgatggtgcgggcggaagactgacggatcggcgcccaaggtccgctctagggcaggaccgtcggttgcgacgccgtgcccacgtagcccttctcgatgcagaactggatgacatcgcgcgccagcggggccgcgtcgctggagccgtattcaccgccttcgacgatgacggccagcgcgatcttggccccttcgtgatcttcagcgaatcccgcgaaccaggcattgtaagggcgttcggtggacccggttttgccatagactttgacgccttgatccttcagggcacttggcccgaatactttgtttgccgagccgcctgattcgttcaccacggcgtccatcccatcgtaaacggtccggagggtctccacggagattcccaggtcggtgggtaaccccggcgcgggggattccggtttcaggaagagtcggggccggatcgctcgccctccacgggcgatggtggcgaaggagttggctacttgcaagggggttgcccagaggttgccttgcccgatgccgaagaggggaaggtctcgcttggccagcggaggaaggtcctcgagcgacttggtgctcttgggccgttccctgctgattagcccggcagcttgtcttagttgccgggggtccagatcgtttggccccggccatggacaggccagcggcaagcgacgtccgtagccaaagcggtacaaccaaccctgcaagactgccggttcgatatcgttggccagacgcgagaaatagacgttgcagctacctttgatggcgttgcgtgccttgttggtccacttctcgtcatggccgaagccgtgcttccgctggatcaagcagcgaggccaaccgcgcggaggcgcgtgggaggggcacgagataacggtgtcggccgtgacgacgccagcctccatcccggcaatcaggatgatcggtttgacggatgaacctgggggatagtcccgagccagggctcggttgagcagcggatgatggccgttctggaccagttcagcgtaatcggcgcgtacgcgattgttgtcataggtgggcagcgaaacgagggccaggatatcgccggtccggacttgcatgaccacgacggccatgttggcgtcggcgttcttgttcagggccgggttggtcaaatagttttcgatacgcgactgcagttcgatgtccagagtcaactggacgtcccgaccgaattcggtctccgtattgcggacgatctgaccgtcgatgtcgctgaccaactctccccggcggccgcgcagaatcggttcgcagacatactcgacgccaggtcggcgcccacagacttcgccttcgagatagctggccaggcggtcatgttcgaagagcgccttgtcgcggtcctgcgtggccccgccgacccagccgatggtctgggccgccacggagccatagggatactcacgttgccccttgggaacgacttccacatcgttgatgtccatgaactcgaactgggcggtgaagatgtcgtcctcggtcttcaactccagcagaggctggctctcgtatagatcgcgaatgtcatccacctgtccgatcagtttgtagcgttgattcggatcgggaaaatgccgttcgaagtcggagcgggccaccgacatgggaacgctggtgattcgcccgcgatactcggcgatgatgttggggtctggttcattaccgcgccaggcgaagaaggttcgcaagttccacatcttatcattcatgttcgtgatgcgatcttcgatctgggcctcggtgacgccgaactgggcgcaatcgtgtatgatgcggtcgaggtcggctcgccgcgcggtcgcctccttgaaaagatcatcgagggccgacgcgctgccgttctcctcagccaatagcttctgggcgaggatgacgcgccggtctctgaaacgactaagaccgtaatcgatggtgacctggaattcgggaatgtcggtagcgagcaccttgccgtttcgatcgaggatatctccacggagcgttttgagttgtttggatcgcccgcgctgcagcttcaatgcggccacttcgtcgcgcaacgaggagtcggccagcagttgcatttgcaccagcctgagcagtccgatccccaggagcaacagactggcagcaatgaatattctaactcgcttttcgtacatactgattcgcttggagaacgtcgacccgactgggtcgcgtctctgatgcttggccccatgtgtgtgatcgtccgtcccggcggcagcgctgtcgccttacagccgccacttgccacgccgacgtttcttcttatttatatgcatccaccaggccagcggcaagcacaaaaagggcccgagtagcgccgacaacaccggttgccagaagagttcgcgggccatattcagcggcgccgggtcggcgcgcagatgggccaggagatgggcgacaatggtagtcgtcagggccatgacgaagatcgcgattccctggtagggcagtcgtttgatcgagatgacattgttcaagtcggaaagcagcgtgccgaacaggccaaagctgatgatctgtggtcccatgaacccggtgaccgggttggccagatctgcggcaaagccgatggcaaaggacgtgattacggcgtcgctgggattgcattgaaccgcaaagaacaccagcaggatcagcagcaggtcgggcctgatgtcaggactacccagccagacgacgccgagaaagctggtttgcagaaccgttgcgatgacaatgagcacggcaaaccgccaccaacgcattcacctatacctcacgatggaaggattcgggattcgagcttcagcgccgtccattaccggccgggcacaatgacgtgcacgcccttcagatttgcgatgtcacagaccggttggaccgagatgttcaggaccacggggttttcgtccggcttgcagtccaccacgacagcggtgacaaagggaatctccggatagcccggggctttcagggcatagactcggtcgccttttcgggccttctgggccttgtgtctggagggtacctgcaccgcggcggtgttcgggccgttgcccgtcatgatcccctgggccttcatctgtgcgatgcgcaccggaattctggacgctggatcggtaatcagcctgactttggcggtttggttcaggacggcggagatcgtcccgatgacgctgaaatcgcccaggacaaattggcccacagccagacgatcgttttgcccgcgattgatcaatagttcactctggccctgcccgaggtcggataggacgctggcttcgactacgaccatgcgcttccaatcgggattgctgcgcacttgctgcaggtcggcgatctgttgctcggcggcgtccaaatgagcctcgcggttggcagcgatgttcgcgagttggcggttctctaccgccagttcctcgtagctttttgcacgtccggtctccgcccgagtggcggtccgcgccgccagggtcgcaacgcgcccggccgccagcggcccacggaacatccgggcatacgccaactggagcttacctgtcacggtggcgggggtgaagagaaagatcagcccgcccagcatgaagtagacgaacaagaatcgcttcgagattttgctgccctgtcttgtcattgccgtcggtaaaccgggtgtccgagggacgccaagcccatgaggctcgcggtggggttactcccaccctcggtcattgtggtccatggtatccttccatatctcgagattctcgaggtagacgctggtgcctcgggccacgcaactgagcgggtcctcgacggtgtggaccttcaggccggtggcgttggtcaggacgacgtccagcccgcggaggcaggacccgccgccgcagatgtggataccattgtcgatcaggtcggccgccaactccggttcggccttttccagcgtcgccgtcacggcgtcgatgatggccgtgatcgggtccttcaaggcctcgcgaatctcctcgctggtgataacgatcttgcggggcaggccgctgatggtgtcccgcccggcaatttccatcgtcatttcttcacgcaggagtgccgccgagccgatggcgatcttgaccttctcagctcgggcctctccaatcaggaggttgtacgttttcttgaggtggttgatcacggcctcgtccatgtcatcgccgccgatgcgaatggattctgcggttgcgatatcggccagtgacatgatggcgacctcggtggtgcccccgccgatatcgacgatcatggaggcggtcggttcggtgatgggcaatccggcgccgatgccggcggccatcggctcatcgaccaggtagaccttgcgggcgcccgcccgctcggcgctgtcgacgacggcgcgtcgttcgacggccgtaataccgctgggaaccgcgatcacgacgcgcggacggaccaagccgccccggccgtgtactttgcggatgaaataactcagcatggcctcggtcacttcgaagtcgctgatgacgccgtctttcataggacggatagcgctgatggaaccgggggttttgcccaacatttcccgcgccaccagcccgacggcctctccgtcgttcaacacgacgttggtccctttgcgcaccgccaccacagaaggttcgttcaggacgatacctttgtcgcggacacacaccagtgtggtacaggtaccgagatcgatacccatatccatactaaacatgccgaggatcgagtccaacagcacaaccgactcctttcttacgtggctattggcgtattgtgcgtgcccagagggggtatcgtcaagaggattctgactagggcatgccaaaaatcgtcttgtattgtgcgaagcactggaaggcgacgaaggcggacgtggccaccacgacgcccagcgcgacggcgagaatcgccgtgtagagattactgggaaccgagatggctccccgtgattgcggcatcggactcatatgtcactaacctcctggtcgcgaagcgaataccgaacaggcccggtcacgagcggttcacaggttggtggtgcaggtatcacccttacgcggttcggcctggatcagatccaggacgcccacggccttatcggcgtcgacgtcgaggatgacgatgtcacagacgaactgctggccgcgggtgacatggaatttcatgtcctgcttgacgccggcggctcggccgatcgagatctcagccagcgagttcttcaggtcgagggccgtgatgcttccgttgaggccgatgtccttggcggccggaggggccggttggacgatggcacgcgtcggagtcacgggcttgggggccgcggcggccttgccgtactgttgcaggtactggttcaaccgcgtctcgagctcctggttggcctcgatcaactgcttgttcttggattcgagttgcacgacgacggccattttctccatcagcaactggttgctctccttcagctccctgtcgagccgggtctgatcggagcggagcgccacgacatcctgctgggacgcctgagcctgctgcatctggctggcctgagtctcgttggccactttaacggccgcgcccatatcggtgaccttctgtaccaattgggctctctctcgtttgaccatatccaactgagcgctcagatcggaaaccgtgattcccagctctttgatctggttttgcagttgctcctgcgccttcaggtattcggccttcgcagtgtttcggtctgtatcagccgctttgctcagggcccgagccgactggtagtcctgctggagcttgtcggcacgctctcgctggttttctgcattggcgacgtaggtgaccacgatgccgcacaggaagatggaaaagacagtcagtaagacaatcagaaccttcgtaagcgtgctcaagacaggctcctttcacgaattagcgcgttttgtgtttctgcgacacttcattctatcggacgttaggctcaccgcatttatgcataattgggagagccacatcattgccagagattacactccaacccaccgtcccgatactgctactgcgtactttaattttacgcatgaggcctaaaaaggtcaagtcatttttcccaaatagcccaaatagaatgctttatatgcggcctgccgtcgctgggtgcgagttctcggaccttgcggggctctgggtgagcccaaggtccgagaactcgcatccagcgagaagcaccccctggccgtcttatcggttagcgatagtcaggacggctttggcagcagctaggcggacggtcggagacgtttcctggagcaggtcgggcaaatgcctggccagtgtgggcgtgccaatctcggcgatggccagagcggtcagaaccctgatgcggtcggcgctctggggccccaaggtggtcaggacatgtttgtcgaagacggcctggacctcggcttcgccgatggcgtcgcccaatttgcccagttgccgggcggcggccagtcgcacttcgagcagggggtcgtcgagcatggtgatcagcgcgttcttggcctcttcggtgcccagggcgcccatggcgcgaacgccgatcatgcggtcgtcggcataggcgctgatcaggcgggtccagagcttgggatagatgcgtcggtcacccagcatggcgatcgattcggccgcctggagcaggaccttgtcggtggaatcggggcgccgcaaggtccaataaagatactgcagcgcctcctgtcggccgctttttcccagcagcagggcggcgttggcgcggacggtctggtcttcactggccaccgcgtcgcggacgattcggaagtgatcgggctgacccagcttcatcagggcataagcggccgacattctgacattcatgtcggggtcgttcagcaaggccatgacttcttctgttgccagggcgaactccaggtcgcctaccgccagggctgccagaaaacgcacgggcaccgccgggtccgggagcatgcgctggatcttgggtagtagacgcacctcgccgacggtggagattacttcgactgcgttggcccgcacacggggatcgacgtcggtcaggccttcgagcaggatctgtcgtgcttcggattgaggatcgccgaccaggggacgacgccggacggacggattcgcaaagaccgggggagcggtcgccggctgcacctgcgccggtgcttcacagccgcatatggccggcagcaacagaaggaccgatattgtgccgaatacccggagtacgtattgcatattgagactcccgcgcgtcttgatgacttcaccctctatttcgttggtgggcgtgccgacttttgcgccttgcgccgacgcacacccaggatggccggcacgaccaggaccgcgacaaaggtcactgcacaaatcgtgtccaaccactgaccgtggcgactatagaacgtcacccttgtatctatcggcattctgtcggtgaaccatccaaccatagcggttcggcgcatggcgttggcgggaaatccttcactggcggcgcggtagccgtttcgcaggcgccccgtcgagtcgatcaggcaactgatgcccgtattgacgctgcgtaggatagggagacgattctcgacggcccggaagacacaggtcgcggcgtgctggggcaattcgctggtgggtttgacgtgcggaggggcgtccaggaatcggacgaaccagccatcgttgctgatatttaccagccagtcgacgcgcttgcgtccgttttcgtccagcgcgaagttgcgggcgacataggggatcgcgtcctcgtagcagatgatgacgccgaagcggtgcgtcacaggttgcccggtcgcctcggcgacgatcggggttgcattggcgtcggccggccggattggcgtggccatctcgaaaacggtgtagtccgtcccgtgctccagcgagtaatcgtattgatactctttgggtgtgaaccgtttgagctgctggtagagccagttgcagctgcggcggaagggaatgtactcgccgaacaggaccaggtgaatcttgctgtagcggttcgggtcgcgcgtcccgtcggcgcgatagaggaaggcggagttgtagtcgcccagatagcgctcgccttgagaatcggtcaggatttcgccgccataggcgccgacgagaaggtaggcattgcctcgtgcatgctctgcgagggtcttgtggaagatcctatcttcctccggcacggattgcaggaggggccacagttccggctggagcagggcttggaccatcgtctcgggccaggcgatcagctcggcgcctgcttgcaccgcttccttgctctgggctagaagctcattaaagaggtcatcggaggcttggtagctgttcttgaccgactgggggacgttggactgcagggcggctacgatagggccttcggagacacaggtatccgtctggcggaggcgccactggccgtagaaaacggtccccactacggccccgacaaccagcgccgtccgacagagaagcgacaggctggaaggctttctcttacgggcgaaaaacgagtcgagggcttcgcaggccagaagggtaaagcccttgccctctgcctcgggttcgacggattcggccagcctgggtcgggtcgcggcgaccgccaggacaacgtccgcgaaaaaaccattgaccagggccacgacaaaggaaacgcccccgacgccgaagatgtcggcgatttggatcagcgtgatattggcatattgactgtgccccagaagtcgccagtagaatccgcccaggggaaaaccctgaagacgctcggccccgacgaccaggatgggcaaggccaatgtcagcgggatgtttcgggcccggcagaatcgcaccgccagggccaggagaggccagagcagggcgatgtagaaacacagtccgacccagcctggaatggtgatcggcgcgatccagtggaggttgaccatccagtagacgaagccgacgacccaggcgaccagcgccattgtgcggggccgaaactccggcgagcagcccagcgcgaacgaaacgaccgcgatccaggcgagaaacgaccagtccactggcggctgaatcagtgtcaacatcagggcgctgtcgaagaacggtaccgaaagcagtaatagtctcttgattctcatgggtcttcttatcgtgatacctgtcgtatttgtccccgatgttgaacggcgggtcggcgaagatctgattcgcaagcggcttggtgatatcccgcaggattacgatgcaattgcggcggattgatgttgttcttcgattccagcatggccgccattctacaggctcaagggcccttggcaagggcaatcgtccgccgacagggggcctccgccgatcgacctgacggaaagacgtgtgggaaaaagatgtaacagatgcccttttgtcccgtcctaaagagtggaaggtttggccgatatcgttgccattgggaaaagcgaggtacacgcagatggactcaggcgtctgccaaaagggaggtccaaccatgtcgaggtcctttgatgtcaagagtggtcttattgggggtctgctggcgctgctgatcttgtccgccttgggtggcgcgccgtggatggaacgtgattgccatggtcgattcgcgatgatgggccatccgggccatgcctatgtcttcgataccctcacgggacaggtttggtccatgcgggtctatgacagccagtccaccgccacagagcggaccggcgataatgaactgcgtttctacgatcccaaggtgtacgtggcgtccgatcccaatagcctcatctactgatagcgggcctctcttccgtctgaaggccctgggacactgtctgttcggtttacgtaacgggaggcgacaggcctttctcaccgtgtcaatcgcttccattgcgcttgatgtctgatgcgaatcggcttatacagagggttgattcgtactgatgaactcaaggcaaggaaggaaagtctgtgtctctgagaaggtgcattattctgggtatggccttgtatctgtccgccggcgcctcggttctggatgcgcaggtggtggccgggccgctgtcggacgtgaacattcacctgcgggggccgtttcaaaacgcgcgtctccgtttcgagagggagaagaaggggcacgtggcctttatcgggggttcgatcaccgagatgaatgggtatcgccccaaggtcatggctgtcctcggacgccgcttcccggagacggagttcacctttaccgacgccggcgtggcctcgacctgctcgaccaccggcgccttccgccttcatgacgatgtgctcagccaggggccggtcgatctgttctttgttgaattcgcggtcaatgacgatcaggatgcgcatcacgcctaccgggagtgtctccggggcatggaagggatcgtgcgccacacgaggcgccataaccctcgcgccgatatcgtcatcgtctatttcatcaatcccggcatgctcgatacgtggcaatcggggcaggcgcctctctccgtgcgcgctcacgacgaggtggccaggcactatgggatcgcaacgatcaacctggccagggaaaccgccgagcagatcaaggccgggacactgacctggaaacagtatggtggcacccaccccgggcctatcggcaacacgctttgcgcgaccatgatcgaccgtctcatgtcactggcctgggacgagccgatccccatggggtttggacctcgcgatcattcaacgccaaaggcgctggactctcacagctatttccatgggcggctgattgccccgggtaaggccgaggtcagtcgtgatatggttgtccagacgcccgattggtcgaagctcaaaggggcctgccggcagcgttttgccaaattatctctgctgtgcgccgagaaacccggcgcagaactgaccctggcgtttgaaggaaccgctgtcggcgcgtacgttctggccggacccgatgcagggatcgcaacggtgagtatcgatggcgccccggccaaggcggtcaacctgtttcacgacttcagtacgggcctgcactacccgcgcaccgtcatgttcgatgccgatctggagcctggcaagcatgtgttgcgtcttcggatcagtgacgacaaggacgcgcgcagtagcggttatgccatgcgcgttctgcatttcgtcgagaatccatccccacgcccataagttcaaacattcggcaggagatcacagagtgagagatgtctcagatgagttcgttagtgagttcgtgaatgcctgccgcgaggcagggcagcgaggattgatgcgctgtagtagtggcaacatgtctcggcgtgtggacgaagagcgcatgctggtcaccgccacgcgctgctggatgagtcgcctgacggccgatgatgtggtgctgtgccgcatcgccgacggcgccgtgctcgacgggccggacccgaccgtggagatcaacctccacgcgggcattcttctggcccggcctgacatcgatgtggtgatgcattttcaatcgccctgcgccacaaccctggcctgtcgcgacgtgagtcaggtcaactattttgtgatcccggagatagcttactatcttggggccattgggtatgttccgtacctgcctccggggtctacggaactggccgatgcggctgccgaagtcatgcgtcaacacaatctggcgatcatggccaatcatggacaggtcaccgcggcacgcgatttcgatcaagtcatccagaacgcggagttctttgaactggcgtgccggatcattcttcagggtggcgatggcgtgacgcccttgaccgaggaggctgctgacgctctcatcgctgcagggccaggcggttcacgttcaagggtctgagcttcaggccgccaatagatatcagatggagtatcaagtgaagaaggttggaatcattcgttgtcaacagaccgaggatatgtgtcccgggaccatggacttcaaggtggcctcgcaagggaagctggcctttgaacatctcggccccgtggagatcgttggatttgtcagttgcggtggatgtcccggcaagcgggcgattgcacgagcgaagttgatggtcgacagaggcgccgaggctattgtcttggcatcctgtatctcaaaggggaacccaattggctatccttgccctcactacgccaatatgagagacgcgatcatcaagaagatcggcccagagatagagatcatcgaatacacccattagacgttcttcgaaagaggcgttgggaccgttcctctggtcatcgatgcgtggtccggacatgaggcttcaattcccttgccttttccgcgtggtgcccgcacaatggccttgatcgaagcagacgcggtgcctggaatcaagcagaattgatagcgtgtgcactgcacggccgtttttcaatgtagaagtgtcttggggagttgcatcatgcacgagaatttcatgctttgtattgctcgggtcaggcggcatggactgaagtccatcctacagcttgtcgtgtgtgttacggtgttgagcgcgacgggttgttgctgcaacagagaaaacaaggtggctgcgaagagggatcacatgattatcgaccgactggaaaacgccgagcgctattacgacctgcacccgggcttcgccaaggcgtttgcctttctgaagcaaagtgacctggcccgactgccggccgagcggcatgacatcgatggcgaccgcctgttctgttcgatcagcaacgggccgggccgtccccgcaccgaggccaacttggaagcccatcgcaagtatatcgacatccagtacgttattgccgggacggaggagcagggctggaagccgaccgccgattgtcacaccgtgcacaccccctacgatgcggacaaggacatcgggttcttcaaggacccgcccgagacctggaccgaggtgccggccgggtcgttcgttatcttctttccccaggatgcccacgcccccctcgttggtgaaggccaaatccacaaagccgttctcaaggtcgccgtggagtagaatgtgaatagcgagccaacgatggtcagcgttaggactctatgaggagttgcttgacgtgattatggagtttttttttggggggggggaatggccaacgccaagcgagcaactcccgtgccgagcagcatggggtccgtccctggtggttgagatctcggccgcaagcggatagagtgttacgcgtcttctgattagggcgtgacggagaaagcacatgtcgagactacgaattctacagagaccttaagactcggatgcaaacgtgagcagaagagacagaattacgtactatgacgttgccgacatgaattacgctagtttcttcctgacgggactcagcgagaacgagaaccagcgtggctacaaattgactgtgtcaagaagactgcctcctcgccttcgcgaacgaatgatggaggggaagtgggcaaggattgtgccctccgtgtgtgtgtttgagatgaggttgatggagaaggagttctacttttgcatcgacgggcgagatagttgcaggtcggccggagatattggcatggggtatcacttgcctcttctggacgaagtgaaactctacttcaaagtcaactacaatgaagaagcaatcaggacggatcccgatctgaaggcccatgccggtaagattgttcctatggctccatgtttccccttgagaccgaggcgcttactgccgctgttgggtaaaatagttggcgggagcgtcaccacggggagcgcgcgcaatgctgcgtcgaagattaagtcgctggctcgactcccaagtctcgaggagatgcaacgatttcgaaacgtgagcaaggagattgatatattcttcgttagtacattctatggacatgcttaccaccacgcccacatggagtttcgctatgaaatcatgaaggcaataagaagccacggcaatctggcgtctgtagtggggtttaccggtgagcctacggggaaatacgcgtcgttcaaatgtgaccgattccctctgcaagattacctaaatagcttgtccagtgccaaggtggcaatatatgtgaggggattgcatgactgcctgtccttcaagatcgggcagtacttggctcttggattgccaatcgccgggcagacaatttccaacaacagaaaagcattgtatggccatgagggcttctccgaacagtttgcatttgacagcccgagggagattgtgcgccaggctgtgcaactactgggagagcccgacaaacggaaatcgctgggtgaatccaactctagaatctttgataccaagttattcccccaggcaaccgtgagcgagatgttggagtgtctgagatctgatgtgtcctaggttcgttctgatcttggccacactgacactggtgccaaagcaatggtaacgggccgggatggaatggtcctccgcgttcgtcccgttgcgcatgatactgaaagctgagtcaacggtgcgataggcagggcggcagagtcgaggtgaagtggtagcggcccgagccgatggcgaatatggcgcagtggccttcggtgcgtaggaaggtgacgtgaggggattcggatgcgagtgtctcgccttccttgacggcggcggggtccagggtcgggagacaaaccgtcgcgctcgtgttggcgggaatggtcatgtgcagcgagagcatttggtccttgcgctgccacgcgctgtggatggtcccgctggccgagtcgtgatgggccttgacccaggtcaggtcgccgacgatcttggggtgaatgacgatcttcttgaatcccacgtcggtcgggtcgtgttgaatgcccgccaggtgggcgtagaaccactgttgaatatgccccagcatgcagtggttcatcgaggcgctggtattggcgtcccacgcctcgggcagggacgtccagccgcgatcgcggatgaatccgtagctgccgagatcgtgccgattggcaatgtcgaacaggacgtcgctgcgcccatgctcagccagagcctggacgagataggaaaagccgatatcgccggcggtttgttgatggttccgggtctggatgtcggccaccagacgctcgaccacggccggtatgtattcgggaggaaccagatcggtcaccagtgccatggcgctggaggtctgggggctgccctggttctcgtattcgtctcggtcgttgaaataggtggcattgaacttctgtctgatctgcttggccaaggcggtgtaagcggtctggtcctggtcttgtctcagcaattcggctgtttcggttacgatccgcgtgcagcgataaaacgtgaccatggcggtcagttcaggcggggtgaagcgcgccgggccgttgccctggccatgtccatagtcgtaccagtcgcccagacccgcctgcgggatcagatctttggatgtgtcgcgcatgtagtcgacgaaatgcttcatcgtcgcgtagttgtcctccaggattctccggtcgccgtaccgatgatagatctgccagggtagaatcacccccgcggcgccccattccggtgtgtagcgaaaaccgccgctgaacgcggggtagttgggggccaccgtgtagatagcgccgtcggtgccctgcgagtcgcggatgtcacgagtgacctttgcatagaaacaggcgatgtcgtaccggcatgcgattgagggctccatcaggtaacttacttcgagccagcccagtttttctcggtgagggcaatcggtcaggacatgtcccatgttgctgcgcaccgcccagtcgaccaggcgatggatgtcattgaacagggggttcgagcaggcgaacgacccgacggtggggcaggcgctgcgcacgtggcgggaaaccagttcctcgactaccggcaatccatctggattggattgcccctgaggaacggcgccggtgagctccaggtactgaaatccactataggtgaattggggcgaccagacctcggcgtcttggccgcgcagagtgtactcccaatagttgggtttccccacccccgcctggttgactcgacctcgcccatcgttggtgcgttcggtttggccgaagcgctgctcggccggcgtcaggcggagggtttgtcctggtctgccgcgtacctgtagatgaggaacggccgacgcgttctggccgaaatcgtagacgtacacgcccggttcgggctggtcgatccggacgggctcgaacacttcgtacgtcttcatcggaggggctggggacgcgatcaattttcctcctggtccctcggtgacctgcgctgtcgaccagtgtgaatcatcgaatccaggctcggcccagccgttcgccaagcggcgcgcgtcgtagtcgctgcccccgagtatcgcacagtgcgtgatcggtccatccgtcacacgccacgaatcgtccgtgacaagcttctgcctggcaccgtcggccaattcgatgtgggcctggaggatgaccttgggccggtgttgtacactgacgccatgaacacggcggtcgccgaccgtgttgtagaagcccttgcccagcatgaccccgatggcgttggcgccgcgattgagatcggccgtgacatcgtaggttgtgtaataagcggttttgccataaaccgaccatgccggatcgaggaatcgattgcccgccttgcgaccgttgacaaacaactcatgctggcccagaccgcaaatgtaaaccagggcgcgccgaaccggttggttcacggtaaacgccttgcgaaagatgggaagtccgcgtgacgtggccttgtcggacggattactcgaatccgccgggtgcaggatccaccgcgcgtgccagtcggccggttgcagtaggcccatggtccaggtcgccggtgtgctccaggctgaagacgcgccatccccgtcccagacccgcaccttccagtacacctgctgagaggagatgagcggttcacctccataggcgatcagatgcatctgcgagccggtcactctgcccgagttccacagatcggttgctgcttccgtcaatgcctcgatcgacgtggccgctaaaacctgataggcggcttggatctggccccgctcggtcgattgcagggtccaactcagtcgcggccgcgccgaatccacatccaatggattcgggcgatgttcgcatcgcagcccgttcaccaccagattcgcctcggcagcagcgccggtgaccagaagtgacagacagaacgcgagccgaacacctcgccacctggaaagcagcatcatatttcgtgcctctcaaacgatatcagatcacgattcgttactgggcgggacggggacaggcgtctacgaactggagcgattcttcgatcaggatctcgccggtgttctcgcccagagacgtccgcgtgatatactcgtaacgctcgaagctgtcccagtcgaccttggccaggatgtatccgaaggcgtcgttggtcaggccgaacaggaagttgtgttgcccgtgcatcttgcgtttgaggtaatacccgatattgggcatcgcttcgcccgggatggtcagcatctgagcgttggccaaattcacgacgtttagacgcgtctggatgttgtttttgctgtccagggcgaaacccaagggcgacaattggaccacctgtcggagcatctggttctccaccggaagcgtgacggtcttgctgtggcaggacaacttcgggttactctggattggagcgctgccggcgatgcgcagcgcctcgtcggccagacgatggccaatgcggatgcactcgtcccacgtttgaatgtccttgccgttgggaccgcgacagtcggccgtgaccatgccccccagggcgctgttcatgaagattccgacgccgcctccttgtgcctcgatccgctcatatagcggtcccacaaaatccgggcagaggatgccctggtcggccccgatcacttccggatggcaggcgtagttgacgagggtcgccaccgcgttgtgctctgagtcgagaacctggatgacatgacagcgcgggtcgtaaagccgttcggcgtagtagttgtacgcgatcttgccctgggcccggtcggtcgcgatgcggaccaccaccggttgtagcttgcccactgcctcgttgatcgcctcggccagtttcttgcagacgtcgtcgaggtagtccaggtcgcaattggctttgcccgttccgtcggggaacccataacagtcgggaccgctgtggttgtgcgtggccccgatcaggatattctcggccgggatgccgggcacctgcctgtggaccttctcacacagcacgcccgggaagcccaggaaatccgtgctgcagattgcgacgcgtgtgccatcctgttcgagcacgagcgcacggacgtttaaccgtccaatcgttctggtcgcggtgtgggaagggccgaccccgccggaaacaggcagcggcttctcaggtgtcacgtcacgaactgcgatcgctgcgcgaaacgctccgaacacaggacccgcacagagtacgctcactagcacggctgcaaaaagaactgtcttggcgactcgccggaactgttcggtcataatcctattctcccaagcacgatgatccctgacattgtggctccgcaccgttaaggttaggttcctcagaactggtccttgagcgggatcatccacttgggccagtcggtcgactgtacgccgcctggtttcgtccagggcccgttggtgtcaaaggatttgctccacttcagggtccacagttgcttcagcgcgattttgcgcacggaccagtcggcgaagaggacgaactgggcgccgccgtggcgattgacacagagtgttcgcatctcctgaccgcctatgatcggtgtttggtggccttgcgccggaggttcgtcggtgtctcgaggccagccgtccacccaccagctttcggtgaagaccggaaccctataggcgcccttgatctggtacgtccgccagtaatcgttgatcggtccccgtccccagaggtcggacaggccgggcctggggttacacatccagccgttggggccataactgcccacgtcgccgccatgggagacggggacgcgccaggcgtcgaacggttcgctggcaagggccatggcgtcttccgaggcgccgcttcggtgtttccgggccgttgggcacagccacatctttttgtccttcgagagcggtcgcatacattcccgccaccagtctccatgggcgacatctcttccaaagctcagcaattgtccgctgtagaagttgccgttattgtcatcgcagtacatcgagaagatcagaccccattggtgcaggttggatttacagcccacgccgcgcgcctgacgccgcacccgctccagggcgggcatgagaatgcccatcagcagggcgatgatggctattacgaccagaagctctatcagggtaaaaccgctttgttttcgcatcgtcacactcctatcatagattccgctgaaagcttcatagaccctatgatagcctaacgaggcatgacaatgcaagtgatctgagcggttgaggtcaactggccaggatcatgccgatgatggcgagtgtcccggagatcaacatactgatcaggttgtcgttattctgttccatctgagcactctttcgactccttttctctgagagtgctatgcgcggaggttccacggagttctgcgaaaatataggatttgtgagcgttggatggattcgtacggaaggttggggccagacgtatcgaaacgggggggcgcaagaaaaaagggacgcccatgcctggcatggacgtcccttcggggtcagtcgatatgggtgggattcgtcagagtttctccttcgaatcgcccggtgcggccgggtctttcttgtcgtcaaccggctcactcggtccagtgagatccaccgatgccttggtgtcatcgcacggctccggtacggtgaagagcatgaacgacatgtcctcactgacgccggtctggtcgtagagttcggtccactgccacgtggcggtgaggctgtcggtgcgcggctctgtcgccacggcgtcgtcgttgcgtcccgctccaaccagggtcaggacatcctcggcgcccagcgtgatgccgaagatacgcacatcgtccagcagtccgttgaggaactctgcgttctcatccccgcaaccgccgatgatcagcgtcgcctggaccggtgcgacgaaaccgcccgtattcgtggcggtcgcatcgaggacaccgttgatgtagagcttcatctgacgtgtgccgccgtcgaacgtggcgaccaggttgtgccactggttcgccaggaggctctgcgtcgtctgccaggtgttcaggcccacgcggaagtggaagcggccctgggggtcgatccacagaccgaagcgattgccattggcgcttgtcctgtcgtactccatgatggcctgccagccgcccttggtctgtcgggggttgacccaggccgagacggagaaggagccgggggccaggtcgaggcccttgggcttattgaccttgatgtagtcgcggtagccgtcgagattgagggccccgccgagatagccggcgccgggctgccagagaggattacccagcagggcgccgtcgttgttattgcccgagctgtcggatgccgtggtgccgctggactcgtccagtttccagtgggccaggacatcagctccggacaggtcccacagtttctggggatggttggtccagccccagggataggcgatcgtctggggatcttcatagaccgccacgacgctaagccagtagacgtcgcgggcgttcctctggcagaaccattcctcctgtggcaggcgaacggtgtagcgatataccggttcgtggccttgcgtcactgaactggtgatctgaggatgcttgtcgaagccgaccaggacctcgtcgaaatcatcgacgcggtactcccagattttctgggccggataactgaacgtggccgggttggccggtgtcgggtccggcgcgtccgcccagatcgacagcaggaagtagtcgggcgcggtcggtggcgccatctgcgtgcactcgcacgctcggtaggcatagccgatgtaggagccccaccaggacaggccggtgatcggcgtcgggctggtgcactgccagtcgtcggcgacgagtcggcggtaggtcaggccggagcccgccttttcggtctcgatctcgaaagccaggtcggccgatcgtgaggcggacggatgccctttcgggaatcgcaactcgccccaattgccgccggcataaggttcctctgccagcacccacacggcgtcgtcgttccagtggtcggccgaagccttccatccgaagcgggtcgctgtgctgcccggagcgtggatgaggtaggcctgagcgcacagccagtagacctttggctggctgggcgaaccggtttgctcgaaggcctcgtgggcgtcgatctggaagttgtacttgtacatggccaggtggttgttctgctcgaaggcctcgttgcacgggctgtagaagctctgagtccgcgcctcttgcggctgggccgtgaattcgcccggtttgaagtctttgcgccacagcacctcacccggcatgctgtaacccgtctggctgcgatcggccgagatgtcggcgcgaatgctgagggtgaatgtcacgtcctcggcgttgttgttgggcagaagatcgtggtaccacgcgccccagagcgagatgcccgtgatggggccgctcgtggtgcactggaaatcatcgccggcgatctgctcggaccatgtgggcgggatgtctttggtgatgtcgaccgccatgccgttagtgctgatgtccgggctctgcgtccacttggcccccggcgtcgatccgctggttgccagcgactcttcgtcctcgtagtgggcccagtgacgcaggcccgtgaagggctgctcccacttgatgaaatcgggatcggtgtccagttcgaaggccatgtcgtacatgtccagtcgttcgcagatgagcgaattggtgatcggctggaccagtccggggtcggccatgatgcccggccgtagttcgttcttgcggaattcgaaaccgatcgccccgtccatccatggctggggacgcgtcttccaaccccacgcgtaatcgggctcgggatatccggtgtagaccgcggtgatgctgatccagaagacgttgtcttccgtgttcttgtcactgtaggcaccctgccagaaatactcctgttcgtcgagatcgagcaggtattggaagcaggtgtccgagggcttgccggggaactcatcgagcccgacgcgttcgatttcgacgcggctggcggtggcgctgacgacccacagcaattggccgggccgactgaacgcgtatggtccgccggccgggacgttgctccagaatccgatgcgccaggacgcgggcttggtttgcggcggcgcgtcggcgttccatcccaaatacgagccccaccagtggacggatgtcacgggcatggcgccggcgcaacggaaattgtcggcgacgagtctccagttgctccacgcatagtccgaggcccgactggtgaaggccggttcgtcccatccgcagtagaccggtacgttcgaacccggcaaccattccagcggcggttgggaccatttcagatgctcgaccggtggcttgctcggtatgaaaacgtcctcaatgctcacctgatggtcttccacctcaccgtccggggccggaccggtatagtcgagaccgcgcatcgtgctgaagcgccaccgcgagaatgtcttcgtggacgcggcgccggccggtacgttgaacgtcagggtgttgacccctgaagccagcggtcgatcgatgaagatctgctcgcccgcatcgtcccagtcgttgtcgctgttgaaatcgatccaggcgttgagcacgccggtggtggaggcagtgacctcgacggtggctttgctgcccggggccaggacggagacgaagacgacgccgtcctcatcgtcgttgctatcgctgtcgtcgccggtagccgtgatgtccggctgcccgtccgggtcggcgtcgacaccgcggccgagatagacgcggggctcgatcatgtggcgggcgccgtcactgatgtgcagcgtcggataaggtcgatccggggcgtcgccgaaatccatatccaccgggggcggtcccgtgatgaccagcgagagatccaacggctgactctcgtacgcatgccccccgggataggccatgggcatccacccgagggtgggatgcagccagacggcgctgtcgttccattgcagttgccgctcggaggttttccacccgaacacgtagctggtgtcctggctcgggacctctttgatttcgagccagtacgtggtgccgagtttctggacgaagagttcttcttcggcctcgtcgaagcagatgttgtattggtaggcccgtttgtgattctcgggctcgtagaatttgctggccggatcgaaccagccttcgggaatgttgttggtcacttgtgtcacatcatagctgaacggcaggatctcccgggtccagagaagcactccggggcggctccacgggatcaggttgtccgccggtcggtctgaatagatgttgatctcaaaccgcaggctgtcgacccccttgaccggcgtgatgtcgtcgaggaacgaggcccagaaatggacgtccaggatcggaccggtctcggcgcaacggaaatcctcggccaggctggtccagtacatgtccacgtccatgcccgtcgagcgcaggtcgggcaactgcggccagtgcatcttgtgcgggtccttctcctgccagtcgcagaagaccaggggttccttgacgtggaggagatagtcttcggtttcgccgtcgccgaagacgccgtcaccgttccagtcttccggcacgggtcgttcggtgatcgagaggcgagcccagacgtagccgccgaagggacccagcttgaaactcggaggggtcaaggccgacagcggaccgtcgtaaccgttgggtacagggaagttgaccaggacgtgctcggggctgtccccctcgggacatggcacggcgccctgccatttcccgtcctggttccaatcgaccaggaggtttacgtaggcgtcccgtacgatcggcagccggttgtgaacctcgatatcgatatgattgccccagagggcggtcaggcaggcgttgggcagcgattcgaaaccgctgaagatcaggggccagacctcttcggagccgacggctcccttgatcgtataggcgcgtggtttgagcaagcccgcatccccgtcctgctgttcctcgtcgaggttgtaggtgttgggattgaaggccggacaagccccggcgttgccttcgagttcgatatccaccttgggtccgaagtagaggtagttcgtgtcgtgctcgatccaggcggccggcccgacgccgacgcatgtggggaacaggccgactacgccggaggccggataggccagcgccccttcgggcgcatcgccgaagtctcgttctccgagggggccggtcgggtcgtccttctccatgcactcgtgtcgaatacggccctcaacgctcacattcgagccgcggatgtcgattgaaacccaagccgggcagaatccctctatctcgtgggaggtgttgatgaagatggattgctggacatcgcgtcgcggtacgacgatgtgccgttcgatcaactggttttcgtggctcaggttgatgatatcatacggtagcgggggagcggggtcccctgggtcggaagaccactggcccgtcgtccagttcaaggcgacctcgacggaactgccggttgccgcggccggattgaggacgcggaaagtcaggtccacctcaatgactttgcgacgcgtgctgtcgtagcggccattgaagaaccactgattccaccagtctgtctgggggtagtagaaccaccctccctggtcgaatccggtgccttgaccggcgacgaagtgcccggccgaatcgatgtccaccgagaacacgtcttcgaccgccccggccgagccgacgcccaggcccagcgccaggatcatgaccgcgacaacataccttgaaaaccttaccttgaacccgctcatggcatacacctcccaaaaaatgaccttacgcaaagccagcgcaaccacccgtcggggacgagcgatttgactgcacacttacagcgcgttgattactttatagttccactgtgcaatcgacttgtaacggtatttcctccaacaaaaagcaggtaacggacgttaaaatcaccaccactccctctcctaatgtcatcccgagcccaatctagacgcagtgcggcattatttggggttcaaggccgactttatagggcggtgtttttcccggacctgttgtctcagcgggttatcgggcgtgttttgccgtcccaatgcacgtttgaaccggtatcgcagccaccagtccgggcagggcgcaattctcgtttttccgggaccttgccgacgtgaaaacgggctgatttcgacaacatcgccgataatatcccctatttcagggccctgtcgtgggccggaaacggacggtaacggcatgaacgaccgtgttttgtgtgtgtttcgcttgtacgttagtgatagcaggctgtgtttgttgtgtaatatgcctaatttgcctggggctgggcgatttagtcaaaaagaggggctttactcgagggcggcgcgggattataattccggcattagtcctcggcggcgccattgctgagggtaagaagggaattgcggcatgcaaaacatggaggtcctcacgaccaggaatccacaagcagtctcggccagggcgggcggccccgcaaggatcgctgcgctttctcgatgtgcgtgcaaaggcctggcccatccagcggaaagggtatgagtatgcagacaatcaagacgacgaccccagggtccgactcggacacgagcacgtcatcgaccaagctgcacccactctcgaatcggatcgtcaagtggtatatgaacctgccggtcgatgcgaagttggcggtggtgctgtttcaagagatgttgcgggccgagaagcagatgccggatcgctacttgggcgaggatatccgcagcaaactgagcaatcagatgaaggatgagaccatctcggaggatcgcggcgaggtctcgctgatgcacggcctgttcctgatgatgcagggctgggacacctagatcgggcccgtcgatgggggccgcctgaacaagccccctttttccgttgcatcgaaaggctacggcttttcgtcgagccagtcggaggccgccagcgcgagattatgcaggtccagagcggccttcacgtctccgttgtccggttcaggtttctgctcggtatcgagtgcgccatacgtggtcagttggaaggccatatcccaggggacgccgctgccgtcttcgacggggaagccttgtagccactgatcgccctcgaccgggggccacggtcccggcgtgacttcctggatccaggtgcccgtctcgctgaactgatgcgttcgcgtcagccagccccacgtgtggttggcgcccggccccttcgtgtcgtagatagcggcgatgctgatccagtagaatggctgctcgccgtctttggacgtcggctcgaggggcggatggaaccactggttctgtgagagcggacaactgaactggaagcacgtttcgcccaaccccgcgtccttgccggcttcctgatagcctgcgatggcccaggtccaggcggtgcaatagttttcccagatcaggacgcctgggtggccgaacgtgtcgagagggcccgacccggcatgggggacgtccgtccagatgccgatgtggaagcccagcggctgtaccggcggcaggtgggatgccgtccagttgtggaacgcgccccaccagtgtatcccggtgacaggctggccggcttcgagttggaaatcatcggctgcgatctgatggaggcccagcgccgacagggcggtgacgccgtcgaagagatacggggtcgtcagggcaatcgccgccggtggctggttccattgcagggcggtgacaccagaggtcgggtaaggctcgaagtgccgggtgatctggacggcgtagtcttcgacttcaccgtcggaggccgggccgtcgtagctgagcaagccacgcgaattgaagcggaatcgcgcgaaggtggtgccgaccagggcctcttccgggacggcgaaggtcagggtcttggcgccggttgtcaggagggcgtcggcgaatatctgctcgttcggaccgtcaaagctgccgtccccgtcgaaatcgatccacgcgttgagatagcccagggtcgaggcgacgacctggacgctggcggattcgccgggctccagtagggaggtgaatgtcacgccatcctcgtcggcgccgttgttgtcatccccggttgccgtcgcatcgggctggccgtcgatttcgctatcgacgcttctgcccagaaagatgccggagaccatcgtgtgccgcgctccgttgtcggccaggagcgtggggtagtccggcgcgtcgccgaagtccgacgagctggactgcttgatgcagtcggcgcaggtgcggccctcgcccagggcgacgtaagaatcgacacagtcgcctccgaaggtgacgtagcaatcccccgtggaccaacggcaacagatccggtatcccggatcgccgtcgtccgggtcgccgcccggctcggtgccgtccttgggttggcactcgtgccacgcgccgcgatagatacgcgcattgcggccgatgatatcgatggagatccattcggggttgtatccctggatcgtgtagccgcggaccggctcaatactctcgaagttgcccagattctccaccagatagaaatggtggtcggacatgtacgtgacttcctcaaccatggtcgggacgtcggtgggcaggggaggagagcccgtatccagggccgaccattccggtgtggtccagttgtagtggatctccacatacgacgtcttgctcgggtccaccggcatgatataggcctcgaaattgagataccccttccggtccggatcgtagacgccgttgttgaaccacatgcggtagcgatcgacggtggggtagtagtaccagcccaggccgtcgccgtcgcccatgatgcggttgccgtcgtcgtcgaaggcgatgcgataccagacccccggatagtggctcgggtcttcgatttgggcctggaggggtgaggatgataccgtcagggcgatcaacagggcccacgtcaagaggaatccggatctcgggcgattcatgttcacactcctgtgccaaggtttcgtgcgcgcgcaaagacgctcttctcttcctgagtgattcgtgcgccgatgtccctctcggcgatgcaccggcgcctcgaccactgatgtatgccatcgacagcgccggcttttgggtccagcaaaaagcgcggaaatgcggcgaaaaacgcgtcaccgacctccgaaaagaccccctgaacaactccctataccctatcagaaacgcccactggattcaatgaggaaattatcggaccggttttccggcgatgttcgggcgctcatccccgccccggcgaccccggatacgccggggcgggggcggattgttcctcacattgcctcgtcgaactcgtcccggtaacgggcgactccgccggcgcgtgatttgagggacgtctcgaagaagaggatcaggaaggcctcgtccggcacacaccctcccactggctccggaggtggtaggcgcaggcgcgctcgaagccaaagcgggggtagtattccggatgtccgagcacgatgacgaaggggcatgaccgctcggccagcagatcgatcccacgcttgaccagggccgagccaatgccctgacgctgtcgtccgggctgcaccgccatgggcgccaggcccataccttcgaccagtccctggtcggtctcgatggtcgccgggctgaagagaatgtgcccaacaatctccccctcgtccagggcgacgggcgaaagcacgccggggcagtttgcccggatcttctcaacgatgttcgcctcttcgggctgcccgaacgcctgctcgttgatcgttcgcaccgccggcgcgtcttctggcaattcctcgcgaatcacaatcattcgcagctcacctctgttccctagtttcctgagacgatgtaatagcgcgcccctttgcttgtttcgagaacgtccagacgcatagtcaggttgtggattccatgggtctcgaagtaacctgtccccgcgtagggaaccgtcttcccgtcaggggcgggttccccaaagacgtataccgtattcccgtcgtttttgcagatctcagcccagtttagcgaggccgtcccgggccataggatatgcatttcatcgtagtctttcttcatccgcgcgttccagaaggcttcacatacccctttgggtgactcgggccaatgttctcgcttccctatcaggtcgaaggcctgggctcttgcctgcgcaaatgggtctgtcacgcttggcggggtgacgctattgttggtgcccgtcattctcagcaagatgagaactccaacggacaggcagacacaggcgacgctggcgagaaacatggctgtctggggcttcatcttcatgatacacctctcagtctggaggatagagggggcttcaccgatgcggttaatccgttgggctgaaggacgtaaggaacagttctttggccttgtcgaggccctcttcgctcatcgctacggatttggccttgcccttggggtcggagatgtagcctttctgatgcaggcgattcatggtctcccagtcgaagctcttccaggcccgcgcacctgagcctttgtgttgttcccacgtcaccagataaagaagcgccaacgtgtagtcgtcaaccttgtcactgtcatagtccatcattggtcctttcgtcgcccaggatggttgccaatgacttgcgaaatacggtggcctgacgcatcatgcccacatcgttgggatgaacgccgtcgaccgtgccgtcaccgtcggttcccagcatgttctcattggataggaaatgcaggttcgtgatcccttgggatttcagctcttcgtagatcgtccgaacgatggcccctttctcggtcggtgtcgtattgctgacactggaatcctcggcgagcaagatgggcgtattcgggtgagcctgacgcagtttcttgatgaagggctcgacgcgttcggcgaccatctccgaagtcatgttccagaggcagtccaggacgtagaccgccgggtctagctcggccaggaggttggccatcgccggctccatcttgccattcccggagaaaccgaggttgatcaccggaacgtcgagctgccgttgcacgatggctgtacacgccatgcccgggcgggaggcgcatccgccttgagtgatggatgtgccgtagaagacgatcggcgtgctgtgtttgtggaaggaccttaccggcctcgaaagggcattgtcctttgggattcctatctctatggtcttcacgccattgtacagcggaagatagagcatgcattccgtctgctgtgtcaccgcgaacgaggcttcattcgacaccccgagcggtcgaccgttcttgcgaaagacccacgcgccgtccttgttcctggtatacaggtcgattccgctgacgcccgtggcgggcatgtggggcatggcaaggtttcccttgcgaagggtccagcgaatcttgacagactttgcatccgtcgcgaagtagacgcacatcccggccgaatggtggctcagactccaaaccgggggccgaaccgtctccttggccttggcgggcagacgatcgtagtacgattcggtctcctcccagcccttgccctcgattgcgagcagttggccgtcgtaccacaccgtgttgtcacaagggtcctgcacgccccggcgcgggtcgattctctcgacagcagcggcgccgagcgtaagcggtagaagcagagctgccagcaggcaatgaatcggtctcactgtcgtttcctccaagtcaaacaaacgaactccaaagcgtttctcgcgaagccatcgcgcctcacttccgtttctctatggggaccgcctcattggctgaagcccccgaggttctgtctgtgcgcgggccattcggcaaaggcaatgtagaaaggtagaacgatgttcgcgatggggacgagcatgagcaatgacagggcccccgggaagcccgccttcgtgcaaatcttccagaacggaagcacgttcaacaggatcacaacaggaaatattcccgcgatcacgagcatttcataaaatcccggcatggtatttcctttctccgcttcaagcctatgtctcagttgtcacgggtgttgcgcatgcaacaccctgctcctacggcgtcatgttacacggaaccggtctgcaacgccacgatgatacgtccgatgcggagcatctgcaaatggctttccgtgtcaaatggcgatgtgaacgggcgtgatgttgagggccttgggcatgtcgttgggatcgatacggacgagcaggccgcgatgacccgcgttgatatagatgcagtccagatcgaaaatgctttgctcagcgtagacgttcatggcccgccgggttccgaagggactggtcccgcccacctggtagccactatggcggtcggcgaccttcggttcacacgacgcgaccgatttgactttcaaggcccgcgccagttgcttggtcgagacctcgcagtcaccatgcatcaacacgatcagcgggtccctggtattcgtctccatgaccagggtcttgattaccgcgtgctcgtccacccccagttcggccgaagaaacaccggtcccgcctttgtcgacgtagcggtacgtgaagacttcgaacgggatgccatgcttgagcaggcaacggatggcgttcgtcttgggataatctttctttgccataacggaatcaatcgcgtgcggtctgcacgttgccttgccgttcctccagaatcactctgaggggaccggaatctcaacgttttcagagacgggatagcccaagcaaggctcgccttcgacattccatgtgaagcgttgcatgcgggtgttgcggttccacccggcgccctgatgcttggcggcgtgatagacgatccaatcttctctgccgtcggggctcttggtgaagcaggcgtggcccgggccaaacaccgtttttgttgagctgaagacaggcgtttcctttttcttccatgcctcggggtccagcgggtcttgtcccaccagcttcaattgaccgaggcaatagtcgtcggtccagcttccactggccgaatagatgacaaagatgtcgccattgtgcttcaggacttccggcccttcgttgatgaggggacgacctattctttcccaatcgtgctcgggttcggagatgagcgagcgcggcccgtcaatcgacaggggattcttcatggatgcgatgtacaggttctgccgcacgttcgcatcaccttcccagcccgaccagatgaagtatagttgcccttgatagtccaataccgtcccatcaatggcccacttgtccgatgggtcggtgatcttgcctttgaggatgtaggggccggcgggatcggccgtggcgttctgaagcacgtacatgcgatgattctcattcttgccgtcatcggcggccacgtagatgtaccactgccctgcgagcttgtgcagttcaggggcccacaattccctggagtaggcctgcccgggttcgggacgccagacccgcttgccggtgaattggacggcctcttgaatcgtccggctgcggttgacccaaatgcatccctggtgagaatagcagtagtaatagaagccgctgtcctggatgatccacggatcgtgaccgtcgggggcgacgggattggtcagagtgcggggggcgcctgtcgcgatacttgtcccgcacagaccggctgccgtcagtagagcaatcacgagcattctaccgtgttggatcatgaagtcctttccgaatctctggctgtggcaatcaacgaacagacatgataacgcgtcccggccgaattgcaacgaccgcccacgccactcgttcgccagcgggcgtgggtcgatgaaaatcgcgtccgtttcgttgcggtcgtgaacaggccggttataatcgccgtacggcaggggaatggaaaggatcgaaatttggatgtagagcctttagcagtaaagcggttgcccatccggctggccgccgacccggcgctgacgattactcggctgttctgggccggtcccgagcgggcccgcaaggtgatcgaccgcgttctggcgctggacgaggaccaggtggcgcgcctgctggcttcgaccatgcgggacttcgaccacctgcacatcgacctggaggacatctttctcgaacactacgagcaggtctcgcaacggatccagatgccgactccgccgacggtcaagagaatggtgctcatcggcgcctactttaccctggaatacgcctttgcctcctcggccttgttcaacccgtccatggcgcccgccatcggtcaggaggatctggaaccggggtctctacgcttcgccatgagcctgcgggcggtcggcgagggccatctcagttcggtggtgtttcgtcggggagtgatcgattcggccggtgatatcatgatggaaccgaccgggctgtttcacgagccctcgcgacgagtcaggaaccgtcagtttagcaaggccaagtttcgtatcaggctggcccagatggggatgcgtgacgcgatcctggaccctctgttggagcgactggacgatccgttcacgttccaggacctgctgcacatcgtcgatcgggttcagacgcaaaccgaagcggcctcggcgcacgatcacgaagcccacggcttcgaatggctcggcgcctgtgattacgatatcgagagcgcagccggcgccgacatcaccgaactggtgctcttcccgatcagcgaggccgaatcccggggtatggaggacatgcgcctggtgcgttttgtcgacgacgacgggtcgccgcgctactacgggacctacacggccttcaacggtcacgagatcctgccccagatgatcgagatgccccgtccggggctggcccatgtccgcacgctgggcggccgctgcgcccggaacaaggggctggcgttgttcccgcgccgggtccagggccggtacatgatgagcggccgcatcgatggtgagaatctctacatcctcaagtccaacaacatcctgctctgggacgaggcggtactggtccaggagccccagttcccgtgggagttcatgcagatcggcaattgcggctcgcccatcgagaccgaggccggctggctgctcctgacccacggggtcgggcccctgcgccactattgcatcggcgcgacgctgttggatcgcgaggatcccacaaagctgatcggccggctcgaacgaccgctgctgatccccgaggccgacgaacgcagcggctacgtccccaacgttgtctactcctgcggcggactcgtccacaacggtatcctcgtcatcccctacggcatcagcgacgccgccaccgggttcgccaccgtccccctcgacgatctcctcgcccgactcgcctgaccgcgagacgctactgctctgcgaaatccatttgggtgggctgtcctgccgagaacgtcgcccatttactgcccaggttgtccccggaagactcttcgaggtacaccatgcgccggcctaccggcaatcctgtcggttgcgaaatccacctgggtggcctgtcccgccgagaacgtcgcccatttactgctcaggtcgtccccggaagatgatttgaggtataccatgcattggcctatcggtaattccgacaacttgtagcatccgttttcatcggtcttcgtgctccgcctgacgacgggacaatagctgtgctgcaacttgacgtcgtcatcgtgggtttttctcacctcgacgcgcagccccggtctcggcaggccctgtttgtcgacgacgaccccaaaggcgctggcggccgccggcaagacgatctgggtcggcgcgtcatcggcggtctccaactcgctccacgggccccagtgtggcgcgaagcccggcgcggtcacgtagagatactcttgatcgtcgcttaccccggaaatgacaaagacccccgatgcgtcggttgcaaacttttgccaatgagccggttctcgacgctcgctcaatgcgactgtggcgccctcgatcgggttgccctgtgcgtcaaccacgacgcctgcaatcagggtcgccgtcttgagtcggaacaccgtccgattcgggtccggcgatatgggctgtaccgctacagggtccagcaccagcgcatcgtagccttgggcgagcaccgtcattcggtatgttgcgccgatggggaaatcttcctcctcgccggtgtcgaagaagccttgcgatgattggaagatgaccccttgccgattccacagcgctctgtagccgtacgttggttcgtccaccttcgtagcgctcagcttcaccatgaacttagtgatcggttcaccggtcgcatcggccaggaccttcccatagatgcgcccggcccgacgtacgacgacgatatactcgcctttgccgagttcgaatctttggatttcgccggagataccgccaccgaacggattaagacgaatcgtaccttcacttggggcgttggggatgatgaaccatccctcggcgtcactgacgtaccgcttgtcgtcgaggtttgaagcgtcgtcgtattcgtgaatcgccactttcacacccggcacaggctcgttcgcgtcatcgacgatccgcccatgcagcggcacgcccacgtcaagctgaatgtcgatttgcgcttcgcttgcatcttccaacagctcgaggcgctgtacgtgcagggcatggctcgaatgcacggcccagagagtcagtttgccctgatccacgttctccaaccgataccagccttcggcgtccgtcttgctcgtgaggcagttccacatacaccgggaattggtattgccgactgtcaccccggccaggggccggccgttcggatcggtgacgcacccgtaaatgttcactcctggcttgagaatcacgtcctgatggactgtctggcccgcggcgcccggtgagaaccgctgtgacacggcgggatagtccggatgggtcgcgtgcagagaatacgtgcccacgaccgggctgagaccgtcaatctcaaagcggccatccgctcccgtgacggcggggcggttcgtgaagaagaacgtttcgaccgtcgccccggcaatgggattgccttcgggattggtgactctgcccgccagacgtgagccgcgatccagttcgaccaggatcccttcagtcacctgacctcggacgataggagtgacgattcgctgcgatacataaccgtgggcgatgacgcagacgtagctgcgctgcatcgggtaaaggcctgtgaggagaaaccggcctgacgcatcggtttcggcgtgggtgttggaatcggacacttggtatccgacccgcactccggcgatgggcttctgggtcagcttgtccagcaccatgccggcgatgccggtgacaggctcctgcggagtggttggttccgttggaaggacactgggcttggcagcgggtgcgttgggctcggtggtctcgatctgttccggttccgcctcggccagtcgctcccggatggcgtcgatggccttttggaaggggttggcgttggggtcgccttgccactgggttgcgaagggttggagggctgcaatggcggacgcgtcgccgatttggcccaggtactcggcgatctttgtttgagtctcgttcgtgcctctctggagtagggacaccagccccgcgatatcgccttgctcgtagagggtccgggccagggccagttcgtcttggacgcgatctctgtctttttccggctcgacgaccggcctgtcttccacggcggtcggttccggcgccggttgtggtgcttcgcgaccgatgaggtggttggccaggatgaagatgccggcaatcagtgccgcggcgaccgccagttttgtaatcggacttctcatgatccgtctcccgaactcgatcacggcgggcagtcccgcatgcgatggagttctccgctgcgctcgccgggccagcgacgccaaggcctgggcgtgggcgctttgccacgcggcaaagtccggcctgggcggttcgcctggaaccgttctggcgatggcgtcgtccagccaattggcctgttcgggacgtttcatgatggctgtccttcaggatacccgtttttcttgagcgtccgttcgatctttcttctggcgcgaaagagtcggcctcgcaccgtatggcccgcgatacccagcgtcgtggcgatctggcgatagtccatcccattgtagtagtgcaggacgacgatttcacggtacatcggcgccagttgatcgaccgccgccttgaccagatccaggtccgaaccctccgtctgcgacggatcggcgcaggccgtctccatcggcggtggtggggcggatcggtggcgatcgcgaatcaactgatgggcttcgttccgacagatgcgcgccagccacggcctgaaccgatcgatacgcttcagatcgctcagcttctcacaagccttgacgaacgcctgctgagcggcgtcttcggcttgggttcggtccagaagaatcgagtaggccagccagaccatcgtcgcgtaatgacgctcgtagagcgccccgaaggacgcggcgtcgccccggcgagctgattcaacaatttgtgtttccgtttcccgttccaacgttcggtcaacctgtaggcccactcactgatcagtgacactctatagatacacgggccgcgcgaaagtgcgcagggaaatgcccggagtcgagaaaaaaccgctcggagggtaggagacgcttcagtgcgtgccggctaccgctttcccttatccacttctcacgacctcaacagcggcctaaccgccggcgccatctggcacttctaaggtcccgccttgaggaagctatggcggacgggctgtttcttcagttcggcctgggtgggcagcagttcgaaggactggacgtgctcggtggcggtgaagtggtcgagggtgcgctggatctgggccatggtgcggccgtggagcatggcgaacaggttgtacggccaaccctcgaaggtctcacgctcgtagcagtgactgacggtgcccgaatgggccagccagcggccggcctcgacgatatgcgcttcgcccacctgggcggcgaacatgacgttggcggcaaagcccagtttgtgatgattcaccacggccgccaggcggcgcaccacgccacgctccagcagttcggtcagcagggcgaacatcgcttcgagttccatgccctcgggcgtcacggcgtcgaagggacgcgctgtcaccttcaggcccccttgcagggcggccagcacacgccggtgcgcctcgtccaggtcgacggcctcggccttgggtatgcgctcgacgtcctggagcaggacctcgtcgtcgctctcggcgtcgaagcgcacgtcgagtttgaagatccgcgtcacgggcagactgtggaaatcgatgccgaacttcgacgccagttcgctcagggtcgcctgcacctgggcgggcgacgcctcctgcagcgtgaaccacatattgaagcggtgctggcggaggtagttgtgcgagacgccgggcagggcgttgaccgccgtggtcacttggggcagttggtcttccgggacgtgagcggtcacgagcgtgctgctaaagcccagggcgcgatagttcaccacggaagcgaggcggcggatgatgcccacttttttcagatgtcgggtctcggccagcacctcggtctcgctgctgtcgatatccctggcgatctcggaaaacggctgtggacagagcggcagcccgcgctgcaggcgattgcacaggcgtttctggaagtcggtcaactccagactcatttctcctcccgaggctcgtaccagcataccggatcttcggccaggtagtcgcctgtcatggtgtaggcgcgggcccggcagccgccgcagactttcacgtaggcgcacgagccgcacttgcccttgtacgacgtcaggtcgcggatctcgttgaggaactctgatttgtcccagatcgccgcgaagtcgtagccgttctcgacgaggttgcccgctgagatatccaggaagccgcaggtctgcacgtcgccgcgatggctgatgaacccgaagccacgaccgcccatgcagccgctgatatgtacgcgcggctcctgcaggtttgcctcccgatagacgcgtgcatactgaggtccacacgtcactcgcagttcgatggccaggtcgttcttcaatgccagcaagtcactcagtagctcggcgtattgattcggcgccaggatttcttcccggatctcatcaccccgtcccgtggggaccaggatgaaggggttgaagcagtaagcgccgagttggcgggccagttcggcgatcgcaggcacctccgccagattggtgcgggtgatggtcgtattgatctgaaactgcaggcccgcttcgtgcgtggccttagcggctttgacgaccgtctcgaaagcgcccggcgtgcgccggaaggcgtcgtgagtcgcggcggtcgcgccgtcgagcgagtaggacatcgccaggacaccggcgtccttcagctcggccagcgaggccgcgtcgatcgcgtagccgcaggtcgccatcaccacgcgcaggccctggtctctgccatgccgggccagttcgagaatgtcgtcgcgctcggtcggctcgcccccggtcagaatgatgacgcacttctcgtaggccgcgaccgagtcgatgatcttcttccactgctcggtgctcaactcgtccctgtcggccgtgcggtcggcgttggcccggcaatgccggcagttgaacttgcaccgccgcgtcacctcgaacgccagcaatcgcggcttgtgattctgtagatgtttcttcataggccccagactctatcgaaatccactccaaccgtcaatgcgcaccccttcagcgtgcccagtggccttacgctggtccggcgaattgggtttgattggctctgtttttctcgcataatcagcgttttcagcccccaaaacccggtaattggctttgtttcgcacaattgagtccatcgccaccagccgctcggtacccgccggcccaattgggttcgtttggcttcgtttttccgcccgatctgcattattagcccaaaaaggcagggaattgggttcgttttgcataaaaagggtggctccggccagcccttggcacccgatagggcccgccgcctttgtctcgttgcggagggcagtgctcgcccgacccaggcctgccggccggattgatgagtgagtatttgatatccagttttcatgttcggtggttataatacaaacatcgatgcccggcgtcaagaagaatctcaccgatcctcactttttctgcactttcattttcccccgtgccgcccccgtatctccagctcagacatagatttgacaccctgcctacgtctctgtaggctgtatctgtaaacgtgcttggggaagctatgacaggagacgtcccggacacctgtggttccccgagacatccggttcagagggaggaacatgatgcgcatcatttcagtgttctttgtcctttcggggctttcggtggtcttggcgtaggagggcggcgcagaggatcagtcgcgagagaagttcaagccgccgaagaaccctgccgagtaccgtgcgatgctggagcgagcgatcgccaacatagacaaagagcgagagaacgcgccgacgactcttgccgaggcccatgcgaggctggagcagatgttgtctcccgggacactggctgagattgacgctatgccgtccgaagaaggcatgatcgagtattacatgggtctgggggcgcacatccgcagtggttgggggttggggagcgatttgcccccggcgaagcctcctgcgtaggcaggggcttcgccgggggctatgctatcacatcttaccgattacacgatggcctacttcaagacccttatgcactcttcctacgaagtttcacgcctgccacgctcaggcccagcatccccagcaaaacggcaccggggaccgggaccatctgtaaaccacggacggtcgagatgtagttgccagagagaccgccatccaagtaccacgctgaacctgaatatgaaaggccatacttcctcaaagaatcaggatacccaccagccgagttgttcttgtcatcgtcagagtcggttacgtagatggcagtgtagtaatctgcactgatagggtcatactcaaagccccaggctgtaatcgcgtgcgccatggttcctcggattgaaagaccaatcccgtaaccatcgtgcatccaatcgtcaatatttgaaagtgccgctgaatccgtgccgtccactctcgtgtaatcatcgtgattgagtgtcggatagaatccacctccgccatcaacatcctcctgggcccaaccattcgtagcatgaactgcaccttgcatatcattggttccatcaaaccaccagttccaaccaacgttggcattgccacctgcatctgtgaaatgtgctccgaaatgagcgaacatgtcgtcggtggtagtcattccacccacctggccccaacctgtgtactccaggatattggaggccgatgcagcccaacacaataagtcgtcatcttggtttacatcagtcttctcagcatcggcccaggtaccaccccaggtgtcccagatattatagatatctgcaaatgagctgctggcgagcagtgccacgatccccacagcaacaaatgaaactgcgaacctgtttttcatcaaaatcctccgtttccatgtctccatgtatttgacttaatggagaccttcaattcgttgatggcccgcacgcgggagagcatttcttggctattacaggaccggagggccgcgcgctgccagtacggctggtgcgaattgggatgtccggcaaagtgacgcagtgtcatccaggcgagatggtgcaagagaatcccccaccctggaatccggctgaacgaagcagcgtactggtacagagcagagaatttccggcgacacagcaagattggggccgatctggaaaggaccggcgttgtggtaccattccgggacagagcccagggatgatctccggacccagtggccagagcgacacagtcccaggccgagaagggcgtacagacaataatccagactgcctgatctctccgttaggtctgggccatgttgcgtggctcggcccgttccaccctctgcttccgtttcgggcaaaggaacgatggggcttgagttcagatctgaaagattgaaaggacaagcgaacaaactgtacgaatttgctcctcgaagctgcgcttgctcgcagactcgcgaaacccgtcctctgccagcatccaatgggcagacgggcatcaggtcggcaaagacaccctctgtagcgatcagagccgccgcaaccgcaatgatgaccctactcctgtccgtcatcgacccttgctccgcacccccgcttcttttgctaggccacctagactgcctatatgtcccagtgtaccgtgactcgtcgttcgattccaagaaaaacgcaccaaatcacggtctttccctgttttcgctttctgtatgtctgtaggctatgtcctaaatatgcttggggagctatgtgtggagaggtctcgacaatccggccaactgacccaacgccgcgatcggcggcgcgtgacaggtctctggccgcggtctgcgctggcgatgctgtccagagtgacgatatcggcgataacgaggagacctggaccgagatgaccgtcgagggcgtaggcaaggggactaatggcgggatcgatggtcgtgacatggcagttgaataggtagctgtccgaatggtggtccgtaaagggagttatagataggaactccccggatggacaagggcatgcatataagttgccgcatatgacccttgccgcgagagacaacaagaagtgcctttagaggtgatgttgtcaatcagagcacggagcctccaatcttcacgaaggaaggtggcatgcggctcggacggatcgccattcgttggcgtctctattatccgcctcaccagcgcgggtgggcccaccggcgatacgtgtggtagagggaacaccgagcaaggagatgatcgtgaattcgaggagcaaaggggtttccaggattgtgatcgtcgtcgtgattctgttggccgctgtcggtttgttgcccggtcttttcgttgttcgtactggcatggtagaacatagaagtgcccgccagagactcgtacgattgctcagtgagaccgattaccaaacggtcctggaagcgtgcagggagctgtcgatgcgtgtcgcccgaggacatctcaagcctggcggttatggtgtccggttgaatgtggccccggaggctccggatttccctcaagtgattttggccctagagccggcatgcgtcctgatagaaaatgatggtcgtgtcttcgtcgagatgcttggctatcccagctacggcgtagtcgcctaccctgagggctacagggtcggtccttatggcttgggggacgtggagcttatacccggattgtggtattatcatgaggactacgataagtatgtggattacaggaaggacgtcaactccttggtggaacgaggaagggcataccagtggcggaccctggttgattgcagcccattcacgttaaagtgcttacaggctctcggctgcgggctgcggtttggtcggctgatatgtggactctcaacgcgcgaggttcatggttgatgtgcgccggcagacctgctcgtttggaaggtgtcacgagacgggccccgaagcggcttgtggatgatggcggggcattgcataggggagtgatcctatgattcggtgggcggggcccaccctgcgcgactgagttcgtccccaggtgaggtgttaagagtctcgtaggagttgctgtcatgggcaaggtcacgaaatcacgtcgggaccgcatcattgtcgttgccgtggtggcagcggttgctgctattctcgctcccttcgcggtcaatttcttcgggattctgcgagtgtttcacggtgtacaagagagcagagtccgattgctggataaaaccgatcatgtcgccttgctggacgcctgtcaggaactctcacgacaggttgccgccggagagttggctccaggccggtacgagagacatggcgagcagtgggagccggcgttcgaaccgccagaggtcatccgtgagcttcgacctccgctcctcagaatcgacccggatgggcgtgtggtggtgagcatggccgcaggactaagccaattcggcgcgaccgcataccccgatgggtaccgagaaggctcagcgagcttccactatggtgaccgagaactcatcccgaacctatggtactttgacatggagtaccagagggagccggattacgacaagattgtcgacggaatccttcgccggcacggaggccaatcgggagcggattagcgttgcgagggaattgaaggcctgcggtctctcccgaagaggaaagaacacctgacatctttgaattcccagtggaactgcctgccctggacgagggcgaccccatcgtctggtgagccggcgcggcttgaggattggacaagacggtcgcaggcgcctattgaaaggggtagtattgctgccggatcgatggctggttccatcaatctcttgttgacacggacttggtctctctgctagcgttgcatcaatgaggtgtgttgttccgtatgtgaatacgccatggtgtcgaagatagacagcccgatgtcgctccaggaagccgaggggtgggctgttcattgagtcgcatagccagcagttactgtgaagatctggtccaataggagacaagatcatggcgacttcggccctgacaggcgcgcgggaaatcgtagattggctcaggcacaccgaggaacggatcgggcagttgtatgcggcggcggccaaagtttgttgccacgacgcggcgctgtccagtttcctcggtcagttggcggaggacgagaagtcgcacgccgagttcatgacgcgggtgtgggagcattttcgcagcaccaaggaggctccggtactccgcgttgttcttgacagtgacactcaaaggcagatcgaggaactcttcgagcgatttcagaggctgttaatcaaagcggaaatccccaagcaacgcatcatggagtacgtcgcccgggccgagtcctccgaactgaatcccgtgttcctctacgtggccgacgagtatcggcgggcgggtcgtgaaggcgaacacatgaccggcgagattcaagggcatctgctgcgcatccagaagttcattgagaacctgcccaaggaccagagaccttctattgatgtttgcaccctgccttctgtgggtgagccgcgcttcctggtggttgacgatcatggacctttgcgccggctgatggcgtctctgctttctcgccgtggaatggtcgatacggcccaagggggccaagaaggattggaacggctgaaagagcattttcacgatggtgttgtctccgatatccggatgtcgggaatggatggattcgagttctaccagcgtgccgtgcaatacgacggtagactggatcgacggttcctcttctgctcaagtgacgtgacctctgagaccgagggccacctccgcgagaggaacctgccgtttctgaagaagccttttgggttgcacgatttccatggggccatcgagaagattctgagcagcacggatgtcgttcccggaagaccgacggaatagaagcgtccggcgcatcacagatctggaagtcggccattttcctcgcgcaatcttatatcactgaaagccgcatctctatatgccctgttgttggcgccttcgttcagagaaaccctcaaggcgtatcggcacggcgtgggcgcggggacgcctcaaccaggccggacggcgtccggggggtggacagcagtgtgtgaaacagcttccagcgtttggcggggtcggtcgcgccgccgtggcgttcgatgtagtctttgacgagccgccgaccgacggtgtagttgatgatatagctgcgatgctgttcgatgaactgcatcaggcccatctcggcgcccggggctatcagggagtaacgccgcagccactgcttggtctgggcagcatccatcttgccgtcgagatagcgccgcgccgcctcgacaaccgccccgtccaattcgctcttgagttgcatgatcctgtcgtaggtttcggcctgggccggatcgatgtccagcaacgggaacagtaccgaccgttcgaattccaatcgctccttattgccgagcaggtcgtaactgccatattcggccagtccctctgcgacgagcgccaggggactgtaaagagggaggatcgaaaactcaatccaacgcctgcccttgaccaggtgcttatcgagcagggtcagatgcgtgtggtggcccggatacatctcatgtcgggcgatgcgaacgatatcggcgatgcagaacggcgcactggagttgacctggatcagactgacgccatcgccttgataggtcaccgaggcggcccagggcttgccaaaaacgaactccatctcgaaccgctcgtcggcaggcagcgtgacatgctcccgcgtgggttgccgataggcggcgatcgcgcctttcagcgccttctcgatctcgatgcgcggcatggtgaattcgatccggtactggttgaagcgccagtagagttcgccttcgccgggcaggagtctgtcgagttcgtccagaatgccctggtagtgtgtgggctcccaggccggcgcgacggcgtcgaacagggcccgagactcttcgtcgaaggacattctgacgttcgccagcaggtcgatcttgcctcggacgctgcgcaattgcttatcgatatagtcccgccggagtttttcaatgccttcgactccgtcactgtccatcccctccagttgcctgatgagcgcatcggctccgccccgcaaccgggcgccggggaattcgccctgcatcacgtcgtcggcaggttgccacgcagacgggccgaagtaggcgtcgacatagccgtcgtcatacagtcccacctccagcacaagcttaacatatccctctgcgacatcgttgacgtcagcctggccggctgtcgcgacagtcccatccgccagtagccagagcgccagcagaaaacagcggtgaatcctcattctctcgttcctctcatcctgcgcggtgttccagcatggcgccgatgccgaccaggggagggcggtgttggcgtgccaatgcccgctcgattcctcacgatgtcatttgccttggattctcttggtaaatcggaaggccggccggtgtggcctgaaaaaaagtgaaaagatacggaaaatcccttcccggagggtcccggtggacgtacaataaggagtgaatgatcactccggtcgaaagggctggtattgtggctaggagcaatagtctttcagagaagaagatcgccattctcgaggcgacactggtgttgattgccgaacaaggcttccacggggcgccaacttcggaaatcgccgagaaagccggtgtggggatgggatctctctatcggtactttgaagataaggatgaactgatccgagagctgttcgtgtacgttacggagcagtcgcgacgggccatcgttaaggggcatgaccctgaggcgcccttcagggaacagtatatacacctttgccgcaatgcgctgcggcatatggcgagccatcctgacatctttcgctttgttgaacagtacctgaattcgccctacggtgttggcgagcgacgtgagaagcttctgggcctgggcagcgtcagcgtgacggatgggccgctggaggaactgtttcggctggccagggcccgtcaagtgacgaaggacattccgctaccggctgtctatgccctgacgttcgggccgctgttcttcctgattcgcgacgtgcacgccgggctgattgaggtggatgatgagatggtggaacagaccgtggaggcctgctgggatgccgtaagacgctgaccagcggccggaatgtagggtttctatgggagaccctgtttttttgccgcctgtcggagggagggctcactccggaaggcggaaacgccgggccgcaaagaagccggcctaggggaatagagatatgctgcactacaaggatcgcgagcgtaaagtcgacattgttactatggaccgtgtgctggctaccgatgtctacgagaggttgcgcgcgtacaagccaatggaatcggttgaagtggttcgcccgggtcgcgggggcgacgagattacggtgcaggatgtcgaacagttcgttcctgataccacgcgggccgccgtcttgatcatcgacgttcgctatcagacacgagcgaagctcaggaacgcttatggcaccatggttcggcggagtcgtcccgatttccatacctattgccataccgtcgtcatcggtgggggaccgttcaatgtgtttcggccgggtatggccattgaggcgtttcgcaactacctgctcgagatgcgaatcgattacagcccggcggtgtgtttcgtcgacccgttccttcattatactttcgacgagatgcaggagcgggcgctgtacgaaaacaatacgctgccggatcggataccgaaaaatctgcagaagcacttcaaggcgaacaaactgggggccgagcaactgcgggcctatttccgcgccgcggacgtctctgagaccgggagggaggggcggagacgcaagaggcagaagatgctggaaggactgtatcgccggttagtgcataaggacttccccgaccacgaggaggagttggtgcagaccttggccaaggaggggtgtccactgctgggcgaaacgctcgcgttcaatatctatcccttctttttcgccgagtgggtgatggatttggtgcgtaaggttgatgcgaccaggtctggggggcaggccctgcgaagggactgtcgcgtgccgggcgccaagagcgcgtgaggatgttgatacgcaggttgccatacatatttgactgggaatcgtcatgagagtcctaatgcttttatatatcgtgtcctcctcgctgtgccttgagcccgcagttctgaggcgcgcggcgcagcgttgaccggcggtgacgggtactggtgccttcggtcaaggcagtgacgccccgggtgccgatcagtgaagtccttgtcagtactcccatgcttcagaagctgatcgtcgagcagtgtgacagcgatctgcctgtggtgattcgcggcggtcgatggtggcgcggatgccggccaggggcaaggcggcgctggccaggtagccgggcagttggcgtttggtgccgaagatccactcgcagacgtcgccgctttggaagtcacgcaccatgtcgatcacggtttggtcggccagggcgggatcgaccagatcgagcgtgtagacgaaccatccggtgggtgtggcccagtaggcgccgttctggtaggtgtcgcgaccacaggatggtttttcccagtagagaccgccgggcaggtgtcggatctggccggcctggacgatttgtgcgtagtgctgctggaaataggtggcgacggcttttgattgcttgctgtcggcgacgcccagatagactgcaaaggctgagccccagatgtcatgctctcggcactggacggtcgcggcgcggaagagcccggtatcgcggtcccagaaggttttgcgaatgctctgcacgacacgttggctctccgcctgccacttcctcgcgtcgtggtcgcggccgagcgttccaaacaggtccgccagttgtcgagacgcctgcacgtacagcagcgagcagaacaggacctggccctgcttgccgatcgtgtcggtgaagccatagggacatcgctcctggggttcgcctggtttgatacagacgagccccgtatcgggacggcggggaaccgcgttcattgtcttgaccagcggcgcgatgatctctgcgagcaaatcggcgtcctgggtctggcgataggtgtgccaggcgaccgagacggtgaactgtgagccatcggcgaccggatgcgtgcccatcgaaccgaaacccggcttatagatgggcgcgccgtcgaacttgacgcagtcggtgccggcgccgtcggcccgcatcttgcgtacgaagagtcggcacgcgtcggtcagttccttgtcggaatacgcatcgatggcgccttccagcgtatattcgtagtcgcgcagccagaaggcttcgtacccgagcccgacctggggcgggaaggccgcagtgccgtcggccattgtgcgcttcgaggctcggacgagacggtgcgcctcgctctccagccatgtcacggcttcggtgagcgtctcgggaccggtctcggtcgcccgaacggttcccatcgggacaagggcgacgacaagcaacactccaagaaaccatcttcgcatacgaatctctccttgggaactgttggactactcccagaccagacgggcgagactgacgccgcgcttgggccactggacgctggagatgtaccagtcgccatcttcgccctggaacacttcaggggcgtgggcgtccagacgggtgacgagtttgtcggtgtcgaacgaatagggatcgtcggattgatagacgtaggtgacatgctgataggcgccgttcagctcttttttgtcccagtggccgtcccagccgcagacgaagaggtagaacgtgtcattgtagcgaacgatcgagggcgactcggtgtctacgttgtccttcttcttgaggatgcagcgcgtctgcgtgcaggtcacaagatcgtcggattgcgccataagcacttcgtatcggccgcacaccatgatgtgccaggccccttgccagaagatgacactgggatcgcgtccggccggggcgttcgtcaccgggcccttgggagtccattggtgcaggtccttcgaggttgcatagcgcagcggggcgggcccgtagatcatgtgatagagcccgtccttccggatgatgtagggcgcgtggttcgcttcgatctcgcccggacgctcggcgggggggagcaccttgggcaggtccttccatgcgccctcacgcaggacgtccttcaagttacccttcggcgcctgggcatgaaacgacaggttttctcccgcgtggatctgatcgaacggggtacgcgggtgtgtaatgccgaacgcatgccagcgtccgttcgggcctttgacgaagcagtggtcgttgggcacccattcggggtagtactgccccgccttcaggcccgcgacgtcggggcccggaaagacatcgccggccggctggtagatgtggacgtagggcccatcaatcctcgggatacgtaccttggcgctggttgctccgcgctgcccaagggtggtccggtgatgggacgtggcctggacgatcttctcatgtgactcgtagggccggtacatcgctcgcatgacgaaacggtaacgctggcccacctcgtagttggggatgaaccactggaagtcccaggccggattgccttggcctccccccgagggagactggctcagacgcacctgatcgcgcgggcgaaagatctgtgccagggtcatatcatgactgatgccataataccagggctcggtgtagcggtagcgcgagcgattgaacacgagggtcagtgggaagtttgggtcgtgcttgaatgtgcgactgtcgtcaagagccaggtgtgtggcgcgcacgccatgggcgggtgtcacgccgcgtatccagcgacggctcgcggccggttcgtcggcgggtcgaccccaaaagtgaatgtccagggatttgggttggtggatgtagctggcgaagaacaggccgatgtagtcgttcgcaaaggttcgggcgtgggggacgcattcgagggtcatctcgatcgcaccgtcggggagcagttcgtaggtcagccagctttcgagtttccagtggggtgtaggcggttggtgcagcgccgcggtatggtcatcgacctgtctgatcgtcatcggagcgttgcgaggctcgaacagaatgttcctcggctggacggtcccatcgtggatgtgctcgaagttcaggccggcgtagaacgggacgaatagattgtcttttcgcttgcggtgggtcagcgaggcgacgccactgtatccgcggcgatggccggggagtgtttcgtcgtcgactgcctcgttgttgacgatcaccgccgttacatccccgcgctggagcacaacatacgtcttgtccgcagtcccggccgggagcgaactgcatgtcacaagcaacagcaatgcggcgaacgagaggggagcgtgcatcggaaagcgcatttcaaaccagtttctcattgggcgtcctccctattcctgggcctgacgagtacggggcgattatagcagagaaacttggagtaaggcaacgaatgcctggtggtttacgttcgagacggcggatgtaaggtttccttctccgtcgtctcccgagacgatcggctcgggagacgaacacgtgtgtattaaactgcgccttcggctctgctgggctcagtcgtcgattgcgttcggagtgggctcgactctcatgacgccgagataggtgaaatgataggagttgtcattgttggcggtgggggccaggctgatcgtgatctcaccggccgcgtccggctcgatccccgtggccgtcacgaagttgtcgacgttagcggcgacgtccagggccgcgaattctgcgttggcgccggtgagggtgtagcccgtttcgcggttgtcgcggatgcccatgcgtgaggcgtagaaggtgaagtcgtacgtcagcagcgggtccagccccgccagcttgaaactggggaagacatcgcttcggccgctgaaggtctccgtgttgccaaagagcgagtcgcgcgtggcgtcggtcgggaagagagcgaattccaacgtgccactctggttggcgccgttgaatcgactcagcatgaccaggtcgatttccgtcgttctgccatcgacggttgtcaggttgagcaactgacctgagtccgaagcgccgacgctctcggtgatattgttccatgtgttctccgtatcgctcgtcgtcggcgtactgcccgatccgaaatcgaagagaaggatttcgggctgcacctgtcccgaagctgtggcgcccgccgccagggcattgcccgccaggtcttgcacgccggtgacactgacgtcgaaggtggcggtcagacgctcgctcagcatcaggacaacggtttggccgtccgcatccagttcagcgctgatgacggcaaccgccccttcattgacggcgtagttgtcgatctgagtcacggtttcggggtcgagacgctcatcgaaagaaagctcgatcgtatatccgttggtgctggttgccgacagcaggaccggggcgttcacgtcgggcgccactgtcaggacggctgcgccgctggtggcgtcatagagcaggttgctgacgctgacggagaacgcggcgccgtccaggtcgggtgtcaccaggtcgatggtgtaggtaaacgcgttggcgtcggcgatagcctggccatcctggaaccactggacgacatacgggggcgtgctgtcgaccttcgcttggaacgctgccgagcgatactccagaaccctctggtcggccggttcctcgatgaacacgataggcgcctgctcggggatctcgtccatttgcatcgcgccgaggtagatgaaatggtatccgttgttgttattggccgtcggttcgaggctgatggtgatttcgccctgttcgtcgggcgtgaccccattggcgatggcgacgtcatcgacgttgttggctgggtcgagaacgacgtaaaccgaatcagcgccggagatagtgtagcctgtttcgcgcacgtcgttggccccgagacgggaggcgaagaacgtgaagttgtaggtcaatgtcgggtccaggccggtcagcttgaagctgggcgccacgtcgctgaaaccgttccagtttggtgtattgccataaagcgaatcgctggtggcgttggatgcgaattgggtcgattcggtggttccactctgattggggccactcccgttgaacgggctgagcatctgaaggccgatctctgtggacgtgttctccgtgtcgaccaggccgagcaactgaccggtctctgcgccgccaatatccaggatgacgttgttccagaagtgggcaggatcgtccggggtcgggccgttctgggtgatggtgttgacggcgccgaaatcgaaaaggaagctccgcgctcccggcgacgcccaggcggccagtacgggagcgaagaccgattgccacagttcgtagccggcggcattcatatgccgcatgtcactgccgaacagttcggggcgcggctgaccgctgtcgttcagcatgggcgtcaatacatcgatgaaccagaggtgtggatcgttggcggccagttgctccagacgttcgttgagttgcctggtgacttccaggtactggctccggctggggctgggtttcgtcgcgatgaagcccacatcggcgccgggcaagtgctcctcgaccagtgccaggaattcgagagtgtcgtcgtagactacgtccaccgacttgccgccggccaggtcgttgtcgccttcgtagacgaggatcagggccggatcgtaaggcgcgacgatgcgatcgaagtagtagagcaggtcgctcatgtgcgagccgccaaagccacgattcatagcgggatagtcggcgaagtcgcccggcaggtcgggccagacgcggatgctggaggagcccacgaacagaacggggtcggccggcggggggctggccagatccgcctgctcgaacgcgcggatgtcgttctcaaaacgcgtcgggtcctgggcctgggcatcgagaaggggcatcagagcaaaggctaacgcaagccagctgaggaagaaggggcgaaggccaggtgtcttaagcgattgagtgacggtgaagtccgtgctctcgttcataccctgcatctcctctttctaccccgagccctgttggggctccgactcttccccctcgaccctcctcgtgccatccgcggagaaggctaacgatgtatgcctcatcataccacaatcgccaggcaaccctcaacacctctgtccctcaattcgccgactactgctattccgacgggaactcagacgtcacggtgtcatgaccttgagtttcttgatcgggccgaagagggcggggccgtcttttttgggggtttttacggagattgtgaattggccggcctggttcttgcgcaccgataggttcctggtgcgatactggcccttctcgtagttgaaggtcttgccatcgtcttcgtagagggcgaaacggccctcggtcttgccatagaaacgcacttccagggggtgaccataggcctcttcggtctggttaaccgcttcggtgagcatcgggaccacggcgccttccttggcgaacagcggcatacggtcgcccaggtccttggcggtgacggtgatcgtcttgttgttgccgacgaacttgcctgtgtagaagtcgtaccagttgccggccggcagttggacttggcgcttgatcgcctggcgttcgtagaacggcgcgaccataatggagggaccgaacatgaactggtcggtcttttcgatgatcttgcccatcgcgtaggggttggtctcgctgtcgagcttgccctcgatgacattgccggccagttcgccaaacccgtcttccagaatcatggcgcggatgggcgggatgcccttgaagtgatagtcggcgaacgcgctgtagaggtagggcaagaagcgcatgcgcagcttgatcacgtcacgcaccgaatcggtgacatcgccatagctccagggcttcttgccggacgaccatgcgttgagctgggccatgggcgagaagcagacggtctgcatgcggttgagccattcgcgaccgttaccggccgagcgggcttcgggggtccacaggaggccacccaggctggcggtggacaggcccgtgatgtattcggcatggccataggaatcgctgtagatgacgaacgggtagcccgaggcggcgccgttgctggcgcggaccagaccataggtgcggacgttacgcttcctgaacagatcgttgtagagcatgttctgcatgagcaggccgtaggattggcgcatcgcttcgcccgagatgcccgatgggaacgtcgcgtggtccggccagagccagaaatcgtagccgtccacctcatcgattttgtacccactgatgccaatgcgaatgtggtcctcgtgatgctgatcggtgagcaacttgcgggccttgggtagggtgtagtccgggacgatgcccagccagaccatgtgcgagccggagagcggatacatctcgtcgtagatgcggctgtgcttggagatgtaagggttctcccagaggttcaggcgaatgccttggcccagcaattcctgggtgaacgcctcggggtcggggaagcgtttcttctgccactcgaacgtgcagggataggacttggtcatccagcccggctccagaccgatgacgtcgagcgggaagtctttttcgacgaactgcttcaactcgtcacgcgtctggtcggcgttgaaacgggcgtggacccggtgccagaatcccaatccccagagtgggggcagggcgccgccgccattgtagagattgtagcgactgacgacgtcgagcatcgagtcgcccgcgaagacgaccacctcgagccctgcgccgttgatttgcgcttcgacggcgtcacccggtggcatggccagccagggccccggctgcttctcgtccttgggcggattgcggtccacctcgggtgggttgtggcccgagtccttacggttgcccacctggttgtagatcttcaggaatcgagcggtattgaagaagacgccgtagcccttgctcgagatgtagaacggcacgggggcgtgggtgcgcccgccgcctttgttccagtggtccacgttcagggtcaggatcttgcgggacttcttgatcccgtcaaattgcaggccgaagccatagagcttctcgtcggcgtcggtggggatgcggatcatgaccttgccatccggcgtgacgagataggtggtttcgcccggcgcgaacgggaactcgggtttggatagctggttcagcctttcgagtctcgggccggctgcggccaggtccgtgtagcgcaactcaccgtccatctggcccagttcggccttccagatccccggtgcgacgttctgccagggcttgacaggcgtcagatcgctcagacccgccgcatggcatggagcaaagagaaccatcagtacgatcgcgatgagaacggcgcggagcattaaacgagtcctgaccatcggtattcctttcttcgatcggggtcttctcaggcccacattcgcggcgccttggcatacagcgttccccaccataccacactatgcggctgatttccacggcttccaagggttgctttgtcggttgccgggcggctagaacgcgtgcgagagggacaggccgatgttgtagattctctggtggtaatcgatgtcgttcacctcgcggtcgccccaggcgtggcccagcaccaggtccaagaaccagtcgttgcaccattcgtagccgacgcccagcgtgaggttgtggcggtcgacgcccacgatgttcgagaggctgacggacttgtcgggcaggggggattcgtcgaagaaatagccggcgcgaaaggcccagcgcagggcgggcttccattcgagacccaggcggtagcgatcggagtcgcgccagtcggaggagtagtcctgattggccagcgccacgccgggcgtgtcgtactcgatgtcgatatcgaaggtggaccagtcggtacgctgccagtcggcggtgaacgtcaggttggtcgtgtgccgataggcggttcctaggccgtaggtggcggggtggcggaacttctgtacgaagccgctggattcggatagaccgagcagcgtcaggctggcgcgggcgtgtccatctagatcgatgacgccaccggtgcgatagacgccgcccaggctcagcttcttgttgatgtgatagagtccgccgaagatgccctcgaagcccgttccgtcggagcctgtgtcgagggcgtagctgtagtcgctgatgcccgaatcggcgacggtcttgttggcttcgtattcgacgtcgccatagaggacgtccaggccggcgcccagggccagggcgtcgttgatctgccgggccagggagaaattgatggcgatcacgctgagttgctggaagagttcggcggtgatggtgccgccgccataggggacgcggtcgtcccagtcgacgtagtagccggcggggatgtagtagccggcggccatgttgaagccggcgtaggaccagtagcctccggcgccggctgggatgtagaagtcgtagttgaccttctccttgctgaagcgcgtgggctccatctccggcgcatactggacgaagatgtcacgctgaaagcgcgggtccattccggccaccggcggattggcgatactattctcatcgcgcatctcgatatggggactgctgaagtcgaagcccgcgccggcgccgcgcagttgggtcaggcccgccgggttccagtagatcgccgtccagtcgtcggccaggccgatgaaggcgccgcccatcgattgggcgcgactgccgaggccgccccattcgtagccgcccgctccggcagggtgggtcagagcaaccgtgagcgtgaggatggcgacggtcagaaggcgcctcttgcgttggtgggcgaaggtcatcaaagcggttcctttccattgtctttggggatcgatgtgtcttgttccggcgcgtccagcacggcccccggttcccagagtttaaggattgccacgcaggctggcaagacaaagacgtcgcccatccaggcagcgatcatggcgaccgcggtgaacaggccgaagtactggatcggcttgaagtccgccagcaggaggacgacgaagccggcggcggtgacgatcgaggtatacgtgatggccgggccggccttctggaggctgttccgcacggccgtaacggtcgccaggctgtgccgcttctcatcctgatagtgagccaggaaatgcaccgtgtcgtcggcggcgatgccgatcgcgatgctggcgatcatcaccgtggcggtatcgaacggaatgcccagcagcgtcatcaccgcgaagacggagaagatgggcaacaggttgggcaggatcgcggcgacgagagctcgccaggagcggaaaaagacgccgatgatgacgaggatcagaccgccggccagcgcaaaactgcggatctgcgtttcgatcagcgactgctgggcggctttgctcagcggcgcgatgccggtgacatagtgcgtcgccggcgctgggatcagggcgctggcttcctcttcaatgaagtccagcagtcggtagtactcgctgttggcagtgcgccggatgaagacggacagccgtagcgagatctgctcgtcggcgcggtgaacgtaggcatgcagcatgggcttgagcggattctttcgcgccgccagcgaaggcaggaagacggggatcgggacattcttgaagcacgaggcgatagtgcggtagtgcatgaccttggccacctccggtcgcgtggcgattcggttgcccaactcctccagtgtcttgagcatcgtgctgccttgctcggcggcggtcgtgacgcttatctcggccgtgtacatcccggtcaggtgcgcgccgatgaattcatagtcgcgccgcagtgtcgaatcgatggggaagaactgcaccacgttggattcgacgcgggcccgagcggtcaatccgaccgataccaggaagaccagcagtgccagcgccaatccggggcctcggtgtcggcatacgaattcgccgaccgccgccgtccagtggggtcgggccagttggggaagacctgggccgcggtgcagcaggcagagcatccccggcacgatggtcatgttgaatacgaacgacaggaggatgccgatcccggtgaagatcccgaactcgacgacgggttgcatctcggaaatcgccaaggcggcgaaccctaacgcggtcgtcacgttggagaggaatacgggccgcatcacttcggtcagcgccctccgcgccgtctccgtcggacccgtttcgtcggagaggtgggccaggaagcgggaggtgacgtgaatccctccggacagtgacagcatgaatagcagcgatggcatgaccaccgtgatcatattcagcgtcctgccggaggcgaccagaatccccatggcccagagggtcgtgacgcctaccgcgctgagaacggcgatgacgggcgagatgcccctcagcgtcacggccaggatgagcacggagagcaggatcgctacgggcagaaagcgttgtgatgtccgcgtcgagccgcgatccagggccacgttcagcaggggggcgccggccatgtggatcggcggaccgccaccggtcgccaccgccgcctcgatcccctcgatcacggctgtgcgggaggcggcaccgtcgacttccttgaggtagacgatcatgccgaaggtgcgtccgtcggcgccgatcaggaagttgcggaacaacgtgttctgacggatcagatccgcccagtcggagcggaagtcggccagaatctcggccgcggtggcgagggtgaatacgttgtcgacgttatcgatctgtcgcaaccgctcggccaggtccttctgaaaggccaggcaatcctcagacaggggatcgtcggcctccccggccaggacgacgaattcctcgttgccatatttgttcaggaagtcacgatagtcctgtcgcgcctggttccgctcgcccagccagacttcggtggcgttatcgattcgcgcgtcacgcagcagatagagggggacaaccgcgctgagcaggcagaccaaggccagccagcggcagtgggccgctacgaacccggacagcttgtcgtcggttttgtacattgtgggcagcaccgtatccagttatctgcagcacgagaccttagcaaagatcctccccagtgcaagcgcaaactgtcgcgaccgcgcggcgccatcggcaagaagcgcaagacggtaaaatgctgaatcatggacgccggctcagtgtgcatcgctcagaactggggatgcgtgctttcgtaaacgccgggtgagccgccgagggtggtgctggggcgccaggccgtttgattgcccagggcgttgggatcgagcgggggaggatcgatgaggaccagggagaatccctcgccatcagtggagcggcgccacttatcgtcgtagcggaaatcgacgatggtccggccgatggcgtcttcgagccgaagccgttcgcccccattgtcgagcttgccggcgtattggcctgcgatgttgatcgcgtcgccatagaacgaatgaaaggcgttcgggtcttgtacgacgatgaccgcttcgccaggcgcaagctccgtcgggccgaatacgaagtcgatcccggttgtgaaacgcacgaggttcagatcgatggttacgtctcccaggttcgctacttcgatgaactcggcatcgggctcgactcccgtcgcgacatcgtcggcagggtgatacatgatctccgtgatgcgcaggttctctacgacgggcccgacggcgaacgtcgcctcgttcagggcgctccaggttgcggcgctgagcgtgcgggccttgacctgggcggtgcggtccagcacgatcgggccggcgtaggcctgcgccgttgtcgcgacgtcggccggggcgccgccgatggcggcggtcagttcggcgccgatcaggaaatcggaactgccggccgagacgttcagcgcgtggatggcgagcagattgaggtccgagcgcagtaggggcaaaaaggccgagacgtcgatatattccaggccgacggcgtcggcgtcggagtggcccgcctcggcgctggaattccaggcgggctcgccttcgaaattccgccgggcgatttccgtaccgttgagataggcgacgaagccgtcgtcgtagcggacgcccagggtcatcgcgtcccagtcgtccgcgagtgtctccggcgtgaaggatatgcggacatagcacgaggtgtggctgccgtacatgagatcgtgcacgtcggcgctgatataaccttcatagcccgtggtgttttcgtagccgatcccgccgggcgtcccctcgacggcggtccagtccgccaggtcgtggcgcaatacctgccgccatgggtctccgatgtcctccgtcgggaccagcatatgcttgagcgcctcttcgccgacgagcgtgaactcggcggcctcgctctgcggcggcgcgggccggcgcgggtcggcgccatcggtggtgaaccaggtcacgccggtcggggtggtcatctccagggcgaatcccgtcgggaccgcgccgccgtgccggctgaatgccggggccgcgacgctgggatagaggccccgcccgcgcagttggttcagcacaatgtcgctgcgtcgggggaaatactcctgggtcaggaaatcaagttccgcctgccactcgatatccggcgtataggggtcgtcgggttgatgggcgtcgccccagcgggcggactcggccaccaaggccaggcgaatctcttcggcgcggtcgagccagcgggccaccgcgttttggggggtgagcaacccgccattgaagaagtggcggtgcacgcggtcggcgaactgcatccggtagtcggcgttggcggtcagtcgctggtggacgtgtgtgggctggttgttgttgtccttgccggtgacattgtcgttgaggttcaggaacgtccgctccgaatcccaggagaggaagtggaacccgtcgccgccggtgcgccggcgtccgccataccagttgttgtggtcccagtccacgttgcccgcgtagaagtggacgagcaggtagtcgatcaggttggggatgtccaggtactcctgaatctcgtggtaggcgtcggccgaggccaggccgcgatcggcgatcgccatcatggcgttccaggcgttgcggttgccgtcgacggtgccgcctttatgctgcacgacgtcgtactcttcttcgacaccgccgaggtgctcggcgaagaaggcggcgttcggccgctcgatcgcgtggtagaggccccagtacagaccgttgagatagaggtggacatagcattggcccgcactgagccggcccatcgcgcgctgcgtgtcacggggccattggtcgcgaatgtattgggcccgaatctgctggttggtgttggggtggaaccaggagtcgccgttgccgccgcgcaggacgatcgtatcgaaccgctgaatgggccagtcctcgaagagcgggaactccagtttggttgggccgtattggcccttgaacagcaggcggaggttgtgcttaggtcggttcgggttgcggctggccccgccctggatgcgcagggccgcattgacctgaatctccgcgccgccggccgggtcgatgatctccattgagaccggccgctcccagtcttcgccttcgctctgcgaattgacgtagatgccggtctccgggtcgaacaggtcgtcgacgtccagcgtcagcgagatcgttcggtgggtcagcagggcgacgccgacggtgtcccgatatggcggatacctgacgatggtcgggtccatttcgtaatccgctgcgccaccgcgccaggtgggcggaaagccttccgggttggggcgctgctgggtcacctggtcggcgaagatataggtgtgcgtccgcgtggtcgagggcttccagtccgagcggatcgccttggccttcagacaggtggtttcgtcgatctcgatcggtttggtatagcgtgtgccgcgataggcgcggcccgtccatacgtaaggttcacttccatcggtggtgtagtagatcgttgtctcgggcgtcgccgtcgtgagcgtcacgagcacgggcgcctcatagaagccccgctcgggactgaactgtacatcgtcgacgaatccctcgtagatcttgacgttggcgccgcccggcgtgggttgggacatgctgtgccaggcgtcggcgccgtcggggtagcggccgaacgagatgtccgaggcctgctcgccaaacgtcactgtgtcgatcggtgtcgcgccgtcgatgtcgagaaggacgatgtcctcgccccgagcgctgagactgaagggggcgtgcagacctggttcgtcttcggtatccccatcggcccagatgagcagaaagccctgggccggaaccgtcgtttcagcggaccggtcggcggggatgcgccacttgcctggttcgtccgggtcgtcgcttagatacatgcccgccatgtcgattggtattcgacttgtgttgtagatttcgatccagtcgtcgtattcggattgggggtcggctatcgtgctgctgttggccgccatgcactcgttgatccgcaaagggctatcgatggcgtgaaccgccgacgccaggcatgccatggcaagacacgctctaaggagccaccaccaacctctcaaacgactgggcattgcatgtttccatgtctaaccgcgttttggaccgataccgccggatgccgaccccgtcgggattgccacgtccccaattgtagcaaaagagaccctcccggggcaaacattgcttcatacgatcggcatgtgtgctatggcgccgcctgcggatcgggctcctccaactcccaccagagccgggggtagtcggcccctcatcgatccaccggatctcttcgcttccgtcatcttctgatctcctcgtcccaatgccgtccaccggcagattaccggccctcgtcgtgtctctcgagcgaaggtgctgacagggaaatactcgttccgcgtaggtttcagtataccggatcgggactgttcaggtcaaccttggtttgtgcgggttgtgggagggctttgcggggggatgctcgtcatccgcggaagtgcttggcgatgtagcggcgcacggggcattggcagatagttgttcgtccgaacgccatgccatggcgacagctccacccatcctcatcctggcagaacagcacctgttcaccggcggcccatttgacttctctgagcttctccagggccgattggagacactcgtgtcccctgtcgcagggcgtattgcggacgagttcctccagcttttcgcggtcctctcgggtcaaatccaccgtgaagttctccagtcgtcgtgccattgtatctggtgatattgtgtcagttgtaccggtccggctccgtgcgtgttcgtggattctcagaattccgcaaggtctcgacagcgcgggcgggactggtgacagaggccatggacgcggcttcgataacacctataatggcatgggtctctccttcgtgctgagagggatctgctagacgatggctttttcggagatacgcgctcatgcggcatacatcactgccgaccgacacggttcgattgggaagaatgtccagatggatactggtcttagtctggctggggcttgcggcagtggttcgaccgggttggtcgagcccggcccaatggcctcggacgcgggccgagcggaccggataccgggagacatcctcccatgccgacgtggtggcgtttctggagcagcttcgtgcggccggcgcgccgatctccgtgagcacgatgggcgccagcgatggggggcgatcgattcccctggtcgtggccacgcgacctctgacgactgacccggtgcaggcggcgcgggactgcaagcccgtggtgtacgtgcagggcaatatccatgccggcgaggtcgaaggcaaagaagccatgctgatgttgctgcgcgatctggcgcaggagccggccgggcggggactgctggacaagctcgtcttgctgacggcgccgatctacaatatcgatggaaacgaggacctcaagccccaggcggagcaccgctcgcaacagtttgggccggagagggtcggccggcgttctaacggcgcagggctcgatctcaatcgcgactatatcaaactcatggcccccgagacaaggggcgccatggagcatgtgttcatcaagtgggacccggacgtatttctcgatctgcacgccacgaacggaacgctgcatgggtatcagttgacctacgcgccgcctctgaatcccaatacggagccctcgattctggaatacacacgcgatcgactcttgcccggaattcgtggacgcctcaggcagcggtgggggatggagacctttgactatggcaatatcttcgtctacggccggcccaagccctcgaccgatcgtatcgcctggtacgcccatagtccggagtttcgtttcagcaccagctacgtcggtctgcgcaatcgcatcggcattctgtcggaggcgatgagtcacctgagctttcgcgaccgcgtagaggcgacgtaccgattcgtgcgggcgattctggagcaggtggcgcaggaggcttcgacggtcctggcgttaactgcccaggcggatcgtacggtcgtcggctgggggcgcgaccctgcccgtgcgccggcgctgggcgtgcgctttgccgcggcctcgcggggtcgggaggcggtcctgctggaggattatggcgatccgaaccggctgggccggcgtgacccggctcgaggccccggcccgcccgagaaggtctctgaaatcatgatgcctgtctacgaccgctttgtgacgaccgagacgtcacgatatccggccggttacgtcctggcgtccgacctgacggaggtggtatccctgttgcagcgtcacggcgtcgcagtcgagcgcatcgaaggtgactgggaaaccgaggcggagaccttcatggttgaaaccgtcaagacccggccccggtcttaccaagggcgccaattgtgcgaagtgcagggccacttccagagcgagcgccttgccgtacgggtgggcagcttctgggtttcgaccgcccagcctctggggatactgattttcagcctgttggagccggagagcatcgatggtgtcgcggtctggggattcctggccgatcatttgcaggaaggccgtcgctaccccatttggaagtgctaccagacgccgacgggccgcacccgatccttggattccgccgtagagtccgctggttgccctgagaggtgagtttttttcagaccatgattgcctttctggccccaattaggttatcatggccttgtggtgttctggggacacaagccggaactcctcgtgtgtggcgtctgagagcgtgtgtttgagaccaatgccaattggccaagcgagtggaaggggccctgaccatgaggaacagaagtgcattcacgctgatcgaactgctcgtcgttatcgccgtcatcgccgtcttgatggccatcctgatgccctccctgaagatcgcccgcgaacaggcgagggctatcaattgcatggccaaccagcggtcgctggcgcaggcgtacatcatgtacgccggcgacaatgatggtgcgatctgtggaggcatggctcgcccgagcgccacgaatagagtgccgccctgggtgaagccaccggggaacatcaacactgatggcagctttgccgccgtcgatggtgacgtgacattccagcagcggctcaacggcctgaaggccggggccatctatcctttcgtcaacgagcccgacgtgtatcattgcccgggtgacatgcgcaagaacatgggtacgagcctgggtgacgcacgggagtttctgatcttccgcagctattcgttgccggactacatgaccgggacaagcgccgccgatgcgaagaatctgtttagcttcaaggagcaggccaccaagatgctgttcgtcgaggagatctacgacggcgcctcgggcaatcacaatgtcgatggttggtcgtacaggccttacgacggtagcctgtgggatccgctgggcaacttccacagcgacgcctgtacgttcagcttcatggacggtcacgccgagcgcaagaaatggcaggacaagcgaactgtcatctactttggcagtcgcaccgacgcggccgcccagggctttggcaaggggagccagttcagcccgcccaacgtcgatctcgattggctcgacaagcactatccgggcaagaccctcaggaagggcgtcaactaacggtgccgccagacggcatcgtcatcgtcagggtccggatcgtaccgtcaggcgcatagtccgccgagttcagttcccttaggtggaccaatactcgcgcgggacgagaagcctattagcctcgccatttgccgattccattccagaattgttcgaccagccgggcattgccacgaagaacactgacgagatcgcatacagcacgcatacgatcctctcctcctgaacgatgaagatattgcccaatgtccctcatggctgcgttggccgtaggacaagagaaatcgtctctgcccgagagttccgaagaagcttcctcaccgagagcggctaaccgaaggccgagatagagattgattctctcaagatcaacctccaccaggtgtggtttcaagacatgaagtgcgtctgcgattttcgatttgtcgatatcttgataagacgaatgcatctgtttcgcaagcgcatcgacatcggcgtcttcccaagtccagttatggaggattaaccacgcgtgcgggtgccatgacagtatccacaggtcgacgtttgtaagaccagacagcgatccatagcgtctgagtatttctgtttcaatcaccacttgcgtggcattttttgactgaacagcggtttcgataaggtcaactgtcccctggatcgtttcttgcattctcttgcctctccatcggactctggctactctgagtgctcgtgaccctgttctctttaggaagctatgtaaggtgggtgctggagaccacttcaatcatccggacgccggcccggttatgaatggaatcgggtctgttcgtcggtttctcgaggcttctcaggacccgtcaccagggtactggcaggccgtgacatggtcaagggcgtgtcttgtcggagttggacgcggatcggaggcgggttctggggtcaggtccttctcgacgccacaacggtgcgcggggcagcctcatggagggtatttttcgcttgacattcggcgaaagtgtttgtattttagtaaacaaaaccaataagacatcaagctatgatacacaagcgtaaatactaactcccagtccgaaaggggagtcgtgattagtgaaacgcatgtctatgtcgagtgggcaaatcgggggacatccatgggcccggagccggcggttgcggcaccatcaattatgcaaaacaaacccaattgtgccctttaaagccagaaaacgagggtgaggcgaaaaaacaaagccaaacaaagccaatttgtgagacgcaatcgggggatgtgttcgcctttttgcggtagctcggtgggtcgacggccctgcaaaacgacgcggggagatgtcgcgccgggatgggatgaaaccgccgccgggaccggccttgacagaacggcctgtctccagggacaattggcactctttgtggcttcggttttcgtgattttccgatggcctggggcgtctatacttgtcgctgagtgaaatgttgcctatggacgagaagaagaatcagttcagtacgtttgccggtgtgttcacaccgtcgatcctgacgatcctcggcgtgatcatgttcctgcgcgccggttatgtgatcggccaggcgggcatcttcaacacgatcctgatcctgctggccgcccaggcgatcagtctgttgacggcgctgtccatgagcgctgtggcgaccaatactccggtggctggcgggggggcctactttctgatctcccggtcgctgggcccccagtttggcggggccatcggtctggcgctgttcctggcgcaggcgttgtccgtccccttctacattctgggcttcacgaacgccctggtgacagacgtccccagcctgggaccctggtttgggctcatcgcgctgggtacggcggtcgtgctctttgtcatcaactggatcagttcgggggcggccattcgctttcagtatgtggtcatgacgctcctggggttggccattttcgtctttctcggaggcgccctgaagcgtttcgatttcgcaacgtttcagacgaatctgggcccgcgttacacggggccggggatcggcttctgggtggtcttcgccatctacttccccgccgtcaccggcattctggccggggtgaatatgtcgggggatctcaaagatccggctcgctcgctggtccgcgggaccctggcggcgatcgtcgtggggttcttcatctatctgctggaagtcatcctttgcggcggctccaccgcacgcggcgatctggtcgagcgttcctattccatgctcaagatccacgccctctttggcgccggggtcctcgtcagcgggggagtgttcgccgccacgatctccagcgcggtcgggtcgttccttggggccccccgcgtgctgcaggccctggcgcgggacgggatatttcgcattctccacccgtttgcgcacggttcgaagggcacggacgagccgcgggccggtctggcgctgactctgggcttggcgctggtggttatcgtgctggtcagcggtcaggaatctatggccgctttcgacatgatcgctgcgattgtcagtatgttcttcctctgcacgtatggtatgatcaatctggccgccttcgtggagtcgttcggcgccaatccatcattccgaccgcgcttccgcttcttccattggacaacgtctctgctgggcttcgtcgcttgcctggttgccatggtgctgattgatgcgttggcggcctcaatcgcggtgctgaccgtcgccggcgtctatgtctttctgagccgtcgggttttccgggtggcgtttggagacgcccgtcggggctttcagtacgctctggtcgtgcgggctctgcagaaactccgtgacatgacgccgcatcccaagaactggcgtcccacgttcctggtcatggccgggaacacgaagacgcatctgactctgctgcgatacgccgtctggatggaagggggtcgcggcctcgtcaccgccggccaggtcatctcgggtgatctcgatacctttgcggcccgggtcgagagtctgcggtctgctatggacaagttcctcaagagcaatgagttggcggtgtttcccgaggtggtctttgccgaagacgtcgacgaggggattcgtatgttggcgcaagcacactcgatcggcccgctcaaacccaacaccgttgtgttcggctggccgcgcagcgccgaacgcgtcgaggcgatattccggcacgtctcgactatcgccgccctgggcaagagcgtggtggtggtggtggacaagggattgcccccgtccgtgcgtcgcgcgcggtgcgtcgatatctggtggagaggggagcaaaacggatcgcttatggcgacgctcgctcacctgctggtccagaactgggagtggggtcgtagccaggttcgggtcctgcgggtcatcggcgacgaggccggacgcgagtcgtcgaggaaagcggttcactcgcttgttgaggccgcccgcattcgcgccgaggcctgtatcattgtctcgacggaacccttcctcgaagtgtttcgccgtcactcggccaaggccgatgtggtgttcctggggctgcaaccaacgggcgatgaatcctctctggaggtgtaccaccgtctcaacgatctcctcgagtccatgcccaccacggtcctggttcgttccagtggtgaagcggatgtgttcgcttgagccggcgcagaccgatgctggcatccttcagggttcacgaaatacgggttaggagcagaggcgactgagttcgtccatggtcagactgctgagacgctcagtgacgagatgcgctgctgttaactgctcggcgtcgtaggtattcgtcacggccaccgtatgcatctgggcttcgtgggcggcttggagtccccagtgcgagtcctcgatgacgacgcatcgccccggggtgatgggagcggccgtcgattcgttgagtctctgcaacgccaggagaaaaccctcggggtcgggcttgccccgcgtgacgtcctcggccgagacgatgacatcgaacaggctacgcagtccggcgtcctggagcacccactcgatctcggtacgcagagaacccgagcagatcgcgatgggaacgctgccggttctcaacacgtcgaggaactcacggacgccttcaatgatctgcccatcggtccgcgcgagcttctcgaagacgcgggtcttcttggcgatgaggtcctcgatctggctcggttcagcgcccagtcgaccttcgtcgacaagcgccttgaagcagtccacatcgctcaggcccaggtactcggtgtagtattccttcttggtcaattcgagcccatggtgggctaacacgacgttgaaggcgcgaaagtgcagaacttcagagtcggtgatgaccccgtcgaagtcgaatatcacggctcccagcatgacggcaatgctctccctagacttcctggaccggcccgatcagagcgtcgtagtcgctgaaagtcgatttgtcgccctggcggaccaactcggtcagcgccttgatcttgggggcgttcttctcgatgtaacgccgggcgatcatggccttgcgctgtttcatcgggattgtctcgccattgccggtcgaggtgccggaggccgctgctacgtccatctcgaccttactgctggcttgaccgcagaacaaatacccgatgatcaggtcgatcgcgacatccgtcagggcccgaccgtagagatccatgtagtcgttgccccgctccttggtgaattcgatcgcggccctaagttgctcagtgccttcggccagcttgtccagcaggtccttgacctcggcatcgtattccagggcgaccaggtcggccagatacttctcggcggtcccgctgcagacgccccggacggccgcgacgacctgcaactggctggttccctcgtagatggtggtgatgcgggcgtcgcgggcgtgcctttcgctggcgtaatcacgcatgtacccgctgccgccgagcacctggatcgaatcgtaggcgacctggttgcacatctccgagcagaagtacttgctcatgggggtcagcagcccggcgtagcgcttataggcgcgggcccgattcttcagtgccttgagttcggctttgtcctggggcggattgttctccacctgtctgttgtatccgaccgccaggtccacgatccgggacgtatcatagagcagagcgcgtccagcctcgatggcgatcttggtgtcaatcaacatatcgcgcacggccggcagtctctcgatcgccacgccgaactgcgcgcggctggcggcgtaatcccgcgcgatccgataggccgcttcggcgatccccatcgactgggcggcaatcccgatgcgggccccgttcatcagcgtcgcgacataaggcgccaaaccgcgtttgcgctcgccgatgagtttgcagggcgtgttgtcgaagaagatctcgcacgtgggtgagccgtgaatgccgagcttgtcttcgaggcggcgaatatggacggtcgggcccggcccgcagacgaacaggctcagtcccagtccgccgctgcggtccgcttcgctgcgggacagcaccagcaggacgtcgccgcacccgttggtgatgaaacgcttgacgccatgcaggaaccagttgccctcatcgtcctggaaggccctcagcttcacggcctgcagatccgagccggcgtccggttcggtcaagaccatcgcgccggtgaccgtccctgcggcgaagggcggcaaatattcctgcttgatctcttccgaggcaaaggcatcgatcgtctcgccgatcccctgcaagccgaacacgttcatcagcgaagcgtcggcccgtgagatcatctcgttggccatcgaatagaccaggttggggaaattcaggccgccgaagcggtagggcagcgtgaagcccatcacctcggcttgggcgagtttctccaaggcctcggtgatgcccttggcccgcgtcacggagccgtcctcgttgagcgtgttgccttcccgatctacgtcctcggcctggggggcgatgacgtcggcgctcagttcgccaagcgagttcagcaccatatcgtagttctgaacggcctcatccggatcggccggcgcatagtcaaattcctgggcaaaccgaaaatcttcctcggtcatcgccgccagttgctgctggtcaatatgctggaacaggaactgaatatcgtcgttgtctttgtagaagttccccatgtctatcccgctatcatgagtttcgtaacgttacacgctcaactggcgtctatcctcggcccacggctcctcaccggcggccgaggcgttcctctgtgggtcagtcctttatgctcttctctttgatcgacttgatcattctcggtatgacctcgttgagatcgccgacgatcttgtagtgggcgatgccaaagatcggcgcatcgggatcgttgttgatggcgacgattttctggctctgggccataccggcctggtgctgaatggcgccgctgatccccacggcgatgtagaggctgggccgaactgtcgtgccggtctgacccacctggtggtcgtggtcgataaagcccagatcgaccgccggacgggtggccgccggggcggcgcccaggcaattggccagatcccaaatcagtttgaagttctccttgctgccgacgccggcgcctccggcaacgatgagccgggcggccttgagatcgaccttcttggcccgcttgtgctcctggagaatctcaagcggcagatcatcctgggccagcttgaccgtttcggtgacgatcacgccgtgatggttgacgttcggttcgggcatgggcatgacgccctctcggaccgttgccatctgaggccaccgatcgtagttgatgatcgtggcgatgatattgcccccgaaggccggacgaatctggaatagcagattctcgtggatctctccgtccttggcggtcttatggtcgccgatttgcagatcggtgcagtcggctgtcaggccggccttggcggcgctggcgatgcgcggcgccagatcgcgaccggccaccgtcgcgccgtacagaacgatctgtggttcgtgtttgtggatcaggtcgaggatgactttggcgtagctgttagtctgataagcgcccaaaagcgggtgctcgaccaggtagaccttgtcggccccgtattggatcagcggggtgcaaaggtccttgacgccgtctcccaagagtacgaccgccagcttcactttcagcgtatcggccagatgcctggctttgctcatcagctcgaccggtgtctcttccagcgcgctgccgtgctgctcggcgaacacccaaacttcaccttctctatttacatcgatcatgaaaaacctgaatttgcaaatgaaccttgtgattccaggggcctcaaggcgaagggcccgcgcacagagtgctggtgtacctaagcgatgatcttatcctggatcagttcgtggatcatgtcggtgatgccgtcttcagtcggctcgatgtccttgctttccttggccgcgaggactacgctttgaatccgatggaccttggtgggtgagccgtttcggccgcaccagctcagatccgcttcgagatcatccagatcccagtgcttgattagcaggcctcgggcttccagagcctcgcaacgcgttgcgatcaactcctgcatctcggcctcgaccgcgtccggattgatcgcctgaatctcctgggccacctcaagacgggtacgcgccttcttgcacttcatcaaatgcttggctgcggccacgcgcggcgtgttggtctcgcccgttacggtcaacaggacgggcaactgggccttgacctgttgccaaccgttgccgatattgcggcgggccgtgatttctcggtcctccagggcctctagcgcctcgcagtacgtgatctgcgtgagccccagcttttcagccaattgcgggccgacctgggcggtatccccgtcgatggcctgacgaccacacagcacgatgtcgcaatccagcttcttgacggcgcaactgaggatatagctggtcgccagcgtatcactagcggcgcaacgccgatcggtgaccaggatagcgccatcggcgccccgatagagggattcgcgcagaatccgcgtcgccccgggcaatcccatcgtgatcacggtcacgcgaccgccgaagcgatccttgatctgaagggccagttcgagggcgttcaggtcttcgggattgaaaatagccggcagcgccgaacggttcaccgtgccatcgtcgttcatgacctggccggttattctctgggtgtctggcacttgcttggccagcacaacacagtgatatgccacgtaagatctcctatcagcccttccttgcctgacatttgttttcggaaacgccttagtttaccggccttgacgctcaggtcaaccctaaaacgaaaacacgaagaagggtgatatttccgggccttagcgaaaaactactaaaccgctatgcccaaaaggccgattgagttcacgatggagccgtctccagggcagaatgcgcagtttctttttgacaacggtgtttataaatcgataatgatcgccagcggtggtgttatcggatgtgaccaccggagccgacaatcaggcttcttggcgtaaggatgcggcccctgggacagccaggggatttttacatgacgagtgaaaccagttacgatacggtatttggcaaactggcggttgaccaggggctctgtacggacaaggagctccgcaactccgtgaaggaattgcaggaacgccgcaagatcaatcccgtcatgctccaggaacttctgatcgagttgggctacattaccgccacgcaggctacgcggctcaaacgaagcattcggggcaacaaggcggccgttcaccagatcccgggctacaagattctgggcaagatcggcgccggggccatggccttcgtttacaaggccaagcaactcagcctcaaccgcaccgtcgccatcaaggtccttcccaagcgcttcagtgagaatcccgagtacgtgcagcggttctataaggaaggccaggcggccggtaagctcaaccatcccaatatcgttcaggccatcgacgtgggcgaagcggggggctaccactatttcgtcatggagtacgtcgagggcaagaccatcgccgacgacatcgccgagggcgccttcccggagaagagtgcgatcgaggtcatcatccaggtgacccacgccctggaacacgcccactcacacgggctggtccaccgcgacgtcaagcccaagaacatcatgatcaaccagcaaggcgtggtcaagctggccgacatgggtctggcccgggagacgacggatatcgaggccgcccagagtgaggccggcaaggcttatgggaccccgtactacatcgcacccgagcagattcgcggcaagatcgatatcgacggccgggcggatatctacggtctcggtgcgaccttctatcatatggtcaccgggcaggtccccttcacgggcgacgattcctcggagatcatgaagaagcatctgcgcgagaagctggtcccgccggatcatctcgttacttcgctctcggccggtgtctccgaggtcattgagatcatgatggccaaaccccgcgacgaccgatacaacaacatcgaggagttgctggtggacctggaggccctgcgcgatgggcatccgccgttgcaggcgcacaagcggttcgatgtctccgtcctcgagaagttggaagaaggggagaccgtcgaagcggaggatatggattacgccgaggagaagatcaaccggctctggatggctgtcatggtcctggcagtcgtctcgttcgttgcggtgatgatcattgtgctgatgctggcgttctgaggccagcgccgcgttgcggtcgccgggccgtatcgaaagaccttcccaatgcccagaggaggagccaatttttcgtcggaggagcttgtccgcgtcttgagtcactacgacgtgggggtggttcaccgcgtcaagccgctctcggcgggcaaccgacgggcccccaaggtgatcgtgcgggccgacaagggtaccttccttctcaaacgccgtccgaaaggtcgcgacgatctggcgcgtgtggccttcgtccatgccgtccagaagcatctggccagccaggcgtttcccgtgacgtccctggtgacgaccagcgacgagcataagacggttctgaacatcgatcgtcatatgtatgagttgttcacctttgtcagtggttcgcgctgtgacgcgtcgcccaaggcgaccgaagacgcggggcgacaactggcgaacctgcatcttcggatgggggattttgctcacgactacgaaccgtttcgaggcagctttcacgattcgtccaccgtccggcaacatctcaagatgattcggtcggaccaacgcgccggctcagcccgacggaccgaagctatcaccgaatcattgctgatccgctacgatcgctccagcaatcgcgtcaacaagctgggctacgaatcctggaaacgccaggtcgtccatggcgactggcacccgggcaacctgttgttctttggggccaaggtcgtgggcgtggtggatttcgattcgatccgaatcgcgccgcccctgacggacctggccaatgggatgctccagttctccatcgtaggcgactgttccgatccgacccagtggcccgacgccttcgacgagcccaggctcttccagttcctgacgggctaccgcgaggccgccaaggtgagcaaacgcaagctgcgcagtcttgtcgatctgatgatcgaagcgatgatcgctgaagccgtgctgccggtagccgccaccggttacttcggctatcactccggcgtcgacttcctccagatgatcctccgcaagaccaagtggctccgccaccatcgcaaatcaatgaccgagactattcttggtgtcacagcagccgacaagtgagccgctctacttcttctccatgggcggcagtggaggctgtccaggtgcgagtccgcccatcccgcccatgggcaggccgacaggcggtccaactggcggcgtctcggattcatccagtgtcttcctctgtgcttgagtcaagaccacaagcctccctggcctcggtatctcctgacccagggattcgatctgccccccgtcgatgagcactatcttgtccaggggggtggtcacggacgtctggacctcgacggtgctgatgatcgggaaggtgtagggatacctccccttgtgcattcgctcctcgttccccaagacggaggtgatctttgctttgacttcgagatagacgttgtccgaacctttctgcagatggggcgtggcgttgaactccacgccggcgtgaatcgactcatattgagcgaccggttcccccgaaggcccgtccggttcgctgaagccaacgaattgaggcaccgctcgcccgacgcgcatctccgcggattctccatccaggaccgtgaccatcggggcagcgagcgaacacgcatacctggtcccttgcgtcgctctcaagagaaatatgacttgcgtgtcatccagaagggcggcttcgcgtatccgctctccctcgccaagcgtcagtgccgtcaccagttcctccggcgtgttcggatcttcgaccaaccccttcaggaattcgtcactgacgtgcaaaaaccgcgcctcgatctggaccgcctccttcacttccttcgggtgctgggcggtcgcgtgcggctgtcctgagaacacgcccaccatattattgtaggcctgggcgacggcggcaaactccttcgccgctccggctacgtcttcatccaccgccttccgcaacgcggccagggcctcggccatctgggtgacgcttgcgtccaatggggttcccttcgccagggcggcggtctcggcggtgcgcgacaaggcccgtgcgacccactcgctcatctccgcctgctctgggcgacctgggcgtgtgagaacggacatagcgctgaacatcgtttccttgaacgcctgggcgagttcggggcctggaggccaggagcgggcggggccgctctcagagggtgcgatggtgatgtccatgggcggactgaccgcgcgaatcgggccgcctgttctcacccgggacgactccacgatgaccgccagccgaatcgtgtgtttgcccggtgccagttgcagggacgcccgtctgtaggtcgggtctacgccccaggcaaagccgtcgtctcgccattgcagatcttccggtttcgccttcgaccagatgggcgagagggtgacaggctgatcggccagcgactgtcccatgcccagaccggccagacgcacggcccacgagtcaggcggccatatgtaccagacgccgtccacctccaattgcgacctgcgctgtccggtggccaagtgcagaaattcccgcgcgccgacattctgtacgtcccagcgcaaagccgggatctcatctgttcgccaggtgtgtctgtccgcccgcaaccgaatctgcacaccctcctgcgccgccgaccagtcggtttgcatcgttgccggtgtggccgtcaccgggttcgctttgggttcgactggcagcacctgggctcggaccaggaggtagagaacgtcgtcctgctcaggttctcccgtctcgggcgtcagacgcaggacgagggtcgtgtcgttgtccagggtggctttggtgcggatgctgtgtgtgctcacgcgaggcctctggtcgtcgtcggcggggatcatatccgagacttcgacggccatctccaaggtgacttggccgctgctttcggcatggggtgtgacgctcactacggtgccgtactcgatcatctcgattgccggcggcgtgaccgtttctcctgacgcctcgcggcccaccggttccggcgcttcgtaatgctcctccgtgatgatcctgacttcggcacgcttgccgtttatggcctccaagcgaggtttggaaaccacctgcacgtattccccggattgcagtagatcgcttagtatctcaagtgcatccgagtctccctggccgttctgggcgcagcgtttgaagagctgtgccggtggaacttgtagttcctggatgtcaggcagtgatgcgcgcccgattcgtgcgacctttcgcttcccgtacatccgatcccacagacgcgatagccggttcgccgcctcacgagttaacgggcggtttcccgaagtgtccagaatctcaaagtccaacaagatccgcgtcttctcatcgattgaggacgcgctgtcgtctgtggcttccgtcagcacgcggatgggtgtcgattcgctggattcctccttttcaacgacgggatcatgggatgattgctccaattccttctgcctctgctcaagacgctggttcagcgccgccagcaactgctccttctcgacgattgtggggtgttttggcaccaggttctgctgagcagcgatgaggtccacttcaacctcggcgatcttcttcgccaattcctgggccatgggatcgataggagtggattccgattcctcacggctttgcgcgagacgccgggcaatgccggcatagaccccttcctcccattcccttcgccgctcctcaagacgcttcttcatcgccccaagcagcgcctctgtccgagtcagttcgggatgttttggccccaaagtctgtcgggccacgatcagttcttgctcgatctccacaacacgcttcagcaaattctccacgacgggatcggagttcacgtactctcgacgcgcagcgatcatcccctcgcctttttcaagaccggtctctgggaccaggcgggcggtcacgaagactgcgatatccttttctgaatcgggattgtttgtgccgactccggccacaaccaccgtgccgccatctttgattgtcacgacatttctgctggtgcgacgggtcacaacaggcagcttgccaccttgggccggagggatgctgtcactgtattcgagggccagttccagtatgatttcattgttgtcggcgatcctcggcatggccgaaatcaccgtcccggtcgcgatgctcacgcgttccggttgatccgttgtcgcggccggcggcatcgagaactgctcttccgtggtggcggtgacgcgggccagtcgcccgtcgattgccacgatccgctgtctcgccaccaatcgggcccgaccctgttggcaaagtcggtctagggtctcctgtacagagttcgtaaaggcctcgtcggctgtatagcctatctggacaccccagggcgacccgcttgctgcgccggacgcggaagccggggcgttgccgaaagctccggcgctgatctgcggggcactccattcgacgcccagatccgcgaggtcgctgcgctcgatggccacggttcggaaatccaacaacacctgacgcggacggttgtcgctctggtgggttgatgggacagacagaggctcctgctgagccgcagacttgacgatggttggcttgaccagcaggagaacaatgctggttcttgtgtccagcctttcacttgccggttcggtagtgacagtgagaggatacatagcgtatttgttgttgcggaaggttgacgttatgtcgaacttggctccttccatcctcatgcttacgttgccatcgttgtcgagttgcgccaagctccgaatatggaatcccaaagacaacctgatggtgtcctggtcgtcctgaaccgttggcgtgacgtccaaacgcaggcctataccctctgcgttgtccgaggaatccggggcatctgaattggggtcctcaccaacaattatcgaggcgggtcggccgtcgcgtgttacaatatgcggtctgctcagtatctctccatagcctctcgatattagcagatcggtgaacgccttggcgccgccggcagtcaggttcaaggagttcgtgtatttcttgaggatttgccagagtggtttctggagttcctccacggttggcagggtgaagtcgtcattcactacaacatctgcaaggagattcctggcttggacggccgtttcgtggtccagcgttgcgtcggaagcgaccttggcgatgacaaagtccaacaagacttgcctggcctcctggggcttctcggtggccaccgtcgcagccggcctctcgactggcaactcggggctggccaggacgagggcggtggggatgatgatggtggcgacgaggaggagggcgatcaggccggggagccaggcgaagcggcgctcggctggggtggggcggcccaggaggcggccgatgcgggcgacgaggctgcccccgttggcggccaccgccagttcggtcccgtggtggcgcatttcctccaggcaggtcagggcgcgggcatagcggaccgaatcgccacacactccgacggccaggtcgtcacagcagttctcccgctcatcccgaatttggcgcgagacccaccagaccgccgggtggtagaagcccaggatttccacgaccgattgggcgatattgacgagataatcgtagcggcggatatgcgccagttcgtgggcgaggatcgcttcgagttgttcggcttccaggcccgtcagggcgctggcgggcagcagaatcaccggcttgatccaccccacgacggtggggacgtcgacaagcgccgattccagcagttcgaccgcttggcggacgcccagacgctcggccagttctccgagtttcgtctgcacaggggcggcgacctctcgcaccatgcgccgtcgcatccgctgtagttgggcccagccgcccaggtgccaggccgagaggccaaagacacccagcagccagcccaggaccagccagggcagggccggttcgagagcggaagcgacccgttgcctccagggcacgcgaatggttgcatccgccacctccaggaccggcgcctcgatcggctcgacagacaactcggccacctcgattacttcgaccggcggtacctcggcgatgggcgctggggcggtgacaggacccgcctccgcgacgggtcctgagacctccacaagctgcatcgtaaccattggcagtgcgacgattagcgccagtgccaggcatgagacgatgtaccgcaggccggcgcttcggttgctcaggaatctcaggacgacggccagtagcagggcgatagctgttgcttgccagacgaaatggatcagcgtccagcccagccgctcgaccatcccctgcgacagtagttgctctaacgttgccatgactatgctccctccatttggtccagcatctcgcgaatgcgtttgagttccttgggcgagaccttcttggcgtccagggcccgcatgacgagcttctcagccgagccggcgaagaccttctccagcatgtcgcccaccacctgtttctgagtacgctcttcggagaccgccggtgtgtagatgtgctggcgaccggcgcccttgcgggtgagcaggcccttctcggccatgatctgcatcagcttgagcgtggtggtgtagcccgtctcgctgttggcgcccaacgcctcgtggatcgcccgaacggtgctggggccgcgctgccagagcacgccaagtatcgccagttctcgatccgtcggtccggggcgcttatgtcttgccatgagggtctccttggtcgattgtttttccgcatcactatctctatcggcaagtatacgaaggaattcgtagtaaatccacgaaaaaattcgtacttcgcagaaaagatttgtgcgatctcatctcacgaaccaggaaaggctcataccctataggcctctgtcatccttgagccgaaggcgaaggatctggccttggaatgaggggcaaccttcgtacgcagcccagatccttcactacgcagagctgcgttcaggatgacaagcggcgtatggactggccacaatccacgccatagctcgcctccttgcccatgaaaaagcccccgccagactgagtcgggcggaggcttctgtgttgcttgtggagaggtggttagcggatcgtgtggaactcctcaacctcctctgtctcaacccttttctggctgcgttcgaggagttgctccaggagctttcgcatctgcgtcatctcctcgtgcatgccgttgatcttgccacgcagttcttcgacctcgacctcgatcccgggtcgttcccgcggcgcatcgcccagtcgcctggtctcgccttcgagcgactcacggcgctggtgctgtgaatcttccagttgctcctcaacgtgaatcatctcttcgtggaggttgtcgaggtgggcgcggagttcgcgagccttgtcgctgtcggggtcgtccattcgttccagcctgtgcttcacctcggtcccgtgcgcctgcagttcgtgcaaatgctccgccagtttctgtgtatgctcgtgtgctccggcggcccgctgttgatccaggtgggcgtgctcgcggtccagtgacttcatgtgctcgtgaatctcgcgcagctcgacgatgatctgttccctcttctccgacggcctgtctcccaacgcctccaactcccgttccatcagacgcatcttctcgcccagttcttcctggtgccgcgccaattccctggcgtgcgcctcggtgtcgtggagttgctcggcatgcgcgcgccggtccttcaaatcttcttcgtgtgtctcgttctcctgcttatgtctctcgttgcgcaaggcctccaatattttctcttcgtcggctattcgcgcatggagttgattgacctggtccttcagtacgcggcccgtccggctgtcagggtcctccatatactccaatcgtcgcttgacctgggtgacgaattcccgatcgagttgcaggcgttcggtcagttccagttccggcacccgctggcgggcctcgtcaggcagatacagctcgagatcggccaactcctgttccatgggctccatgtgttcgtggatctctcgcagttcggttgagagtcgctctcgcttttcggactgctcttctcccaaggcttcaagctcttgctccaaagggcgggcttgcgccgccagttccccacgatgccgcctcaattccacgaaatgcatcgcgagtttctcggtgtgttccgcccgcttgcgccgcgcgtcggtccgtcgtgccttctgcaggctgccgagctgtcgctcgatgattccaatgtggtcgcggagggcgtccagttccgagcgcaggacgtgaccccgggcgcccggttcatctccctgtgcgtcgagggccgcttcggtctcgcggacctggtcgacgagttgatcgagcatgcgttccagcacattgcgccgcccggcgaccgccagttcgtgttgctcctcattatgctcgtgctgctctcgaaactcttggtgctcggtctgtccgtgttggtcgtgctcggcgggtcggtgttgggcgaaggccacgcccaccatgccgaccagcaccaggacgcagacggttcccatccagcgcgttccgattctcgggtctccgcattcctcgctcacgattctctgaattctctccttcatcgctttctcctttcccaggacggttggcacaaacgccatttctctttggggtgacaaatcgagcagtgactcggcgtaatcgacgcccgcctggccgctcgccagcacccagtcgtcacagacttcttcactcagtttcaacaatcggctcttggcccaccacagcagcgggtgccagggcatgatgcagaccatcagctcggccagcaatccgctgagatggtcgagccgcttccaatgcgccagttcgtggcagaacacgcccgccaggtcgtttgtctcggcggctctggcgatatcctgctgcaccaggagcaccggcggcttgcgccaacaccagatgaccgggctgcgcacgtcggtgctgcggcggatctccaacgcgacgtttaggccgaatcgggctcggacgctctccaacgtctccaggagtaacggggcctcgaccggttcggttttggccagcagtcgcagtcccaggccgaatcgcaacaacagacgactcaataggaggacacttgccgcgatccaggcaactcgcaagaccgtgctccacggtatgcggacggctgttgtctcttcgacgggggccgagactggaaccgccggcgccgtggcctccacagccaaaggttcgtattccaccacgccggcgactggtatggggggatcgatgttactgagcgggcccggcgcgacgaactctagcggttcagaaggtgcgggggccctggtggtcagtagacccaactcgaagtgctgcaccgagacgtacagagcaggcatcaccaccgaggccagcaagccgaccagtaggatctggtgggcccgtgcggcccggcggcgccagagatagctgcccgccaggcccagtccgagacaggtggtgccttgcagcaggagcaccagcccgagatggttttcggagactatctcgcccatcatttccgcatctccttcttcttctcgctgatcatcttcctcaggtcgccaagatcgtcctcgctcagatcgctctcgcggatcaagtgttggaacatggcgatcgcatcgccatcgaagacgcgtttgaggaaccccttcaccgaaccggcgcccgcttcgtcccggctccgcgtggggaagtagacgtagctcttgccgtcggggcggtggctcagccagccggtcttttcgagcttctgcagcgtggtcaagatggtggtgtaggccagcggcttttcgcgggccagtcggtcgcgcacctggtggacgctggcctctccccgctcccagacgacctccatgaccgcccgctgcaactgccctagtccgtcgagtgaatgcttgctcatcgcatgaacctccttatctttccgctgatactcgtcctacggttgactatcgtactatgttctatagtaggtggcaacaaaaaagaaaaattctctcagcaggggcggcgcaaggcaaaggcctccgagaggggacggtctctcggaggcccgagtggcggctatgggcttgtttgggtgcaggtaaacgcagcctgctaattgtactagtactgcccggcgctgccgaccgtgctcgggtggtcctccagcagcaaacgctccaacagttcgttggtctggcactgttcggccttcaattgctccatctcctcgcgcagctcccgacagaggtcctccttcgcctccctctcggcttcccgcacttctctgagttccaactccattcgttcgagctgttctttgtgctcaagctcgtgggggggcgggcccatgggccggtgcttcggcggacgaggcgccggggcgtgatgacggtggagttgcccctcgatctcgcggatctgcgcccgcgtctcatccagggcgcggcgcagctccatcgcttcggcgtcttcgtcccccatctcctcgagcatccgttgcatgtgctcggcccgctcctgcagggcgtgtagatgtgcggtgagttcctcgacctcacgccgggttttttccatcaggtggcgccggcgttcctgttgctcacgttcgcgctgggccaatgcttcctcgatgcccttcatctgctcgtgaatttcgcgcagctccatgtggacttcgtgacggcggcgctcggtgttctcacgcaactcttccaactccatctcacgctggcgggcccgctcggcgagttcctcgcgacgtcgcatgagttcttcgatctcttcctggataccgcgtagctcggcgtggatatcgcgctggcgatcctccaggttacgctgaagctcttccatttccatctctttgtggtgggccgcttcgagaagctcctcgcggtgccgcatcagctcttgaaggtgtcggtcgggctcacctctcggttccggcggcgcttcccggcccattctcgccaagcgatgctcgaccacttgagtctctgcgcacaactgttcgagtttggcctgcagatcgtgtttctcgtcgttcgtttcggtgtccatctcgcgcaggcgggtctcgatctcattggtttcgttgacaaggcgatctaatcgtgcggccatggcctcgcgatgttcggcctgctcgcgctgctcttgccgttggattctttgcatcgcgacccggtcgtgttccggatggtgatattgaacgtactcggtcgttgccttgtcgcgcgcgaccacatcgtgctcagggctcggcggctgggcataggccgcactggccaggaaaagcagcgccaacagcgcgatgatgaatgcccagggaatcccccttcggcggggcgcacaaacttgttctgcgatccttcgaattctctctctcatgactctctcctttactccgatgcgttgggtgggaccccttcttagcctcccccggtaagcgcgtgacagtgtctctctctcaaagcgaccgtcgacagcgtgggtggagatgctcggggtgggtttgacgcgaaggcgggggcctcgatcgtcccgatctacgtggtttcctcacatccatggcgctcctcctgagcggttcttcaccagaccctcctcgatccgactaacgttcaggattcacccgtattctaccgacacccatcccgggcgtctacctcggacaatacgtatttttttatctctcggtgcggcccatcccccgacgcaaagaagacagcccccacgcctctgcaagcatgggacccgtcataagtcattgttgagaagagagttacggtgtgtccttctctcgtctccaggccgcgacgcctatttcgattcctcctccgtaacaagccaaacctccgccggttgcgtctggatttcgaattgtaactcggtctgggccgtcacattggccagtagagcctccagtcgtcggcgtttctccgccatatcccggatggttcgcaccaggggcttgcgcaggtagacctgaaacgggatgatcgtctcctgctgtcgatctgtctggtcaatcattgttacgccgagcatcggtccgagtctttcgaggaactcgcccaccgatctggctccgtccatgaaccttccggcttcctcttcgcgcgtgggctgcgcttcgcccgcgaagatgcgaacattctcatcatcgaacaccgcgtggaatttgaattgtcccgttgcgatgacgacggcgtgctcggcggggcgctttttgaatcggatcgtgcgtcccatttcctcggtgaggagggcctccatcacgcgcagtttcgcctcccgaggcgcatcgctgcggacgatccaatcgcccggtcgttcgaggttgagcagttccttggggccctcatattcgtgatcctgcagtccgaccacatcctccagcagccggtggatgcgagatgtactgttgatgaacgacatgccacgtagctgcaatccaccatcccagtggaaacggaactggtggggcggttccgtcttgcgtgactccggttcgctcgcttcattgatgtaatagtccttccgttgcgggatgaacggcggaatgatgcgccgcaggatctcgccgtcctccaggcagtagactctgtcgaacccttgtcgccaggccggcgtggggagggcttccggttcctcagggggcacgcccagcatggcactgatcatctctctggctgcgttcagattcagagagccgaggacgtttccggcagggccgatcaggacgttcgtagaccaccgtgtgatatcgtatcgtccacaggtcgcgccgggacgctctctgcccgaaccctcatagaacgtcggctctccgccatcgatcgcaatgcggaaggggacatcggtcactccgccaaggcgttggtaggtgtcggtccagcgtcgctccagctccgccatcgagtcgcagttgtagatcgcgatgatggtcaggcccttgtcgcccaaggctttgtgaagcttcaccagtctgggcagatcgcgcggcacgctgggggattggccgccaaagtgaagcaggacggcctggcctcgcagttgggccagtgttaccggcccgccgttcttccagctcttgatgggccccaactgtggtgctgctttgcctatcagctttgtcagacccgtcggctcgagttccaccgtgccgaggtctaattccgattggtccttagggatcgtgacggtcagacgcttgtccctgagcgatgccgtgataggcgctgggatcccgttcttgccgcccgaaccgccaaattccaggacatactcgccgggtggcagcgggaagtcgaagggatacggcttcttccttgggtccgcgccaattacgacgttgtcggaccaacgcacattcgcggtggcccatcgcaatggcatgttcacgctctccaggtctggactgccaacgttgccgcgtacccgacagaccggtgcgagtcggatggtaaacgatttacctgcgtcggccggcgccagttcccataccgcaccgagaccccgctcctcgtgcaggatataaagccctcttgtcttccgtcctgctgggaggacgtccttcgtttggaagcgaaccgacccaccctcgctggatgtttgctcgtcgatccattccaacgtccccccgagcatgtcttcgcggaatgcaaccgacgtggagaccttcgcccccacgaccggcagcctgtcgtcatcgaccagtcgcaggaagatttgactcggatcgaggaggctgttcatccggattccggctgtttcaccaacgcccggctcagttaatgcggtttctagcaagaaaacccccaggtcgctcaggtgatccctcttcctatatctgtcctcagcgcgggccggcagaatcgattgccatgggctcaactccagatacgcctcgcctgattcagcagatacgcggtagatgtacttcgtgcgtacggcgatgttatcttgaatccccgtcccatcagggattcccattccggcaagcgtgaagcgcttcgggtccactgggacattcggatgaaactcggtgagcttggcgactgtatgatccgccagagtcctatcgtagagccaacgccgggcttctgcacgccgataccagaagacgccgttaccgtagtcttctatctccatgacctgctcacgaagcagtctgtcgtcgcgcacaaaccactgaaactttgcgatggagtgcccctttgccggcagtacccagattctgtatatcgagccatcggcatggctctccagatgccattccagaagcaggcagggctctccgttgagtcgtgactcactaacggtggggagatccccacgcgccgccagaaaacgggtgtgctgctctagggtgtcgatccactcgccaaagcgtacgtagcgtagcagcgtgggtccatctccgcgcccagtgcgattcggatcgtctccggctgtgatccacgccatgtgaccgtcgcggtcagagtcccgctgtaactgagtggtgacgatccggttgccccgcgtgatgatcacccgatggttgtccgaaggcgtagcgatgtaggatgatccctcctccgttgagtgaatcagtatttggcgcggcccttcagggtctggcgtgacgcgggtatcgacgcgggccttatgcccgtcaaaccactccgagcaactctcccgccacaagagggttcccttgtcctttgcgacatctctcctttcgatttcgagagttgcccgggcgctcttgagcttgctcaacgtacgtgtattcgcgcggatgatacgctcaacttccttgggcaactccacggccggcgaggcgattcccgccgaagcccaagtgggcggtgctaccgcctccgaccgcgtttgggcgaaggcgatggtgacagccagacacgccgcggcggttgcagtcgccagagaccagcgccggccactgtgaggactgctgcactggtcttctacaatccgccggatgcgaccggccagggttcgcttgcttgtcaccacgctcagtgccaaggcgctctggggttggaccgacagattcagcagggtgcgggcgtagcgggtgccggtctggccggcggcgatgacccaatcgtcgcaggcctgctcgctgagctgcttcaggcggcgctgggccagccaggccagcgggttccagggcagcacgcagagcaccagttcggtccagaggccgctgaggtggtcgcgccgcttccagtgggccagttcgtgacagacgatgccggtccagtcgatacctttgccttcgcccgccccgtgcggcacgagcaggatcggccggacgccccaacaccagatcaccggactgcgcgtctctgcactctttcgcagcagtacatcagtcctgaacccgagcttcgtcttggcgctttcgatggcgcgggcgatctcgtcgacgttgcatggctcagaccgctgggccagtcgaaaccccagcagaagacgcacgaccaagcggatcagcagggcggcgctgaagagggtccagacggccaggacaagccttgtccattcgataggctgagccgttgccgttgccgtcgccggcaggacgggcagagtcgcctcagaaacgctagcctgatcgatctctctgtcctgtgtcgattcgacggtagccggagcgtccagggcgacaaacgctggagggcgaacctcgaccaccaccggtctggactccagcatgccccattgatgctgcttgactacctggctaagcacaggcgccgcgatcgccgccaccagcgccaacagcaaaagctgatgagcccgaaccgctcgtcttctcaggaccagactccctccaagacccatcgccagggccgccgtgctctgccacgccagcggccagagccacgcatgttgcaccagtatgtcgccgatcatggtttcctctccgcttgctctgtctctttttctttgatcattcgcttcagttcgccgagttcgtcggcgctgagattgccctcggtgatcaggtgctggaacatcgccagggcgtcgcctgcgaagatgcgtttgacgagccgctggaccgagccggcgccggcctgctggcgggtctgggtggcgaagtagacgtagcttttacccgcagcccgatggtccagccaaccagccttctccagcttctgcatggctgagaggacggtcgtgtacgcgagcttcttctgacgggtcagacgctctcggacctgatggacactggcctcgcccagttcccagacggtctccaggacggcccgctgcagttcgcccagatcgtcgagtggtttccgcttcatcgctacttcctcctgaacgtgaccgctgtttctcactactccaatacaaagtactccatgccgtagtaggagtcaaatagaaaattaaaatcctctcaaattttcttttccgggcgacgcaggatttcacttgacggctcctgttccatggggtaaagtatatacacaacgaaactattgttgagatataacgatgaataatcactcatcaacaatccatcatcgatcaagcaggaccctgctgtgctggccgagcggcggaaaaacgggcggatcgggggaggtttattatgcaaaacaaacccaattatcgttgtttttgggccaggaatgcggatcgagccgggaaaacaaagccaaacaaaccgaatcaaagccaattggggtggcacggcgactatgcggagagccctggatgcgtgtctcggcgagaagcgaattgacaggcgaagggaaacaccgtagtttagggcagcctaaaaatgagtgaccacccaacacaactcagcgacagtctcgaggattatctcgaagcgatcttctggatcgcctcgaagaagggggcggcgcgggccaaggatatcgccaaggcgctgaaggttcgggccgcttcggtgaccggggcgctgcgtctgttggccgagcggaagctcattcactacgctccctatgaggtcattacgctgacgtcggaaggtcgcaaggaggccgagaagatcatccagaaacacgaggttctcaagggcttcttcgtcggcctgctgggcatcgacgaggacctggccgaagagggggcctgccgactcgaacacggcctgcccgatccgattatggagaggctactggcgttcaccgagttcgttcagtcctgcccccggtgtggggaggactggcggcggcaattcctggatggttgtacggcgcgtcgcgacgcgccttgctcagattgtctgaaggattgcctggggcgtttcgagcggggcgaatcgcagatgcaggccaccgccggccggcccctgacggagattcagccggggagcaagtgcatcgtcaagcgtatccggaaccggcggacggtcgcccggcgcctggtggagatgggggtccagtgtgggacggtggtcgaggtcaaggccgtggcgcccctgggggacccgatcgcggtgaaggtgcgggggtaccatctctcgctccgaggtgaggaagcgaaaaacatcgaggtggttccggtatgagtcttccgtctttcgggggatcgtacggagatctttcacatcttcggttcaggacggacggggcggtggaggtatagatagatacggtggggagggtcgtgtcggaccacttctgctgggcgagtgaatgaaaacgggccctgaaccaactgattcagagcccgtcgtatacgatcgaagaggccggaggttactcggtttcctgcgccttcttgtgcgcggcgacgatctgctgctgcacgttgggcgggaccggctcgtagtggctcagggccattgagtagctgcctcgtccaccggtgacgctcttgagctgtccggtgtactgggtgacttcggacagcgggacctgggccttgatgacgatgaagttgccgggcagcacgtcctggccgatcacgcgtccgcgtttggaggacagatcgcccgtgatgtcaccgacgttgtcggccgggatagtcacttccatatcgacgatcggttccaatagggcgggcttggccttctggatcgcgtcgatgaaggcgcccttgccggcggcgcggaaggccacttccttggagtccacgggatggtgcttgccatcgtagacggagaccttgatgtcctggagtggatagccggcgaccacgccggtgtgcatcacgtcgttgacgcccttggcaatcgccggttcgaactggcgcgggaccgagccgccgaagatgtcccaactgaactgcatggggggctcactgttgcgctcggtcggctccacccggagatagacctcgccaaactggccggcgccgccggtctgtttcttgtgtcggtagtggccttcggccttgcccgtaatcgtttcgcggtaagggattttcggttccttggtgttgaccgaaagcttgaaccgcttttccatcttctcgagcactatccgcaggtgcaactcgcccaggccattggccaccagttccttggtctgcgcatcgtggctaatcttgaagcaggggtcttcctcgcacagcttctcgagggcgccgccgatcttctgttcgtcgcctcgggaagccggttccagcgccagggagaacatcggtgacgggacgggcaacatcgggaatgagccggccacctggccgccatgtacgaggtcgcccacccggagttcttcaagttttgccagcgtgatgatgtccccggccacgccggcttcgacttcggtgtagtcggttccctgagacttgaggatatgtccgggccgcagtcccttcttatcgttattgtgcatcagggtcgtatcggacttgagcgttccgctgaagaggcgaacgctcgagtacttcatgttggatttcggatcgaagcccacccggaacacgagacccgccagcggaccggccgcgtcggccttcagttccatgacggtctcaccatcgattagcttcgccggatcagcgtcggccggcgacgggctgcattgagcgatcaggtccaacaactccgtcacgcccacttcctctcgtgcctcggtgaagagaatgggcatcaccgtccctgccttgagcgccgtgacgaagaccgaggccacttgctcggacgagatttcctcatcattcaggtaacttatcatcaaggcatcgtcggcttcgatgacgctgtcgatcagctcggtgtgcgcctgggccacatccatcacgggggaatcgccactgtcattggtgatgcagtcaatgacagaccccttatctgccgagggtagattggcgcaggcgcagcggcactgcgagccgaaggtttcctggatcgtctggaccagttcgcccatctcgacgttctcggcgcccatcttgttaatgacgatgatgaccggcttgttcgcctctcgggccagttggaacatcttgcgggtgttggtctcgatgccggcggtggcgctgatcacgagaatggtcgtctcagcggcggggatggatgtaatagccgggccggtgaagtcggggtaaccgggcgtgtcgatgagattgatcaacttgccgccgtgctccacgtggacgatggctgagaggatagagtgctgatgctccctttcttcgtcatagtagtcacaggtactggttttgtcgtcaacgctccccaggcggcttgttacgccggttttgtggagtattgcctcggccagcgaggtcttgccgctgccgccatgtcctagcaggaccacgtttcgaatgtcgcctgttgctgccactttacaacctccaaaaaggttttctaccgcgtttctcttcctgcctccaaaaccctgaatgttataagaattggggcggtccactcaagaggtttttcgtcaaattgccgacttgggcctgttttacacaggaaaaacgcaaatgtcttggccgatggcctgtggttggagcgcattggcgtagttaggtgagggcaattcttgacgagaagacccgcgttagaggtcctggacgaggcggtgtatccgctcgtatagggggatcagcaagggcgtgacgatacagcctttgcaggtccaatgaaacagggtttcctgctcgtaaatggggaattcgttcggggcatacggctgacggacatactgagcgacgcaacaaggggggtagccgaacaggaatccctcgattctgaccgtctcggcggatttgtccacggggaggttatcgaagtgactggcgtacgcctcccggtaggccggggtcctgctgaagatggtttccgtgaacgccttgccggttcggaccgtgcgggacacctgccggacctgcaggccgctctgttccagggcctcgaggccgggcttctccagggacttttcccagcggctcagtggcttgagaccctctcgcgtcagcagggccagataggccagttcgaaatcgacggttttcagataccggagcgcctgcgctattggacgagccaattccgcctgcatatcagttgggcagtcagaaggggtcattcgtcactggcctcgatagagttctgccaccgttcggcgaataccgccaggtcctcgatatcgaccttgcagtccctgttcaggtcggccggctgatatagggtgcccaggtctccgcactcggagggtagctcgaggatcttcagcagacccgctacgttcgttcggtccgcgccgtggatgtcgctgaggtaactaaatgagccatgttgcatgaaatgccgggcgatttccggcacatccattgatgttcccgagttgggattgacgatttgccagtaccccatgttgaccggttggccgcagatttcacaccattccaggcctctcaacatgtagttgattttatacacgcccttggcgtcggggctgtcgggctcgaggatcggcaggtgatcgatcacctcggcgcaccgttgggccaattgaattccatcgggcaagaggttttcgtcctggtcggcgtcgtagagattcagtccggccgccagttcctcgctgtcggccaataggtctgcgtccaggtcattcgcatccggggcgatccgctcggcggatgccgcagtgtaatccagtgacagttggtggtcgttgggctcgtatgggaatcgaagctcaagtgtcctggcgagcctggcgatatcgaggcggcctcgatggatgtccccggcatggctgaacgatccatgctccatgtagtgcgaggcaatgatgggaatatcgaggttgagtcccaaccttgggttgatgattcgcacagagcccatgttaacagtctctccacagacgtcacatgtctccagtccgaacaacagccactcttccttgcaaatctgatgggggctcgtgacctccgccttcaagggcagttctgcgatgacttgcgcgcaccgcatggccaactcggctccgtcggcggcgccgttgttgttctgatcgccttggaatggctggtgtccgagggcgacttcttcgcgatcggccaggaggtcggcgtcggcatctgcgtcgagggcgacctgatgcttgtcggccagcgccccgaccggcggatcggccagcacggcgtgggttgccaatgataatgatatggcggtcgccgtaccggcggtgaggacatgacgtctcaaacgtcggcctgcttgggcgtgttttctttgggttctcttgagctttctcatgtcaatcctctctagggataaccgttcaccgcaacactcgaatccatcggcattgtatcataaggacgaggcgcggtccagagaccgcgccgggaccacagcgttgccgccggttcttatgaagcgactcggtttcgcctctgctctcaaatacgccgattggtaaagagcgtttaaagggaggtcggcaaaaagtcgtgggaacgtcaaaaaaaatcggctgctctgccgaccagtgtcacgattgattttattggacagttgcagacgtcgccacttgagaccgaattgttgatcaatatgttgtggttctggctgcgagggtctcctatgtcgtggcttcggttatggggcgttcgcctctcggctttggaggtgactaaagaaaagggcgccttcctgccgatatgccacaagtcttaagggcagagcacgacgggttattttaggatgcttgaggatggacaagaacgaactgattgactgcatttgcgaaatcaaccgcagcgcgaagacagaatttctcgcccagttctcggaagaggatctgaccgcctacctcgagcatttgatggaactggatctgcacgagttagcggtctgtagctagctgccggtctctgacgttgtctcgccgccgccctcggactatgggtgggctgatgtcgcgatgcccggtgacatcagcagtatcgtcccctcgccaggctttgtttctccccccgcagtagccattgcgtcgctgaacttgacgccagagtcccctccgtggtcctcgttacgatcgagggcgctgtcggtcaggagttgaccggccaggttgaggcaggctgccgcacctgccttcatcgcgaggccggcggccgtgcgttctagcgcgatccgtcgcgggaaggggcggcctctgagtcgttctctttgggcttgaacgaagcatcgaacgagatcggctgtggggcctcttcttcggcgaccggcgccgagagcagttcgagattgttctgtttgaaaccgagcagggttgggaccattggggtcggtacgtaaaaggcaaaatcgatctctatggctttcttctctttgtcggagctctgaatcgacatcacctcgtggagcggcttaaattccaaccgccctttagcgccgatgtagccgatgggatacacagcttgcccctgtccggcgagagggtcatcggcgtcggctttcggaacgcaaaccacgcgcagttgagagagcgtgaactttcctgcgtcctgcagcgcgttcttcctgatcccgacgcgtacgagcatgagcttctcgccactacgagccggcagcgcctggccttccgtgtcgcggagcgaactgggggcctcccagacggccttgtcggacacgctcagcgcgggcttcgtcgtcgcggccggcacgtccttcttgtgccgattcagatggagttggtcgacgtaattggcatgcagaacggcaaaactcctgggcttgcccagggccgcaaagctgcccttgctgacggtcccaaagaagccggcgatgaacccgtcgggactgagcatgggcttgttcggctgggccgggtcgatgttccgctcgttgaaccgtgcatacggatagctctggggcaggggggccgtcgccaaggccagcagcaggttgccggtgatgatatacccgaggatgatgccgcaaaccacgcgtccgatgcgctcgggccacaggccgagttcaaccttttccttgccgatctgcatgacaatcgtctgtaggattgccaaggccagaacgaacagcaacaagaagcagatcatctgggcccaggcggcgatggcggccgagtatttggccaacatcgtggccagcgtctcgaagaatgcacaggccacgaagctggcgaacagcgcgttgaagatcaacgcgagtccttgcgtcagggtccccttgaggtatagaaccgccgcacagcccaatatgattgcaagcattaccaaactgaccattccacgttctccgttttctcagggatgccgaccgcttcgaggcggcaccaggatgttcttacttggctgcggggcgccccggtttcttgcccgacgagagcactcggagcacttcgttgatcgcggtttttccggcgatcacctttctgagggcctgctcctgcaagtacagcatcttggcccgtcggaattgcatgccgagttccggcaactgcttcacctggcggatggccttgcgcagttcgtcgttgagtacaatcatctcgaagacgccggcccggccgacgtagccggttccctggcactggtcgcacaccgaaggcttgcctcgtttgtcgtagacctctttacccggacgatacagcaccttggccttttcggccgggaggttgaatttcttcaataactctttgttcggagcgtagccttgcttgcactcatcacatagcgttcgcatcatgcgctggtcgctgatgccgatgagggtctcggcgatcaatttcttgtcgccaaccatcttgatccatttgcccagggcctgcaagacactgtcggcctgcaggacgacgtagacgagcttgccgtcctgggcggcggcgctggcgattttggcggtctcggcgtcctcgcactcgccaatgccgaccacgtccgatcccatcctcaccatggactggagtttcgtcgcatacgtgccggttcccgtgtcggtgggactaaagacgtgctgagtgatattgagcagttgcgtcgccggctgtttctccagcgtattgatattattaagaaaggcgtcgtgatgtcgcaccagggcgtacagcgtcgtcgtgattccgctcttgcggggcccggcgatgaggaagagcccctgagttttctcgcgcatatggtccaggtgttcctgctgatcgggggccaatcccagttcgccgatacgcaagtcgtgttctttggagacctgtttcaagcggacctgctctccggccgtcgagccggcggacatcacttcccattccacgttttgcttcttctgtgccgtgcggaatttgcccttttgcggcttgcgcttctcgctggcgtcgagggcggccagttccttgaggaagtggataaggtactccatctgttcgcgcgggacggcgggctgcttggtggcggccccgtcgatgtggtaggtcacctcgtagctgtcgcctttgggagcgaacatgacggtgctggctcgacgccacatggcgtctgtgagcacgtcgtaggcggttcggtagccgaagaacatcggggtgcgcggctcgggagtcgggacttcgttgttgttggcggtgatgaactggaagttctccatcgcctcgagcttttcggacttggcgaaggtgtgtttgatatgctcgatcgtcaggactcggtcgaaatcaagcacgcgggtgttgcggtgcctgacgtaggccagccccgtgccgccgacggcggccaggaaagccagcaatccgacgatgaagaccggaatcagccaccaaagcaggatgcctagggcgccggctccaacgatcagaccgatccagaagccaatgtttgtgtcgactgcttttgcatccttgtgggcccaggtcaccagcagaaaccagaggaaatacaggatgaggaaggcaatcagcttgacgattgagacgtagccgccgtactcgatggacattaacagaaaatctggcattgaacgctccgttaccacaaagttgtgaccgcgcgatgaacggcacgcgcggtcttcgcgtcattgactaaaggatgcctccggtggttgttcgaatccccttcagcgccatcttgagttcctcggtgtttggcgccacggggtaggcgtccttgggatcgacccatccgtcttcgatgagtttgcagaggctgtccgtcaggtcgaccatgccttcgcgctgggaccctcgaatcacgctgggcaagtcggcctcgcggccctccgagatgagctttcgcacggaaggattggccaacatcacctcgacggccggaacgcgcgggatgccttctcggatgcagggcaggagggcttgactgacgattgctcggagggccagcgccagcgtctgtcgcaccagttcacgctcttcctgggggaaaaggtccagcaagcggtggacagcctgtgaggcgttggacgagtgcatggtccccatgacgaggtgtcccgtctctgcggcgcgcatcccggctgtgacagtccgggcgtcacgcatttcgccgacaaacacaacatccgggtcctgtcgcatgaggtaggtcagcgcctcgacgaagtccggcacatcgatcccgatttctcgttgcgagacgatggctttgttgtcgttataaaggtactcgatcggatcttctacggtcacgatgtgacaagcacgcgtttgcgtgatatggtccagcatcgcggcgatggttgtggtcttgccggagccggtggcgccgaccaccagaaccagtccctgatgcgccgcggccacctgctccaatacggggggcaggtgcaggctctcgaacgagggcacatgggcgctgacgcgccgggccaccaggctgatcaggcctcgctggcgaaagacattgatccggaaccggtgctccttgccaatctcatgcgcgaaatcgagtgtcccgttcttgatgaagaagtccttctgagtcggactcaggatctcgaacactaactcttccatgcgctcaggggtgagcacttcgccggttgtgttcttcagactgccctgcagacgcagcttgggcggttgtccgaccttgagatggatgtcgttggcctcggtcttgatggccactttgaagtaccggttcagctgaggctcgtggtccagtgccttgtgggcatccaggggttgatctggtgtcatgatcttgctaactccataaacgaaaagaccggccaccgtgtgccggttgccctagcacaagccaacaacccgccgaccgtctgcgagaagatttgcagcgacaaacctttatgactacgtattataagacacagttccacctgttgtcaagcctgatactttcaggattcgcccgattctccgcctctcttaacaggattgtttttggtttagttgccgtgtcctcctgatccgtgcatgtggctcctggtgggcccgataatctacttcctggaggggcctgccggcgtgctggggcttttgtctttgattgttgcctggagtcacgctatagtcggcctgcgcggcctccggatgtccgggaggctgtgcgattgggatgcttgtgggaattggagccaagaagggtctatggcgcgtggcttgttttacaatctcggtagaaaagtgggccccaaggtccgcaaggccaggtgggtctgggagtccgtggcgggcaccgagaccgacaccattcgactggagcacggcgttggtatggacctggcccaggaggcccggaggcagcttcaaggggaccctgagacggcgcaggtgctggaggaggtcggtggccggctggttggtcgggtggcgaacaagctgcgttccttcgagttcgaggccttccagggcggtgaaccgaacgccttcgcgctgccgggcggcttcgttttcgtcagtcgtcccattgtagaactctgccagtgggacaaggacgaggtggccttcatcctggcccatgagatgggccatgtcatcaagggccatgccattgatcgcatcgtcaccaattcggccgtctctatcgcctcgcgggcgaccccggtgcgcggcgttctcggcccctggctgcagcgggtgggggtccagttcctggagaccgcctattcgcgggatcgagagctagaggcggatcgactcggcgttcgcctggccgcggcggccggctacgatccgaaggcctctctgaagttgttcgagagcctggcggcgataaaggcctcccccgatccacttgacctcggggcgtatttctccagccatccgaccttcgacgtgcgcatggagagcattcgccagtatatgcggcaatggtaactcagataggaggcgggccggttccgccggccagggcgacggccagggccatgtagattgtgacgctgatggagtcgttggcggttgtgaccagcggacctgaactgatcgccggatcgataccgatgccgcggaacaggaaggggagcatcaatcccagcgtggtcgccaccatgatagctgagaacatcgcggtgccgaaggcgaacaccaggcgggcgggttctatggccttctccgggattctcgtatggatcagaatggtgcaggccagagcccccatcaggccgcaactgagggctaccagaaacgcgatgcggacttcccgagtcaacaccgtgctgaatttcaatgccgccaggtgaccggttgcgaggccggagaccacgatggcggaggtctgaagcccggcattgccgctaatggctgcgatcatgggcacgaacgaggcggcggcgaggaacacgacctcgttgtatgtcttgaagaaggtcatcaccagtgccgtcacggctgtcccgatcaggcagggcagaagccaggtcatgcgaatacgggcggcgtgaaaggccgagaagctctccaactcgtccgggtccgtaccggccatcgtgtagaggtcctcggcggcttcctcctcggcgacctcgatcacgcggtcggccgtgatccggccggcgagtcgatggtccttatccaggacgggggccacgattagatcgttcttactaaagatattacggacctcttcctggtccatgtcggtctgcacgtagatggtgtccgggtcgatcaactcgccgaggcgcgtctgctcgggccgggtcagcaggaaacgcagacggacgtcgccgacgaatttcccatcctgatcgattacatagacggaatagaagtcctcatcgatctcagcggcgcgaatcttgctgaccgcctcggcgacggtggcgtcctgggccacgctgatgaccagcgggtccatgatcccgccggccgagtcctccgaatagcgcatcagcttgtggatctggagacggtccgtttgaggcagactgcctaatacctggtcggcgaactcgtcgggcatctccgccaagaggtcggccgcgtcgtcgtaatccaactcggagacgatcttcgggatctcgtgatccttgagcaactcgaaaagacgctcgcgcgtggcttcattgaccttttcgaggacttcggccgccaccggcgtctccagcatgtcgaagatctggcgtcgccggtcattgtccaccaactcgaccacttcggcgatgtcactggtccgctggtcatcgagaagggcgcggaggctcgccgcgtcctcggattcgagcaagagtccaatctcttccagtagttgtttctgctcttcggccatctgcgagcgcacaccgtttcccgttactcgtgctatcgaacgtggcaccaccatctgtcagtcgtgacaaaatcacccacctggcggacaagaatagtcgaatcagttatgtcgggcaactgttttgtcatgcgaccggtcctgacagatggggtcggccttggccaggccgggagaaggccctcgatttccggccatgcatttgctatactggcccataagtggtttatctgtgaggagagatgatggtcggcccagggccgataagaaacacgtcgaaccatcacgcttgctcctccaccggtctttctgagggttgtgtgaagaccgccgtagctgccgccggaactctgacgacacaagggacgcgctatgccaagatcgatcgttgcctactttgtttatgggatcatggctctcgccatggctggttcagcccggggggcttgtcctgtgggagatctgacgggggattgccgggtggacccgctggatctgtcggctctcttcgaccaatggctgctggaggttgacaccggggcggacctgaacgccaatggtcgggtagagctgggggattttagcagtctggcccaggcgtggcgcgccgcgccgattcccttggtgatcaacgaggtcatggcttcgaacagcaccttcgtgcaggatttgcagggcggtttcgacgactggatcgagattcacaatgccggtcggacgacgatcgacttggcggggatgtacctgacggatgatcccagtgacccaacccaatggcagttcccgaccgacaatcgcactcagacggcgattggtcccaaagggtacctggtcgtttgggccgatgaggataacaccggcgtcatgctgcatgcgcacttcaggctggacgccgatggagatgaggtgcacctgttcgataccgacggcgtaacgctcatcgatagcctggtctttggggaacagacctccaatatgtcctacggacgttaccccgacgccggcaactcccagcggttctttggctttcccaccctggggcgacccaacaacgaagggtatctgggggaggtcggtcccctgcgattcagtcatgaacgtggcttctatgacgatccgttcgatctgacgatcacttgcccgacggagggtgtcgagattatctacaccaccactggcaaggcgcctgatgacgaaagcggtcgtttccgagcgggtctgacctactccgacccccttcggatctctcggacgaccgccttgcgggccatggtcgtcaagcctgggtggaagccctcggagatcgcgacccacacgtacatcgtcaatgcttcggagagtattcgatcgctgcctgtcatctcactggtcggcgacaaggggcaaaccttctatgagcccgaaggggtcatggcgatcgtcggcggcacctacagcaacggcgtctggacctcgtcgggagcgggcagttataacaacgtactgaaccggggcctggagcgtcccgtttcgtgcgagtggatggaccccgagggggacgacatcttccaggtcgattgcggtctccgcgtgcacgggagcggttggatgcggccgcggtacattcggcagaatggtcagtggaccgggaacggaaaattcagtttgcggctctattttcgaaaccaatacggtccctcgcgcttgaccgtccctctctttgacgagtccgacgccgagcagttcaagagcatagtccttcgcggcgggcataacgatcggacgaatcctttcattaaggacgagcttctgcggcgtctgcacaaggacatgggccagcgggccagcatggggaacttcgccacactctttgttaacggggagtacaaaggctactacaaccccgccgagcacatcaaggaggaggcctgccaggaatggttcgatagcgaccagccttgggacatcatgacgatgaacggcattcgggacggcaaccaggagtcctggaacgagatgctcaattcggcctgctccaacaatctggccgtcgatgcgtcttatcgcgaggtgatgaacaaactggatatcgtctcgttcatcgattatctcattattcgcctctggcccaacgactgggattggccgcagaataactgggccgcggcggccgaacgatccgcgaccggtcggtggaagttctttgcctgggatgccgaggggaccttcgtgtcgagccagttgcatgtcgaccgattcggagaactcaacagccagaacaatgccaacgcgcaactctaccgggccctcaaggtcaacaagaacttccggcaactcttcgccgaccggctgtacaagcatttctacaatggcggcgccttgagcccgggcaatatcgaggcgcgattctccgacctccgcgatcagttgcgcggcgtcatcccgaatatgaacacgtatattatcgatggatggacgccgaatcgcgcccaggtcttcattgacgcctgtcttcgagaaggcatgtacaccttcgccggcccgaccttcgccgtcaacggttccagtaagcagggtggttacgccattgccggtgacctgttgcagatgattccccctcgacagggcgcgccgatctactacacgctggacggcaccgatccgagtggctctcagatgtcgaccgagacgcccatcgtgacacttgtggatcgcgctgcggccaaacgcgtcctcgtgccgaccgggccgaacgtgggggactggaccaacattcggggtttcaatgattcgaactggattctcgtcgaaggctatccgggcggtgtcggatacgaacacagttctggttatgaggactatctcggcgtcgatctcgagcgtctcatgtacaacaccaacggttcctgtctcattcggataccgttctctttctccggcgaccggggcgaactgggacagatgaccctggagatgcaatacgatgatgggtttgtcgcgtatctcaacggggccgagatcgcccggcgcagtttccagggcgaacctacatggaattcgactgcgacggcctcacatggagacaccgacgcggtggtcttcgaggccatcgatgtttccagctccctcctatcgttgcgaaacggcaccaatatgctcgctatccaggggctgaacagttccgtcaccagttcggatctcctgatcacccccaagctgaccgttgctcgcgatgttgtcgcagaggtgcctgacggggccatgctgtacgccgcgccgatcccgctgacgcaaagcgtgcgcgtcaaagcgcgtgttcgcaatggcaacatttggagcgcgctgaatgaggcgtcttttgccgtcgggccggtggccgaaagccttcgcatcagtgagattatgtaccatccggtggatatgggcggcccggacgatccgaacaccgagtatattgaactgatcaatgtggggcctgtgacgatcaacctgaatctcgtcagcttcaccgatggcgtcgattttactttgcccgagattgacttggcgccgcaagaccacgtgttggtcgttagagacctcgccgctttcgaggggcgatacggctcggaacttcctgttgtcggggtctatcaaggcagcctcagcaatgccggcgagcgcattgtgttgcaggatgcggtcggcgccgtgatccaggatctgcgatacagcgatgattggtacgacatcaccgacggcgccggtttctccctgacggtgcggcgtccagtcggcggtgtcccgatcgcccggaaccagaagagcgattggcgacccagcgccgccgcagggggttcgcccggtttcgacgacgccgatcagacgccgcctttaggggcggttgtcgtcaacgaggtgctcgccaattcggccggtggtgttcccgattggctggagctccacaacacgaccgatcaggcgataagcatcggtggctggttcctcagtgacgatgacgacgccctgaccaagtacgagattatggaaggcgccgtcatggctccctatggttatctggttctcagtgaggatcagcatttcggcaatgacggcgaccccggatgtcacgaggcgttcggcctgagtcgcgacggcgagaccgtctatttgcattcgggctttgaaggcgccctggccggctataacgagcaggtgacgttcggtccttccgatccgagtgtcacgctggggcggcatcggaccagcaccggcgctatcgatttcgttcccctcagcgcgcccacgccgggtcaggagaatgccgatccacaggtcggaccgatcgttatcagcgagatcatgtaccatccggccgggtccgaggacgccgagtacgtcgaattggtcaacgtgaccgatgcagatgtgacgctctatgatttcactcaggcggcgccctggcgtttcaccgacgatcccgacaatcccagcatcgaattgcttttgccgaccgacccgcccgtgacgttggcgccgtaccgttacctcgtgctggtcaaggaccgggcgcttttcgagagcgtttacaccgtgggtgcaacggcgcagattctcgaatggccggccgggagcctggacaacgccggtgaagtcctgcaactcagcacgccgggccgtctggatgacgaaggacagcgtccctgggtcgtcatggatcgtgtggcctacagtgacggtgcgcatccggaaaatttacctggcggcgtcgatccatggcccgtcggagccgatggccgggggctgtcgctgacacggaccgttcccgcccattatggcaacgaccccaacaactggcacaacgccgtcgattcacccggcgccagtcgccgtcgtcccggctagaccttgatgaaggtcttcttgcggtacatatagaagaggatcagccatatcacggcgacgctggcgacggcccggacgaagctgtgccaatcccccgtccattggctcagtccctggaccaggatgtcgcccaggtgccggaagtcgaatacgtgcgtcatcatgtagatggcaatggcgttggtcccgatgacgacgaaggggaaggccagaaagcgaagccggagcacgtcgatgaccaggtagaaaacccccagcagcagaaggctccagccaccggcgtagagcaccatcgaactggtccagaggtgcttgataatcgggaagatccgtccccaccagtgtcccaagtagatgcatgcgacgcccgaggccaggaggaagagcacttttctgactttccccaggtcggatcggagcaattggcctgcgaacgcgcccatcattacggtcgtcgcgaaggtcatgccgctgagaatccacgtatacgtcgtgccatcctggtagggacccaggatcagtttgtcaagatagatggcgagattgccttgctcggtgagttgcccggcgccgtgccccggtacggggaccagcatgagcaacgcccagtacagcagcaggagcgcgaccgtggcgattgcctgccaatgcgctttcaggttcaacaggaggaccgaggcgatcagatagccggcggcgatggcctggagggtgttgctgtagagacggagcgtcgccaagtcgtactcgagcaagcggccctgggcgatcatgcccagaacccacagaatgaccactcgaagcatgatgtgcaggtagattctggccttgctctgaccctgaccgagccgcttggcgaaggaaaatggcattgccgcacccaccacgaagagaaacagcggcatgatcagatcccaggcgacgaatccctcccagggcatgtgccgggtgtggggcatgatgacctggtcaaaccatgggctgttgagacccttggccagaccgccaagtatcccgcctcccccgatgatccatagcatgtcgaagcctcgcagggcgtcgagcgataccaggcgtccttccttcgcaacggcgggtttgtccacaggtatatccattcgagaatctccttcttcccttgtatcacaaggccactcctgcaccggcagggggttgacacgcatgccccggccgcttgtcgggggggcatgcgcaacgttgcggccaaaataacgccgcgcagccgcaaattcaatcctcattgtgcggcacacttttctggggggatatgcaagatatgtgtaaccgatgtgccttgagcattcactagacacttgagttggtgtgcagaggcctatctcgccggcgaaaatccgtcaaatctggatttggccacaataacgcggcaatttcctgcgtctatacctgtctgatggctttggcttttatcgggtctgatgcgctgtgaccgtgtcgtcaaggcgttttctcattgactttagtggtgtaaatagagaaactacattatttgggcatgcttatgaagcaacgcaaccatggagaagtggaccggtggaggctcaggtcgggagggacgcccctggcgatgctgctcttgctggcgggcgctgtcctggtcggctgtcggtctccccagcaacatcgcgagaaggctgatgaggtcgcttcggagattatcgcggccaagcagcaggaggcgctgggcaagaccgagccgttcagcatcgaacgaccgagcgatctgcttcggcgtcgtctgctggtcgagcagggtctgctttttgccgatgaggcgtcgctgggaaccgaccaactcgaacgcatcccacactggcccgaggacaactatccgctttcagtgacctcgcccgatgcggcgatcgcgattgagccgaacaagccgctcaagctcaccttggacgatgtgctgcagatcggggcgcggaacagcttcgactatcagtcccgcaaggagagcgtctttcggaccgcgcttaacctcgatctgacccgcaacgacttccgcaacatcttccgagccgacggggacagcacgctgaccgccgatacgaggggcgacgagaccgttacgacggtggactccggcgccgtggcgggcgtgacccggaccctcaagaacggcatggacttgagtaccgcggtggcgatcgatctggcgaacctcctgacgcaaggcggcgcctcctcgctggggctcagcgccgatgcgagtttctccgttcccttgctcagaggagcgggaaggcatattgtgaccgaatccctgacgcaggccgagcgcagcgtgatctacgaaatatgggatttcgagcgtttcaaacgttcgttcgccgtcgacgtggcgcgacgctacttcgatgtcctgcgccagatggatgcggtcgccaacgcccgcgacaactatcgcagcgccattacctcggcccggtggtcgcaacgacgggccgatgccgggcgcatccgcgagatcgaagtggaccaggctgtgcaacgtgagctgggggcccgcaacaattggatttccgcgcaggagcgactgaaagggaatctcgattccttcaagagtgcaatcggcctgcctcccgacgcactgatcgaactggacccgaacgatctcgtgcaactgcgaacgctctcggaagaaacgctcgaaacgatgcggaaggcctctcagcgagagacctccgaaacggctcccgcggccgatgcaccggtcgaactggtgccggccagctacgaggacgccgggacgctggaactggacccgatggtcgccgtgcaactggcgctggacaaccgactcgatttgcaggcggcgatcagcggagtttacgacgcccaacggcaggtcgtggttagggccgatgccctgagggccggcttgaacctgggcggttcggcagcgctggcagacaatgacgatgatggcagtttgagcttcgatggggcgcggtatagagccttgctctcgctggatctgcccatcgaaaggacggccgaacgcaacgcctatcgcaacagcctgatcaatctggagcgggccacgcgggacgttcagtcgctggaggatgacgtcaaactggccatccgcgatcagttgcgcacgcttctggagtcgcgtgagagtctgaagattcaggcccaatcggtggtggtagccgaaaaacgcgtacgaagcagtacgctttttctcgaggccggccggatagagattcgagatttgctggacgcccaggattcactgctctcagctcagaactctctgacttcagccgtcgtaagctatcgtattgcggagttggaactgcagcgcgatctggggcttctcgaagtaaacgaaaagggattgtggcgggaattctcgcccgaggacaacgatcatgacagctaaaaacggcaacaggaccagtggtggcggcaaatccttcaaggtggctggcgccctcgtgattattgtggcaatcggcctggcggtcgtttggctcaaggtggtccgagggggtgagtcggcttctatggaaatgtccaccttcgcagccgaacgcggacctctgaccatcagcgtgctcgagtcgggaacgatcaaatcccgcgagcaggagatcatcaagaacgaggtcgaggggcgtacgacgatcatttccctggttgccgagggaaagcgggtcaaggagggagatctgctggttgagctagacgccagcacgatggacgacgacaagatcgagcaagagattcggacgatgaacgccgaagcctcctatatcaacgccaaagagaccttggagatcaccaagagccagacgatcagcgatgtgaacgtggcggaactgaccctggagttcgccatccaggatctggagaagtacaagagcgggcagttccccaacgacgagacggccgctgagaaccagatcgagattgctcgtgaacgactcacccgcgacgaagagacgctgaaatggtcgaagcggctcttcgaagagaagtacatctcccagacggaactccaggccgacacgttgaccgtcagccaggccaagaacaatctgcagttggccgagaacgattatcgactgctgaacgagtatacctacaatcgccagatcaagcagttgggtagtgacgtcgatcaggccaagatggccctggaacgcacccaggcgaaggcccgggccgacgtggttcagtcagaagcggatttcaaagccaaggagcaggaattcaatcgtcagcagaccaggctcgccaagctgctggatcagatcggcaaagcgaaggtctacgccccggccgatgggatggtgatctacgcgacgaccgccaaacgcgggggctggcgtgataaccggcagccgttggatgagggcgtcgaagtctacgagcgtcaggagttgatctatctgccgacggccgattcggcgatggcggaggtggatatccatgaagcgagtctggagaaggtcaaagttggccttcccgccatcattacggtcgatgccttgcctggccaacggtttatgggcacggtcggtcgcatcgctccgctgccggattcggcgagcatgtggatgaatccggatctgaaagtctacaactcagatgtgtatctggaggatgaatcggaggaattgcgcaccggcatgagctgcaaggtcaatatcgttgtcgcgcagtaccaggacgcggtctacgtgcccgtgcaggcggtgattcgggtggccggtcagcccaccgtctacgttgtcaaggaggatgggacgatcgaggagcgaacggtggagatcggtctcgacgacaacaagatggtcgtgatcgagagtggtttggacgagggggagatcgtgtggctgacgcctccgctgaagtccgccagcgtggagtccggctcggaaggcatgctgggtggggtcagggacgccaatggtgtctccgatggcatcacgcagcagatcagtgacaagctcaaagccgccaatgaggccaagcccgaagcgcctcaggttggcgaggaggggcaggagggctctaaggggccggcctcgaagcagatggaagatatgcgcaagggtatgcagaacatgacggccgagcagcgcaaagaggtcatgaagcgcatacagaatatgacgccggaacagaaggcgcagttgcagaaggcgatgcaaggtgcggccgcgggcggccagggaggtcgcggcaggccccaggggcagggcggacaacccggcggcaggccggccggacgccccagaccgccgcagggcggcgccagagggggtcagtagatggctgaccaagccccttccagcgatcattccgatattgtcaagctcgtcgaggcgcgcaagacctaccagatggggaccgaggaagtccgggctctggccggtgtggacatcgccttcgaaaagggcagcttctgggcgatcatgggaccgagtggatcgggtaagagcaccatgatgaacgtcctggggtgcctggatcgcctgacctccggctcctattacctcgataatcaagatgtcagccagatggatgacgattcgctcagcgaactgcggctcaaatatctgggattcatcttccagagtttcaatctgattccccagttgtccgttcagcggaacatcgagctacccctctactacctgggttgggatgccattcgcagcgctgagcgagcgaaggaactggccgaggaggtcggactgggcgatcgcctgaaccatcgaccgacggagctttccggcggacagatgcagcgcgtggctgtggcccgggcgctggccaacgatccccacatcatttttgccgatgagcctacaggcaatctcgactccgtcacgggcgtccagatcatgcagttgttgagcaaattgaacgagcagggcaagaccgtcgtcatggtgacgcatgagcccgatatcgcgacctacgccgagaatcggttgcacatgatcgatggcgtgatcgatagaatagaaacaggtgcgcatgagacagacgaagatcgccaggaatatctggctcggcattgagaatctgctgctccacaaactgcgttcgttcttgaccatgctgggtgtggtctttggcgtgggcagtgtggtggccatgctctcggtcggtgagggcgccagccaggaggccctggctaatatccgcaagctgggcagcgacaacatcattattacatcggtcaagtcggtcgaggatgagcagtccagcacgcagcattcgcacatgagtatctacggcctgacctatgacgaccaggaccggattcgcgatagttttgcacgcattcgcaagacggcgccggtcaagctgatgcgcaaggagacccggctgcgcgagcgcgccatggagctgcgcgtggtggggacgacgcccgaatggttcgcgctggtgccgcgtgatattatcgccgggcgcgtgatcgtctcggccgatcagcgcaaacaggccccggtggcggtgctgaccgagtttggggcccgcaagatcctggccaccgagagcacgatcggtcagaccgttcgcatcggcggggatgagtttgagatcatcggcatcgtccagagtgagagcggccaggcgggaaacattcagatccctgacgaagacgtggacatctatatccctctggaagtcgcccgcgactacttcggtgatatgtttaccaagcggacctccggttcgttcgagcgggagaaagtgcagttgcaccagatcattgtccaggccgatggtcccgacgctgtggagtccaccgccgcgggtatcgagcggatgttggagcgctttcacaagaagaaggactacacgatgagcgtccctctggcgctgctcaagcaggccgaggcgaccaagcgaacgttcaatatcgtcctcggttcgatcgccggaatcagtttgcttgtcggtggcatcggcatcatgaacatcatgttggcctcggtgaccgagcgtacccgggagatcggtatccgccgggcgatcggcgccaagcgtcgccagatcatctatcagttcctgattgagacggtcgtgctctcgatgtttggcgggttgatcggtctgggtgtgggcaccttgatacctttcctgattacctacttctccggcatggtcacggtcgtgaccctggacggcatccttctgcccctgttcatcagcatggcaattgggatcctgttcggtctgtatccggccatgaacgcggcgcgggtcgacccgatcattgccctgcggcacgagtaaggtgtttggtgggccgtctgccgaaacggacggacctatgctgagctaactggttgcgggaggatgtgcgcatgagacagaccaagatcgcacgaaacatctggctcggcattgagaacctgttgctccacaagctgcgctcgttcctgacgatgctcggtgtcgtgttcggggtcggcagtgtggtggcgatgctctcggtgggcgaaggcgccagcaaagaagccatggcgcagatccgcaagctgggcagcaacaatatcatcgtctcctcagtcaagccggccgaagatgaagcggccaatactcagcggtcgatgatgagcatcttcggactgacctacgacgattacgagcgggtcgccgacagttttgggacaattcgtcaggtcactccggtaaagttgacgcgtaaggaaacgcgcctccgcgagcgatcgatggagctgcgcgtggtcgggacaaccccggaatggttcaaactggtgccccgtgagattctagccggtcgcgtgatcatgccgggcgatcagaccaaactggcgccggtagtcgtgctgaccgaattcggcgcgcgcaagatcctggccaccgaaagcgtcatcgggcagaccgttcgcattgggggcgatgagttcgagattgtgggcattgtcaagagtgagagcggagaggccggcagtatccagatccccgacctgcaggtcgatgcctatgttcccattgaagtcgcccgtcggtactttggtgatatattctccaagatgacctccggctcgtttcagcgggagaaggtggaattgcaccagatcatcgtccaggtcgacaaggccgaccacgtcgaagcgacggcggccggcattgagcggatgctggagcggtttcacaagaaaaaagactacaccatgagcgtccctctggctctgctcaaacaggccgaggcgaccaaacgaacgttcaacatcgttctcggttcaatcgcgggaatcagcctgctcgttggggggatcgggatcatgaacatcatgctggcctcggtgaccgaacgcacccgggagatcggcatccgtcgagcgatcggcgccaagcgccgtcagatcatctaccagtttctcattgaaacggttgtgctctcgaccatcggcggattgatcggcctgggcgtgggcaccctgatcccgctcctgatcacctacttctcggggatggcgaccgtgatgactctgaacgggattctgttgcccctgttcatcagtatgggcattgggattctcttcggtctctacccggccattaacgccgccaaggtcgatcccattgtcgccctgcgccacgaataggagcgccggcgctgatctgaggaatgcgcgacagaacgcgtaaccttctctgggcagggtcccactaccctgaggacaagacataagtctgaaagaagtcgtcaatagattgtaaccggcttccgtgcgggctcactgtatgcgggaggcggttccgtgggggatcgccttcgtgttggagtaacggtctgatgtttctcccaaaggagacttgcgtcaggaccggcgtggtcgaacaaggatgctgaaaggagtgacagatggcaagaagggcgatggtcggtctggttacggtggtgatgctaatggttgtgggatcgctcatggcccagccaccgtcgctagcgcggcccgtcccctcaacggttgggcgtgtgcctgtcgccgatgtcctccgacgactgggggcgaagcttgagcagggagcggcgaccaaggagtccgacgattacgcaagtcatttcaaccggctggacataaaccgagatgggaggcacacgagggcagaatacgtcgagaagggcagctacatgacccctcaggcgcgggcgggcatttttcgagccgccgatggcaatgccgacggaattgtcaccaaagctgagtatgttttgaaccggatcattactgatgaagccaaagcgatcgttcaggggatggacgatgataaggacggtttggtggagcgagcggagttcgtcgagcatgcggcgaaactgctttccgatcctaagttagccaggcaggtttacgcggcactggatacgaacgctgacggcgggattcccatgcccgagtatctgcgcgtgtgggggcagtgggcgcgggttggacgaaagtcggctgaacagcgcctcgcggtgcgacaggtggaattcacggattttgcgagccgacccggtcaacagccggatcgtccacgcggcccgcgggggatgggacagttcatggagagcaaacctgccctggccaagacggatttcgagaagaaggtcctggcggtgctggatgatatggacagaaaccagcggcgcggcaatatgaacgtgcccatccaggacggtcgactcctccgacttctggccgagacaatcggcgccaagcatatcgttgagttcggcacctcgaacggctattcggggatatggcaatgcctggccctcaagactaccgggggcaggctcactacctttgagatcgatgctcgacgcgccgctatggcgcgggagaactttacgaaggccggggtgggcgatcttgtcacgctcatcgagggggacgcgcacgagaaggtggtcgaggtcaaaggtcctgtcgatatggtctttctggatgcggacaaggaaggctacgtcgactacctgaacaagctgttgcccaaggttcgtccgggcggtttgataatcgcccacaacatgaacgcgcgtcaggccgatcctcgctttgttgaggtgatcaccacgaacccggacctggagacgatctttctcaacggcgtcggtctgacgctcaagaagcgtagtctgccctagagagacgatgtcgaacatgcgtgacatggtcgaccagcgatcttccttcacgagggtggtgccgatgtgatggcgccggccaggccggctgccttggaatagccgcatcggcacccctttttttcttcacggggagtgctagggatgaataggcaggcagtcgcagtagttgtcacgttgctgttgtgtgctcaagcggtttcggcctcggattggcccggtttccgaggacccggcgctaccggtatcagcgacgagactcatcttccgattgcgtggagcgaaacagagaatctgaagtggaagcgctcgcttcctggttccggttcgtccagtccgattgtcagtgggaagcgtctcttcgtaacctgctactcgggatacggccttgacgatcgcagccctggcaaaccagaagaactgaagcggcacctgctctgcctcagcgcggttgatggcgcggtcctgtggcataaaacagtggacgcggctctccccgaggatccctatcgcggttacatcagcgagcatggctacgccagcagcacgccggtcaccgatggacagcacgtgtacgttttcttcgggaaatcgggtgttctggccttcgatttcgagggcaaccagctctggcgcagagccctcgggaccgagtccagcaatcggcggtggggttcggcctccagtccgattctctatgagaaccttctcatcgttaacgcctcggaagagagccggaccctgatggcgatgaacaaactgacgggcgatgaggtgtggaaggtcgaagcggacaagaccgagttgtcgttcgcgacgcctgtgatcgtcaaactcgccgatggccgggaggagttggtcctggctgttccctcggagatctgggcgttcgagcctatgactggaacgctgaattggtatgcacggacgacgctgggtggaaacatctctccgactccggcggtggccgatgggatgctctacatctttggcggtttcccttccaccgaggcggtcgctctccgcgccggcggcaaggacgacgtcaccgaaacccacatcgcctggaccagtcgcgacgcgtcgtatgtcccgtccccactggtgcacgatagacacctgtactgggtcagcgacaagggacgcgctttttgcgccgaggcgaagacaggtaagatcctttttgaggagaagctgccggtcaaggggggcaagcccttctatgcctcggttgtcctggccgagagccggctgtacgccgtcagtcgcacgggtggtacgttcgttctggccgccaagccgaagttcgagcaactcgcgcacaatcgcttcgtatcggacgacagcgatttcaacgccagtcccgccatcagcaatggcagaatcttcctccgctcaaaccgtttcttgtactgcattgccacgccctgacaccatcaccctcgacatgtccatccatgcaggctatgccctctctacaaggggcatggcccgatttctcttacggattcacgactccccacgattcggcgagagaaccacggcaaaatctgcgcgacgaagaattggagtaaccgatccggtcagaggcgtcacaagtatggtgaaatgattactggataatgcggaggtgtgccatgagaatcagcgtatggtttgtgttgtcgaccgtgttccttttcgtatccccgagcttcgctcaagatgaagacttctacgatgagaccgtgctgaggaccctccatctggagttcgccgaacccgactggtggcgccagttggaggccaactatgacgcaaaggagaacattctcgccactttgactgtcgacgaggtcgtttgcgagagtgtcggcgtccgatttcgagggaatacgtcataccggatggccggagactcacaaaagaagtccttcaatatcgagatcgactatgccgttgaggatcagcgcctcatgggctacaagacgctcaatctgatcaactgctggggggacgccaccttcatgcgcgaggtgctgtactcgaacacggctcgcaggcaggtccccagcgccaaggccaacttcgtgcgtctcgagatcaacggcgagaactggggcgtttacgccaacgtccagcagctcaatgccgagttcattgaggactggttcgcgagtaacgaggggacacgctggcgcgcccaaggcacgatgggtggcggcgctcccggcccggacggaggaggccctcggcccgttcctcgggcggtcgatgagagtgatgatggattgcctctgtccgaagagggtggcgtcaccagtggcgtggcggcgctgacctggcagggcggcgattcagccacctacgaagcggcctacgagctcaagaataccaatcaggaagagccctgggcgagtctcattcacacgtgcgatgtcttgaacaatacgccgctggcgcaactgcccgacgcactagattctgtgctcgatgtggaccgagccctgtgggtttgcgcgttcgagatcatctttcaggatgacgacggctatgtcaacaagcggggcagtgactatggtctctactacgagcctgagaccggtcgattgcacctgatgcagtacgatggcaatgagtgcatgtctaatgagcggtggtccttgttctaccgggacgacgacccggtggtgcctttgatgcaccgcttgctggccatcgaccagtaccgacagcgctacctggcgcacgcccgcaccattctcgagtccttcctgacggaggaggcccttttcgcgaagatcgacgcctatcgcacgctcatagaggatgaagtgaagctcgacgacaagaagcggaattccagccaggccttcgaaagtggtgttgagggcttgaaggatttcgtgcagaggcggcgcgactatctgctgaccaaccgggcactcactcgatcggtccccgagatcgtaggcgtcgagcaggaggctgtcctgaatgatgacggcgagacgcttacggtgacggcgaccatcggcgactctgttgctgtttcagaggtgcgattgttcgtggcgtccggcccgtttgcccttttcgagtcggtccctatggtggatgacggcctaaacggtgacggacaagcttccgatggtgtttggggtgcgagtctctctggttatctatcgggttcgcaactgcgttactacgtacaggcgacctccgatgacggcaacggcaccgtgacattcaacccccccccgcgccgagcatgaggtctacacgcacgtcatgacctattccgatgccgcgttttcttcgatcgtcttcaacgaactcatggcgcggaacgatacgacgctggccgatccgcagggtgagtatgacgactggattgagttgaagaacatcggcgaccagaccgttgacctggccgggatgtacctcagcgacaacccggacaatccgctcaagtggcaattcccggaagggactctggtcgagccgggcgggtatctgctcgtctgggcggatgaggacgggagcgatgagccgggcctgcacgccaatttccgattggccggcgatggcgaaacagtctggttgttcgatacgatcgaacagggtcatgctctcctggattccgtgacatttgaggatctggatgaggatcaatgcagcgggcgttcccccgacggtgaggggcccatgcaggtgctgtctgtgccttcgcctctaggtcccaacccgatgccggtagcagcgggagacagtccgtagggccatcgacacccaactgcggcttggcgcattggatacgtcagaccgcagtattgcggattggggcggcgcgcgatatgatcctggtgtgacattcgtttggattgccaaccgggatcgttgaaggggtatgactgatgatgcgaatcaaggcgatcatcttaataggtttctgctgtgccgcggcgtcctgggccggcgaagtagcgaaccccgaccccaatcgattcgccaaggatatcaagactttcatggcgtgggacagcaagaatgctgtgcccgtcgattcgattctcttcgtcggcagttccagcattcgcatgtggaagacacgggagtcttttccggacctgcccgtgatcaatcgaggtttcggcggttcgcacatctccgacgtgatccatttttccgagcatatcgttctgccttatgcaccgaaactcatcgttttttacgccggcgacaacgacgtggcgggccgcaaatccgccagtcgcgtcctgtgcgactatcgtcgttttgtcgaattggtccacaccaaactgcctgacacctcgatcatcttcatcccgatcaaacccagtggaagtcgctggtcgctttgggcccagatgaagaaggccaacgatctcattgaggcattctcggggaaggactcacgcctgttttttgcggacctggcgacgccacttctcaacgctgagggcaaacccgacgacggtttcttcctgggcgacagacttcatctcaatgaccgggggtaccaagcctggaaccgcgcactgcggcctgcgatcgagaaggccctggacgcgcatgctgcacgcaaatccggacgttagacatctaccgagagccctgcagcccgccgctgaccgggcaattctctggacaaaggaaggcggatttgttacaatacaggtttgggtgtgagtgatgcttcttgtcttgtcctcgttgggatggggagccgcagttgaggtcgttcaaaacgccggaaacgccactcagggggcaaagaatcggcttcaaacgaggaaaatcggggaaaaagcgttacaaactgcatttcggatggcactaaccagagactgttaaacatccgatttccaggtaattttttcggaggaggttacgcatgtactgccgaccccatcatgtgtctgtactgatcgcactaatgtgtctatctgtaatcccggccaccgtgttcggtaggacgttagaggtggaaagcaccggcaaggtcggctacgccagtattcaggcggcagtggatgcggcggtcgacggcgacaccattgtcattcatccgggcacctatacaggctacggcaactgtgacatccgtctgcagcgtaaggccatcgatattcgcagcgccgacccggaagaccccagcgttgtcgagacgacgatcatcgattgccaggggaccgctggtgtatcccatcggggtttctacgtgactgattttgccggagagatttccggcctgaccattacgaacggactggcttccgtcggcggcgccatttactgtgagaacactacgctcgtgctgtcgttctgtcggatagtggacaacgctacgttgcccggtggggtcaaggtcggggtcgacggtggctccggcggcggtctttacggcgttgcttcggctatcgagatcatggactgtttgattagcggcaacgctaccggggccggggcagagtcccgagtgagcgccgggggtgacggtggtgacggcgccggcctgtacgcgcgggattcggtcgtatacgtatcggactccacgatggttgacaatatcaccggtgctgggggcagttccgatatttttgcgggaagcggtggcaccggcggcgccgttcgctgtgactcgctggtcttgacccatacgaccatcgccaacaacatcaccggcgccgggggcagcggtcccatcggaggccatggcggtctgggggcgggtctctattgcatgcgggctacgatcgaaaggagtgtcatccagggcaacaccgccggggccggtggagagagtacggacttcgccaagggcgccggcggtcagggtggttccggcggcggcgtgttctgtcaggattcgctggagatcgcggactcgctcgtggccggtaaccggtgtggtcgaggcggcactgccgcaacggccggcgccgacggtcggggtggaggaatctggtgcgcccttggtcgcattgaccattgcaccatcgccgagaatgcttctattcagcaaagggcgggcgtggccggccagggggcgggcgttttttgctcggccgatacggtgatcacaagctccatcctgtggggcaatatcccggaccagttggccggtcagaattgtgacaatgtgacctactgcaatattgaggggaacacctgcccggccagtggcggcgttctctctgacgatccgcttttcgtccagttcggtcaatgggccgattcgactggttccaaggcgaccgttgagcctggcgatcccacggcggtctggacggcgggtgactatcgtctttccgatgggtcaccctgtatcgacgcaggcgatcccgactatcgctacgatccgaatcgaatggacatcgacggtaatccccgcgcctccggagcggccgttgacatgggtgcttacgaggtccagagtctcgcgccggtgtatcgcttctggtcgccgaagacaggcagctacctttacaccgctgtcgaagccgaaaaggacaggatcatcgaagtgtattcggagtcatggaccttcgaaggtgttgcttattacgcctatctccgcgccacccaggcaggtctgatgcctgtctatcggttctggtcggacaagcttggcagtcatttttacaccatagatgaggccgagagagacaagatcctctcccagcaggctcatgcctggacgtatgaaggctcggtcttctacgcctatcccgtgggcggtcagccgcacggggccaaacctgtctatcggttctggtcggacaaggtgggcgcccatttctacacgattgatgaggctgaaaggcagtggttcatagacacgctggccgatgcctggacatacgagggggttgtttggtatgccttcgacgagccggggattggtgagacgccgggcctgccggacgagacgaccctctacgaattcagtgccgggcctgacgccgcctcgtacgggctcgtgctcaaagcctatctggatggccaggaggcccggatcgacaatccgaatctggagttcatccccgccagaagccagatgcagatggctgtcaacgccaaagccatgacggcggagctgacggaattccacatcgaaagtgagttcctgcagtacaccggcacggccaaccagattggcgggacgatcgcgattccgttctccctctacgtaagcgggttcttcgacacgacggcgccgagaggtccctacgccatcgatccgaagacgcagtccttccccacaggcctcgaaaccggcgctgtggctgccggggaggcctacgcggtcgtcggctcgggcgtcgtggagggcgagaagtttgatgtgaacctggtcctgagcccaacagatttcctgatggatggcgtggccacgtttgatggtctcaacggtaccgatcgcctggacgtgaacatggccggtcccttccagtggtatcgccagcagcaggaagatctcttgatggaaaccacgtttaagggacacgtgctgcaactttatgtcacctcggcccgaattcgaaccacgggtctctgggcaggaaagcgtgttcctgacgctgaaaagacagaaaaatagttctttgcgcgcgttgttacgctgcgataattctgggttcttggtagtttttctccgggccgcttgccagaggcaggcggcctggggtataatcagactgccgatgcgggcggggcaggaatgtcaactatatgatgcggacggctgctggtcgggaatgcagacctccgtgtgaggagaacgcagcatcatgacacgcacctctagggctttcactctaatcgaattgttggtggtcattgctattatcgccattctgatggccattctgatgccggcgttgcagcgcgtcaaagatcaggcgcgagaccaggcctgtcggggcaatctcaagagcgtgggcctgggcgtcatgatgtatttgcaggacttcaattttgtgatgcccgacatgcatacgcatacgggcaacacgaatggccatctctggtgggacaccgccggcaatccgttgcgggccggtgacaatcaggcctactggggtatcgcctactatccgtatatcgaggatcgggaggtcttcggctgcccagctttccgcacctttgccgagaccatcgccaaggaaatgctttacggaggcgaccccaagctgatttacacctccgccttcggcgccaacgggtggttgaccaaggagaatacgatccgcattaagcgtcattccgaggtcatcgtcgcgcacgaccacatggaaccgcggattgagaacggcgacagggacatgctcttcgccggtcccggtgggacgaacctgacgcactatcgccagagcgggggccgctccgactggtatcgaggcatcttccggcacaacatccgctccctcaatgatttcgagaccgccggcaccctgaatatcatctggctcgatggtcacgtcacttctctgcgtgagacgaccggcgaagacgtcctgcaacgctggtacgatcccctcaagaagaacttgtagtcggctttctctgagttgcgcgccaacgcgatcaaggcgtcccatcgatatctctattccacttcgggactgatctgattccccgccgtgagactgggttgcgcatttggcaggcgaggctctcgcttacgtggtctctatggctcaagaggaatccgccgcctaaccgaagcattcggtacgtgggggggggcttgatccacgtagcttgttgtggagatcaaccgaccgagttggtgcgtcgtcttaggatcagcaacgttgcgagtatcgctaacacccccaggagaagcccccagatcggggccagcccgagactgctggggatgtacgccatggtcaacgcgatcgctgcgatgagaaggctgtagggcagttgcgtccggacgtgctggacgagatcgcacgaactggcgatcgaactcatgatcgtcgtgtcggagatgggggagcagtggtcgccaaagatggcgccgtcgaggaccgcacccaggctgatcattgtcgtcagtccataggtctgtccgtcgatggcgtaggcgatggggatcgctgtgggcatgaggatcgccatggttccgtagctggttcccgtggcgaacgacgtcagcgaggcgaccaggaagaggatcggtgggaacatgtaaggctggacccggtcggccaggatggtcgccaggaattcgcccgttcctagcgtgtcgcagcagttcttgagcgaccaggccatgatgagaatcacgaacgggatcatcgcccgccggatgcctcgcttgaagcactggacgatcacgggccggctcagcgaaccgcacagttgcgagaagatcagcgccagggtcagcccgaacgaggaggcgcacgccagacagagtggtgtgtgcgtggcgtggccgatcacctcgcgccagtagatccaactgcccggcgagagggtctcgatatcgacgggcttggccggcatctcctccagggcggtcgtctggctcagcgtctgccattgctgcatgtcatctttcagggtggcggtcccatcgaaccagagccctgtgaagtgaaagagcactaggcccgccagtggaaccagtgctttgaaggcccggtccgagcgattggccgatggggtcggtcctacctcttgtgacgccgcatccttgtcgccaggctcattcgccagcgctgtcttctgagcggtcttcatgggcccgaagtcacagtccaggaggatgtgcaggaaaacgaacgcgatcatcagcaggcagtagaagcggaagctcagggcgtcgaagaacatggcgtatccgctcttaccgatgccgagcgtgccgccgatttgcccgagaagaccgacctcgaaagcgatccacgtgctgacgacggccagtcccgcgatgggcgcgctggtggcatcgacgagaaacgccagtttctctcggctgatgcgaaaccggtcggtgatcggctgcatcatcgacccgacgacgatggcgttggtgtagtcgtcgatgaagcacaggatgcccatcagtgcggtggccgcttgagcggacttgcgccccttgatccacctcaggagccagacgatgatccctcgaaacccgcccgaggcgataagtatctcgatcatcacaaagatcggtgggatgaacgcgagaatctggaggtaggtgacgtctgtgaccgtggccgtgacgtgggtggccgatgtcttgaagccctcgaaccaggctccggcgctcaatggagtcggcggaacgtggctgagcaggccgcctgtgaggatggcgattcctagactgggcaggacgcgacgcgtcagaaaggccagtacgatggctagcaggggggggatcacgctgtaccagactgccccagtctcggtttcctcggcccgcccgaaccaggcggccagggcgcatactccggcgaagacagtcgcggctgctgcaattttggtgtatcggcttgctttcaatggactcccggcactgatgggtcgatttgcagccgtcggtacgaatcggcgcccggcggcgtgactgtcaccagcattttcccgaaaaaggcccacaaatcaagtccaaatgtgttagttcgacgcgaagggtcttctgattggacggcgcggctaagctggcccccgcgcgccaccgttccgatcgcgacccgtggcgtgggtcctatatcctcggcgatggtggtccacactggctggttgtgtgcgtcgtggcggggcgccgaacgttgcgggcgatgtcggaaaggccagcctcgacaggggctatggggccggtcactggcggacttgcaggtaaaatctgcgttatcagtactagtatctgggttttgtgcttgcatgttcccgccgtcattcataaattgaatagtgatagcgaggtggaacgcctgggtctgggtggcggagcacacggtggtttgaggttgtaggagtgcaaggaatgaaggtggtcttgttcgtagtgctcgcgttcacgcttcttctgggtggttgccattccacaaatcgcaagggcctaatccaggccggatacgctcctgagtacgttgacggctatgtggatggctattcggcgggatgccacacaattggccatcccttctatcgcttcgaaagaaacacctctcgatacgaagaagaccatcagtacaagaggggatgggaagacggtttcacgattgcacgctgtgattacgccgccgtgtggtaggagaggggccggctcaaggggttattcatttcattgagtgttcagcgctgtcgcagatgttctccagattgcccatagacgccgccgcagacgggtggcgcaggttttttcgtccacttatgtttgtcaaagcgacgcgcgttcggagcgtgcgcgggccaagcgcggccttcccgggagaggctgctgccgcgccaacgtgttggtcaggcggcaatgggcgctcgcccgctgtgagattctgcggtttgtaggttcctggtaggccgtctacaggagcaccacctggtcttcctcttcaatgggttcttgcactggttggccttgaggtttgacggagacttggattccttccgggctctcgcaggcatcgagaggcgaccagcgactcttggccttcttgacgatctcgatcagtcggccaatcacggtatccggcgtgtcgtcaaacgggtcgacgacgaggcccttcagttcttcgaacaactcatcagatactttgaccgttctcatggtcttcctcccatcaacggggcgattcgttcctggtgtcgcacgccggaggcgtacgcatttgtgctacctaaacaatagaaacaaaccgacccgttgcccaactcgctaggatcccctcgtggagaaatgagtcttttgcgtcgatccccagggggaatctctgcacgtgaggattcagtattgtggtaactacgtatttttgccttttccccaagatgtgaaggatttgttcttaacctccgtccaattccatcgagaacaagcatggcaaagcaacggtccttttccggggcctggctggacgatcgagatgcgctgagacgcgtcgttatacgtcatcggtctggatgagaaagccggctcgatggcgaattggtgcgccttgagcatcttcgcagcggtgcgtggccccggagtgatctcgacggcgttgtgaatctgtatctgtcagggaggctcgatgaagccgaatggaatccaggatacagcggagaagacaaggtatcgcatcgaggtcgccagctcgaaggatctcggggagcttgtcaggatgcaaatggccctgcaagagagtatggctggggtcgggacgaatatgctgcatctgaatcgcgatagtgttgttcgactctatgactattatcaacagcagatcggcgacgaccaggcgcggttgctggttgcctgcgacagtccgtccgagcagatcgtggccatgggatcgggccggatctggcggcatgcagactatgtcccggctcgctccggcgagttgatcgatctttgggtcgagccggatcacaggcgacggggattggcgggacgcatcgtcagcagtctcctcaagtttttcagggctaaccgggtcgagtttctggccgtcaactacgtgcggagcaatccgggggccgaggcgttgtggaagaagcttggttttcgccctatgctcatcacagcaacagccgatcgtcgtacggccgaagcggtgatgggcgcggagtcccggcgcattgtctccgttgcccgcggggcgacggtgggcgagcaaccggcttacgccggcatgagtctgtcgggatgacccggcccgtgtggaccggaccatccgcaagagcgatgcgctgccctctggctaagcgtagggcaagttgagaatcgaattaaccaggatcaccaccacggcggccgcgatggtcagccggccgctggcatgcttggaccgggtccaggagagcaatcccagagtcaaggccaccaggcccaatatattagcgacggccaggaatatcgcgatatcaccgataacgtccggttgggcctgcgcggcgaccaggcgaacgcggttagctccctggctgatgagtccccacggtacggcgccttcggctacctcgttttcctggttggcgttgttgtagttgcacgcactgcctgttgccagaagcgcctgcccgctgatgaaaacccaggcgagcacaaccagcacgagacttctcgtttgtcggttcttcttgcttctatgtgatagagacatctcgtcccccccttagtcgtcatggacggctatgtgaattcagatgtgttctcggttcggttcgtcatcgccatctgtccagacatacttcaactgtgcccatgtaaactatgcgaactgtgaaacgtttgggcaagtggacgtcccattcgatggcctcgcgcgatgtgtatcggtgtcgttaccgggccttgcggccggtctatttgcgcgcgaaccggattcccggggcgatggcgggtttatgagggttgtgaaggcgtcgtggccgacacctggggattgttgtccgagaattgccccagatgcgaggcccagtcagccatttgggcaacctggggcatgccattcaggaaagtctgcaggttttccatgtcctgcatgatatatcggacgatgtcccgaagttggccggtcatggcgatctgctcggtctgtagccgcgccagttcggcgcggaccgcgaccgcgatgtccgtttgcgtgacgattccgctaacctcgttgtcgaccatgacggtaagccggtgaaggtgcatctggtccatcttgatgcccgcactgaggaccgagcagtccagcggaatcgagatcatggggaatgacattatatcgacgacctgcgtttgggcgggatcccgacggagggccacaacgcggcggagcacgtccttctcggtgacaatgccggctgcgcctttgtggtgggtcgcaaccagacacgaaacacctcgagacgtcatgatctgagccgcttcggccaccgacgcgccggtattgaccgtgacgacgtcggtgctcataatctgggatacggctttgaggggactgatggagatcagacctctggtgatatccgtctgtgtggcgatgcccacgagtcgaccggcgtctacgaccggcagacgcttgatgcctttgacttccatggttttgccggccgctatcaccggcgtgtcgggtgagacgacctctacaggactcgacatccgatcgcccacgcacaggcggtgaaattctacattggaaccggcgacccctttgagtacatccttgtcggtgagaatgccgatcaccatctcatcgtcaaccacaatgacacaggagatactgttatccgacatcttcttgacggcggaaaagacagtgtcatcagaggttacggtgatcatctcgcaattcatgatgtcgcgcatccgcaggtcccgacgaccctcttggcgggggcgacaagagagctgctccgattctgcgatcagtggagggatctgtgtgatgtatgccatcggtgtattcctctaacaagcctgtgtttttcagcacgcgcctcgtttgcgtttgaccaaggtgatcaccaggtgctcaagcaatactatcggtgtttgcaggctgaggcttagccgaaagctgccctgattgggcatcttacgccacaaaatacgtatttccccttagtcgtgccgtcggacaaggatttccgtttttgcccggattctatttgacagatcttgcttgattttgtacactagccaacaaacttctgccggtgtcgatcttgagtagtc

SEQ ID NO: 508 - DNA, 152845 bp, Artificial Sequence
  Synthetic Oligonucleotide
gatcgcatttattatatgtgcggtcaaaacggttcatccccacgcgcgtggggattactgcggccaaccggaatgcggccgatagctcgtccggttcatccccacgcgcgtggggattacacagtattgtgttggtcgtgttcgtggatttttcggttcatccccacgcgcgtggggattaccacaacaaaatttgaggcggtcgctataatattcggttcatccccacgcgcgtggggattacgcgaaccggagagacttcagaacgctattgctcggttcatccccacgcgcgtggggattactcctaaattattgaagtatcgtatcggaacaaccggttcatccccacgcgcgtggggattacaattcaatgtcgaacgcgcggaattttaacgccggttcatccccacgcgcgtggggattacctcaacagttttgataaaattggagtgttcaacggttcatccccacgcgcgtggggattacccttcgtaatcattgaagttagatcacgaaaagggtgttaagtatcagtggcaactgcatcctctttaggaagatgctttacagcaaaccacaatccttctttttcctgaaaattccttgatgtatcgccattcgaccgcaacgaaaacccttgctcattgttgtcgttccagatttgaatgaccgctggtgttccacgacgacccacacaaagatcccaaagcttatcgcggactatcgcggaaacctttccgataaagacaccggtctttgcttcgaacagccatcgtgtcaattcaccgcgcaatgacgcaggaaccttctcaagaatcatcactaccatttgtcaattccttttccacttccggtgggttccaatacggagttggacgtgccgggtcttcatcgatatcccaaccgaaagattcgtcgtccaagttgaaatcaaacaaacggtcgatatcaggtaaaatacgttctaataatttgtactcgtggaagtaatctcgacagagatgccgcacccgactttccaagttgtcagtggattcctgtacgacgcgaaacgagagtgggatcgtcgtctcaaccttgtatagatcgccaatatcgtacacgaatgagagcgctttaccgacatggacgaaaccaagaccgggagtatagccgccactcacgatggcagtatggcacaacgaataaaggcaggcatttgctgccgaaagtgcgcgattgactggatcggaattctcccaatggttccggtcatagcttcgaccgacccactccacaccggtttcgttcgaggcaatcgcatacgcttcgcgtacacgaacaccttccattccccgaatttgttccaatgataaacccttcggtaatcgttttcggaaacgcatccggtacattcgaagcacgattcgttcgtgtgactcagggtcagcccacagtgccgcttgtcgttcgaggtgccctcctttccgggtttcaccgataccggtcgcataaaaccggatcgcgccttcacccgtccacaataccatacaaccattgtcagcaagcgctttcactgccgcgtgggtaatcgttgagccgggacccaacaacaatacaccaagtgaagcagcaggtacgggtatgattccttctttcgtccaaaccgcaatcgacatttcgtcttgttcgacccggcaatgttcgaagtatgcatacgataaaccatcacgtaatttaggtagggcacggagatcgttcattggtgatctccaattgggaagacagaaagtagaccaaatccgaatcccttcgccgatccaattcctgcatttatcgcagcatgaaattccatagcatcggtgacagtcagttttccttccaacaatgcagaacgaaagcgcatgacgtgttcgtcaccctttccgttcggttttttaccaactacccatcccaagttcacgacatcgcaactaccgacagaaaaacctttctgcgatcctttgcgagcaaaccaatcaaggatcgcatctgttggttttgtctctttgtcccaaagagtaacacgtttcccttgcgacttggaagaagggtttctatctgcaccattcgatccgtaggtagcactctttttcgtcggattgacacgaatccgaaatctacgaatgtccccattctgaaatgcaggagtgtactcgtatggctttattggtgctgctagaaccatatctaagttgtggaacgcatacttccaatctggctccgtttccgattggacaatgatgatcgtctgttgataattatctcgaacgatttgatcgatacggaagagaaaacgagagcggtcaaacccgtttggatcgaatgggagaagaaaattcggatcgactttttgcgtcgtggacatgggaaatgccatcgacaatcgttgatgaacgtgatagatgttacgcaaccataaacgaccggggcgaggtcggtctggattatcgccgacatcgatcatgagattggaatgatacatcactctacctcctcgatggatagccgacgacgacgggtttccaatgaacggaatgcgacaatttcagagcgtttttcgatgataagttcacgccaacgttcctcttcgggattgatgcgatctaatcccatcccgaccccatactcgatcatcgtcacggcatcatggcaaagtcgacaaagcgaacgcaattcgtcgggcttttcttcgcctcccgcgtgtcgataggtaatatgttgcacggtggttgccggagatttgcagaagacgcagagatgctgatcctgagatagccgttcgcgtcttttcgctttgtatttcgtattagtgtaatcggcgcggggtcttggtggtcgcggtgtttcgtgctgcaatggttcatttgcaatgcttatctgcccatgttcgccaacagtcaactcttcacgaatgacgaatcgaggtcgatgcgagggcggatcgaaactaaccggtatatcgtaccagacctgtgcatcgtcaggggcgtcgggttgttccgaagtgggttgccagtcgatcaggcagacgaggttctttttgggttcgttatcacgtttgagtcgtttccgccacggaatcgaacttaacgcagagagcggatcgggaaagaacccagccggatgttccaacaatggtcgcgacggaacacagcatttgcgaccaaggtagagtgtccactgtgggtatttgaccgctttttctaactcttgaatgagagatgggtcgccctgcaatactaccaaaaaactggcatcgcaaaggtactcgcgtcgggtgagcattgctcccgacttacattctccctttgcggttcgcatttgcatttcggcaccgacggtgtggtaatcccaccagcgaattcccggtacatcaattcgtacaccaattcgaagttcacttagtttcggtaaccactcgtccggcgcttgttgacgggtaatacctagcgcagcacagaacaatccgatgactcccgatttcgtcggcgcttcggcagttcgtcgaactacgaatttcgattcgtgtacaccccatgattgcatggaactttctaggcggagaaagagcgtattgggcagatcgctcatgctatgcctcgttgttaacgattgcctgttgtacctcgttccagtcgaaaccgattgcagctataaccattggtatcagttcatcaagtgacttgatattatggtcggttagtgcgatctcttgtttgttttcaaccacgtagaggggatagcgaagattgggtgaaaaccagaagcgctgtttagggatgccaaacccagtatcaaggtcatgcatatattgacctaattgagcgatactttgtgaaatgatttcccgttcccctttggctggcactggattcgcaaaggcgttggcatagctgattggcgtgcctttgatctcgatgagtatcccatcgggaggattgttcgcggcgaaactgttttgcttcccactcggatttactactgcggcagtgcgaataaatgtgcctactgtatgagcggctaattgtttgttatcgccgagattctctacaagttgctcaaaattaatggagaaatatttgtagaaacacgcggaagcaaatagttgttcaccgattaaatcggcaccagcttcttctttttcctcgcgtgtttcgtctcccattgccacgaagtaatcagtttcaggaaaggcggcgtgggtcgatatagcgtgagccgtttgcaacgatgcctcgacattcttttctagtttttcccaaattttcttcgcagatttgtcgggttcaagcatacgtccacttagtgccatatcgggcgcttgtgtgtaaagagcgattgctttcgcaaattcttttgctaactcatcatcagatttgctgttccttgattggaagagattcacaatcttctcaatggcttgttgggtcacgaagagcggtgccttgcttctctgactggtttcatcggattcatcggtctctccttcttcgcctgcagtggtgcgcggtttcttcgcttttgattcagtctttggtttgaaaccgcaaactttgagaatgccttcgactcgttttttgtcgtttgcatcaccttcgatcttgtcaagaatcctcttagcgagatcgcgcgttcttactcctcctaacagtttcgcaaactctggactcatccgaatacttcgcttgatgcattgactcgagatgcgcgagcgtaatacaccaccgaaataacaggtttttggtgcgccgaggtcgtccctattaagattcgccgggctgtggttctggatcatgtgaatttcgatcaacatggttgtaccctttcgttgatgctgagatattggtttatccattcctgatgcttggtctcctgttcccaaaaggagagatcatcggtcagttttacccagtcgagtttcaattcatgggaagaaatttcttgaagcgctcttcgcaatgtgggctcgatttgctccaagggagtggttatcagttcatcgaatttctgtcgaaaccggtttcgcgcacgttcttctcttggttcgcatcgctgtagttggtgtgcaaacaaacaatcagactgatgttcaatgggacactttgcatatagtttagcgatcaaccacgcgacttcccgtcgcggtgcaaactggttcttttgccgtagcggccaccacaaaccggtaaacagatcgaacccatcaacagtctggtcaagtcctttattagcatgggttcgcaagagtcctaggtcacctgcttttaatgtttgtaagaccatgataaaatcattggttgaactcattctgtagccgactttctacgtttcgttttctccggtgggtcatgttttgctcgcatatcgggtaatgcgttcgcgatactctttcgccgtatcgtcgctgttagtgtagcgccgggtgcgagtgatttcgcgatcatctcctgcattggacgatattccgatgctgcgttttgccattccgtttcacccccggatagaagattcccaacagctgttgagacggcatgctcgacatgaggacgattggaatcgtaggttgctttcaggtgatcgagtttccgtttcactcgcatcgtcttaggcagacgctttacgaattcgttgttcgatgtctctttctgccattgctcaaccgtagacaccgctgcttcgggtactgaattatttgatggtaactcaacaattcgttcccaaacatcgacatacttcgcattatctgtaccgagaccgatgatagcaaaagtggtcgaagttggataaatcgttttagcggcttcgataacaggtgcaagtaatttccataagggtcgatccatcttaaattttccagccgaaaccggatcaggtgcttttatcgatttttgagaagtgctactgagataaagtgcgtgtgggtctctccaaagggcagtttcctgcttacctggcgattgaaattcacaactgcggataatcgtatcggattttactccacagttgtagcaagtttgatggctctccgtttctgccaaccaaactttacgggcgagcatcgttagccctttgagtagtggaatttcggcagtgtcgcccacattaaaattgaggtcgatccaagatggttcaccgaaaggaatggcgcgaggtatccagtttttgtggagagtctcgaacaacgaattgcccaccgacattatgtaaacaggcggaactccatttattcccggataaaggtatggtttagtattgccaccaaaagtcataaataatgggagccgaagtagtcctattgcacaacaggaagcgcacaacccctcttgaaaatcggttgtgtgtttaaaatgccaaaaattgtgtccagttggtatctcttgatacaaatctgtcgtgggacgagaacgtcttgcatcagcatcctgataaaaccgctttccgtttccaagtaaattgaagcaatcccgattctctgtctcttcaagtttggaaaaccactctgctggaaacgaatcgatatttgtttcatcagggggattccccttgcaccaatacaaaatggcgagcaaaaaacgcatcactgcaaacctgtccatcggattcgatgcggcgatctctcggatttgaccggctttaattagcgcgtctttgatcccgacccggtcgaattgtccgtttcgatagagtaccggaatccattttttctctaacaggttatagcacataagcgctcccgtagttgaaagatataacgtagttcattattcgtggttgccaagttcatcctcaatttctttaatcgacggcaggcttcccttcagctcctttggaagtgttttaacgattttagtctcccaaccggcaacaccaattggtttcttcaaactgcgtagtgcatactccactaccaactcgtttttcgtcctacatagtagcaatccgattgtcggcttatcgtcgggatgacgtagtagatcgtcgacagcagataggtaaagatttatttgtccaatgaaagcaggatcgaatggtacagcttttagctcgattacgacaaaacaacgcaatttgagatggtagaataataagtccactaagaattcttgatccccaacttccaatcgaacctgcctgccaacaaaggcaaatcccgctcccagctccagtagaaaactctgaatatggtcaaccaatgcctgctcgatttcatgctcacgccggggatcggcagtacccaaaaagtcgaacaaatatgggtctttgaacacctgtgcagccatatccgattcagttggagggagcgttaccggaaaattcgtaattgctttgccttggcgtttgtgaagttgtgagtcaatctgtaatgcgagaatgttgcgggaccacccatgctcaacggttttgttaatgtaccacaagcgtgtttcaggatcgtctaatttttccaataaggtgaggttatgataccatgtgatttgtgcaagtgcctcttgcacaattgtccggtcagtccatgcagaggcaaatgcccgcatgtatttcaggttgcgtggcgagaagccgcgcatttctggaaacgatttttgtagatcgacagacaatcgatcaattacttgtgctccccaaccctcctgttcctgacgttcgagaatcgtccgaccgatatcccagtaaagtaaaaccatagcggcattcgcagcaagaaccgttttcaatcgttcccgttgaatatgttgtttgatctgctggaaaaattcgttgtaaccttttggcatccctgataggggtgctgcgacaggaaaagttgcctcggctcgagtccgacctaaagcacgacgtttctcattgggttcaactatttgtcgttttttactaggcataaatcgctctcaatgactgaaactcatcagatcatgaatgtactcaactacaaattcgctcagtagtattccttgatatatgcatacgccttctcaaacagttcttcctctttatgaagctgatactttagaagagtcttgcgtagcgatttctggacttcgcgctctcctgcaatcgtagtctgccaaccgtcaaaccgaacaattttcacgatctcatcgatatcgttgacaatgcgttcgactactgacggtgtcttatctgtgcgcatttcaagaaaaagttctgtaagtgctgtcttggcagttctccgttcgtctgcagaaaataactcacgctcggtctctaacgtatcgcgcgcgatttggcagaggtgcttgataaaatcgatactgctaatcaacccttgctcagcacgattccgcaattcctctaaccgctcgctaagtttcttaaacttaggattacctggatgtttccctaatcgaccgacaagaataagaacgatctgtttggctcgcttagtgtccttactattcatcaatccgtcgattaactcggcatcgagcaccatctcttccatgtcatcgtgaatgccggagacatgaacatgctcgtgaatcaatttttccgtctgcggtccaaacgcatgccagagtaatcgtccgttgtcatccgaagctggtcgaacagaggtatagacttgcgataaccatttgtagtcacgctgaaaacgattgagaattgaatcgggactcagtgcttcccacacttttgatagagtgacgtagtccttagcaaacgcatcgcgcatttcattcgagttgatacaatcctgcgcccgactcagaccttcgaatccttcaatcgtacgatcaactccgggaaaatgggaacacgctttctcgatcaattctggaagtttgtctctcaattcctgcaggttcgttattacagcacgcacagtcgcttcgtcaaactctaacgccttcgcagtatcatcgaaaaccccaaagtaatcgacaatgcgaccgtaagttttatttggatagacgcggttggtgcgacagatcgcttgtaataatgtgtgatctttcagcgatttatcgaggtacatcgtctgcaagagttgagcatcgaatccggcaagtaatttagcggtcacaatcaagaactttagttgagaatccggattgttgaactgctcaataactttctcttgctggtctttatccaatccccatttttgtttgaattcgagtgggtcgtttgcggtcgttgaaatgaccactcgactggcatccacaccgagttgttcatcgagtgcttctttgtaagcaacacaagcgagacgatccggagtcacaatcatcgctttaaaactgtgcggttcgacatgtgtgcgataatggttcgcaatgtcttcgacaatcgttctgatccgctctggcgatttgaggaagagcagcatcttcgcagctttttgactcaatttgttgcgatcttcttccgttagatcattagccatttcgcggaaagcaatatcgagcccttccttgtcaatgtgaacattggggagtcgcggttcgaagtgaagtggaagcgtttgtaaatcgcggatactttcctgaaatgtatagcggctgaggtatccaccctcatcctccggtgcaccaaatgcccaaaaagtgttcttgtcggaacgattgatcggagtaccggtcataccgaagagaaacgcattcgggagtgctgcacgcattttacgaccgagatcaccttcctgtgtgcggtgggcttcatcgaccataagaatgatattatcccgcagattcatgtcgggataggcatccttgaatttgtgaatcgtcgtaacaataatcttacggatgtcgcgttcgagcaggtcgtgtaacgcttggatactatcagcattgaccatattaggaacttcggcagcaccaagagtattggttatctgtgtatcgagatcgacccgatccacgacaatgatgatagtaggactcttgaggtcggctttctttcgcagtttctgcgcagcaaatagcatgagtagcgatttaccagaaccttggaagtgccaaatcaaccccttcttgatatgtccttcggaaacccgctgtacgattgcatttgcaccttcatattgctggtagcgacagacaactttgatcttgcgtttttgcggattggtcgcataaattgaaaaatgacgcaggatatcgagcaaagtttccggtcgtaacaaactgttgagttgtttaccgacttcattcagtccggaaaaaagtgcaagagtactattggattcatccaatcgccatgggcaccaaaattcaagtggtgtgcgaacggcaccatagaagaaatcgcgaccgtcggtagcgaaactgaggatgttgggtacaaacagattcgggacagtattctcgtaaaccgcatggatttcgtgcgcaccatcgacccatgttactgccggtcgtactggcgttttcgcttcgccgactactaccggaatgccgtttatgaacagaacgatatcgggaatcttggtctcgcgggcacgaattttgaactggttagtcaagatataggagttgttttcaggatgatcaaagtcgattaggtttacaccaacgtgcttaccgtcgatgccgaacggcatcgtaatctcacccttgtaccacttggcaaactcttcatttgactttactaatcccacattatttactgtgatgaggatggcgcgtagtttgtgaatcaattcgtcggcgcggtcgggttgttcggcgatttcagggttgatccgaattagtgcctgttttagctcgctttcaacaagaacttcagtaatctcgcggtcgagtgtgtcggtaggcatatagcgccagacgtgacgaccagtgtctggagatgaaacaaccccatcaccggcattcagattgacaccggtgagttgttgcacaatgaaatgttcgacgctattcatttcggtaaaaggcatattagaacaccttgtgaattaaattcttgattacattctcagttttggtaacatggtttttggcttcagtaattaactcttcgattctgcccaaattttcgacacatttttcttgttcttttttttcgataaccggtactgaaatattgtagagatctgatccagtaataccggcaacagttgtatatccgactattctctttattctttttacaccctcagaagaccggaaaaaataatggcagtacattgggagtattaattttgtgttgagccgtagtctgataatcgaagattcaaaagtcattttctcttcatcagtcatcacaatcgaacacttaccagctccttcgatgactaacgaacgtctagcgaaaagtaagtcgcctttttgaagtaagaattgtttttcctctttatcgcttaacgtgattctttgcatatccgggttatacagtttaggataagcgaataattctcccatatttaccaattttatcccatgcccaagatattcttttgatttataaattccattaagcagttttgtgcttaacaaatccgttacgggacactcttgatacccatccaaatttctgacgttattaatagttggtttctttgtgtatgtttcaaaaattagatctgatgagagttttagaagttctcctagcccatttaccaacgatattgccttttgtgtggcgttatccgctgcccacaacaattcagcgattttcgcttgttgttcttttgggggaaggaggaactcgaattgagcaaggtcttgaaactttgttcgaggtgaaagagccccagccgatgtattaaccgcatgctccaagaaccgctcactctgtaataagaaagggaacaaacttggttcgattcgtttctcattggcttctaagaccagaatatcactagaacaaattccatcgaactctgcaaacgcaacttttttctgatacgaacgacgtttaccgaacagtacttgaccgggtttgaatcgtttcgaaaaagttataccatcagcgatattgccccacgacttaagatgtaggttttccggttcgatatgctccaatccaacaaatcggtcgatcccattcgataatggatcacgctcggcaatattcaagttgcggcatacttcaccgaacttgattcgtttccaaccttgcttgtcgaatgtttgcttcactgtagtttcgctatcagcttttgaatcgactgtcgtaattcatctgcgctactattccattgatcaattgcatcgtgtaagttctcaccattaccggttttctgcattgatccggtgtaaagcgtaatgttcaaattagctttcttatcaagcacaccttcaaccgatataaccttgctgaagccgtctatcgtttggtagtcatgatatgtattgaaaatcttctgaatgtgtttctcttccaagtaactcgtcgctttttctttatgaacttctttcacggcattgataaagagaatttttccttgccgcgttttcggtttattgttcctacagatcaggagataactctccattggtgagttatagaagagattcggtcccaaaccgatcacacattccaccacatcactttctatcattttacggcggatagcagattcggcatctctatagagaataccatccggccaaagaataacacacctcccgttgtcaggatcgagagatgtatggatgtgttgttggaatacgtaatcggcatatccctgaggaggcgtcccccagatatttctgccgaatggatcgctcgcaaatgctttctgatcccatgccttgatactgtatggaggattggcaagtatcacgttgaatgtcttcagtcggtcgttttccagaaacgcggggttgctgagagtattgccgcgaacaatctgaaaatcctcgataccgtgcataaacatattcatacgagcaattgaggaagtaatcaggttgatctcttgtccgtacaatttcagcgtccggtattccttacccgtgtctttcaactggagcgcacagttcaataacaacccgccggaaccgcaagttgggtcgtacacactctctcccggttgcgggtcggaaattaacgtcattaaccgaacgacggtacggttggtataaaattccgcggcggtatgcccgctgtcgtcggcgaatttcttaatcagaaactcgtaggcatcaccaagttcatcttgggggacattaccgatgctgagactatgctgactgaaatgctcgattaggttggtgagcgtctcattgttcaaccgatccttattcgtccacgatgcatctccgaatattccgaataattgttcctgattcgctttctctaattcgcgcatacccttctgtagcgcttcgccaacatttcgagtcaccgagcggacatcattccaatgcgaccctttcggcacctgaaaccggtgattttcggcgaaggatgcatactccaggtcaccgccactctcggctaatgcttgctggtactcctcgtcgtaaacatcacaaattcgcttgtaaaacaacagagggaaaataaactgcttgtaatcaccggcatcgatatggccgcgcagataggtcgctgcaccccaaagataactttccagctccttgcgtttcatcatgatagcaacccgaattccatgagcaactctttaaagcgatcttcagcttgccatgccgcttgtgctgcaatttcgagttcggcaatcgcctcttccatcgaagggaggttgtcgactatggttttctcaatatagagcggaatattgaggttgtactctttcgttacgatctcttcattatcgacgactcgtacatgatcaggaagtgatttgtactcacgataccatttatagattgtttcgacatgctgtgcttccaggaaattttgtgctctaccgactctgatttgatcggacgcatcgataaacagcaccttccgttttcgttgcttgggtttcttcgcccggaaaatcagaatacaagccgcaagtgtcgctccataaaatacattagctcccagtccgattatagtatccaaccgatcgctatcaatcagtttttgacggatacgaccttccgcaccctttcgaaagagcgcaccatgaggtaacacgacagccattcgcccggtatcgggtttcatggattgaatcatgtgttgtacccaagccatatccccatttcccttcggtggcacaccggcgatgttacgtccgtagggatcattcacccattgctccgcaccccattcttttaaagagaagggcggattggcaacaacacaatcgaattgctggagttgatcgttttcaacgaatgccggttgacgcagcgtatcgccacgctcgattcggaaatcctcgatgccgtgcaggtacatattgatgcgagcaatggtggaagtcgtcaagtttttttcctgaccgtacattttgagcgttcggtaatcccggttggttcgccgcaagtgctcgatactctccagcagcataccaccggttccgcaggcaggatcgtaaacggattcaccttcttggacatcgataatgagcccgatcaaatggacaaccgaacgtggcgtgtaaaattcacccgcctttttattagtaaggtcggcaaattggctaatcagatattcatacgctttaccgagaacgtcgggttcgactgcctcgtttgacagattgtattgggaaaagtgttcgatgaggttggtaagtagcgaatcaggaagtttttctttgtttgcccagttcgcgtcaccgaaaataccgtataggagctgctggttggctttttcgattcctcggaatgctttttgtaacgccttcccgacatttactgttacttggcgaacatcgttccaatgacaatcgtccggaagagaaaaagagtgaaattcggcatgggaagcatactcgcggtcaccacccgaatcctcgagtgcatgacgaagctcctcgtcgtacacatcagaaatgcgtttgaagaaaaggagtggaaagatatatgccttgaaatcagccgcatcgactggaccttttagtatccatgcagctttagcaaggtgttgttcgagtttacttagcggtaatttttccataaaattctgtgtgccacttcaatgttacaaattagtaacattagctaagtttccgccttaaactactctctgcaatcccaagcaactttgcagcctctttttgggttttgcttctccttattgcttcttgaataaccgacgtttcaacctgtcgcaaattcaatgtctcggaaacgactgtttgcagtgactgcgaagtcgtcgggagtatcgccaacacgtctttccggtcgatctcgtcgctatcggcgtggaacacgagtcgatgaattatattttccagctcgcggacgtttcccggccatagatacgccgttagagcctgcatcgcacgctcggtaaggacaatatcgtgcttaggagacagcttgagcaaaaagtacttagcaagcgcttcgatgtcttccttccggtcccgcaggggcggaatgtgaagaactagtcctgcgattcggtagtaaaggtcgtcccggaaccgcttttcagccctctcaatatgcaaatctttgtttgtcgcggcaataatccgtacatccgccagtaaatttttcgtaccacccacgcgccgaaacgttttttcttgcaggacccgcagcaatttcacttgcaatggtgcagataaatccgcgatctcatcgagaaacagcgtcccattgtgcgccagttcgaacaacccattcttgattttatcggcaccggtgaacgcacctttctcatgcccgaaaaattcggtctccagcagcaattccgggattgcaccgcaattgatatcgataaatggagaatttgtgcggtgactacgtcggtgtatttcgcgcgcgacaacttctttacccgtaccagattcaccaagcagaattaccggtgtgtcatcctgtgccactttcgtaatctgcttatcgatagcagccatttgttcggaggcgtagatgaacttccgttcggagccatgcgtctgagtgcgacgcagcatcaagctctcgatttgaccacgacgaattagctcaatcttttttagaatcaccggtagctggtctatcaattcctcttttacaatgtaatcgacgacaccaacggaaagcactttcagagcggttttgaccgattgcatcccggagataacgactaccggacagagcggctcattctcccgaatatatttgagtagttggaatcctaacgaaccatcctccataattttcgcaccatgccgttcgggaagcatcaagtcgagtagtacaaagtcgtattggtcggatttgagtttctccatcgcttgcgaataatggatcgctgcatcgatatcgaactgcgagccaaacgccttacgaatcgtctgccggtcgtattcattatcctcaaccaacaagatgcggactcgacaacccgaaccgtttccactcatagaacaacctcgaatgtcgtgccgacattgggttcactctcgacgagacgaacatcgccaccgagagattgcagtgtgtgtttgactcgggcaagtccgaatccttctgtatccttggtcgagaaaccgttattgaatatcgactcatgttgttcgggagaaatgccgcaaccgttatcacggatggtaaggcaagtctggttggactcgatacgagacgacaggactattatcgggtcgtcagtattgtgtaaactatcaccggcattccgtaacaggttaccaaaggcttctaccagttgttgcttgggtagaaatcgttccgttcgctgtaactcgtccagcaaaccatccgagtcaatgttcgttccatttaataccggacggctacgttgtaccgcttccaataatagttcctcgggagaaacgcggaacgattccagcagcttgatcagcccattcagtggaaccagtatcgaatcaaatacagcaagtgcacggtttcggacggtatcgaaactcgctcgactccgcaacagactggtaaaatcggatataaacgatggtatcacaattgcatgtaacgtatcgttgagtagtgttgtaaacgcgacatattcatctttcagttgtttgattcgtcgcgtcgcatcggcaatgcttgtcatcgccttcaactcgttgcatgctgcgcggattctatcgtgccgggttgcccgcgtctcttcgtacaactgttccaatgcctcgggagttagggattcgaggcgctgtgatacttcgcgtttccaactcgtcaatggcagtgttgacaaatcaaccggcggttccgctttttttacctgagtgttttcacgtggattcatgatgatcgttccgtgattcacgcccacgactacattatggtgtcctttattctctatcgacaccgaagaggtatttgtatcggtagtgtcgcttagcgcggtttccaattcaaccgcttgagtgcggtgcttgcaccaggcaagtaacgaagttgcgaccggttttgtcacgtacttggctaacacggcagcacccgcttccaagatttgttgcggttcggtaagtccggcagcgacaagtttacgtatccgttcgcgtccgagtcgcgggatttgcaactgtgcgagtgcgatacccgcatttggaacaccgtattgcacttgcatcgcgatttgatccagtgatttacgccaggaattgggataacccaatgtttttgcgagttctgcagcactggatagtacccatgcaatttgttccgccatacggcgaattgcacccaagtaaatttgataccttttctccaattccttattggtagaactaccgatgtaatcgttcaacagtaaagcgcttttacatgtttttgcccggttatactgatcgatgttgttactacaaactgaatcgaagattgccatgccattcgagccaatctgttctgttactcgcatcgtatattcgtaaccatggtaatggtattcggaagtggagaaattgacatatccttcttgaccatcggcagtcaatagcgcaaataacaccgcctccatgcacgaaatagcttgatcgtcccgttgcgataaccattgcttaataacgtgagccgtttcaacccggatgcccatgctgactaccgtggttccaaactcggtaagagtcagtttctcaccagtcgtaccggaaaccacacccgcgcgcaaacaataattcaggccgcaatccaactcttggttcaactcctcctgttgttgcgcatctttttcatggacatgccaactcaatgaattgcgcagatacgattttatctgttcggtggaaccaccaccgagtaacgagacaacacccaacactgtcgtcgccatcgaagaacgccagagattgggtttgacttcctccaattccccttccaaataaaatcggcgtatctgttcccgctccactatcgaatgcgccaacgcaatcgcacgaccgaattcatcctctaattggtagcgtccggcacgaccgcccatattctcgaactcacctttggataaatcgacggtatccaattttttaaactttggatcatagcgccattgctgcaattcaatgaacacatttcgggtgggaagattgacacccattgccaaagtagatgttgagactaacaccaggatactgcgattacggtagtggcgttccaccagctctcgttcctcgatggtcagatcggcatggtgcaatgcgataccgtgttgtaacagttccattaattcgtcgcgggaatgagtctcttccaaagtctccaattccgcgattgcatcggtcgcactcggcgcattgatccattgtataagcgccttcgccacaccgcgcaccgaatttttgtctttcaaaaaaagtaacgactgttcaccatcttcactgaattttgtcaccgccgcatataatacttcagcccgatcctccggtggtcgtttgagaatcgtttcgtcaccggtgcctggactgttcatcgtacggtaatgaaacacaccttgatagagataaccgattcgcagctccactgggcggcgctcgtaatgcaacaaatcgatatccagccactcattgaccaaccgatggttgcccagaactgccgatagtcctacgagttggaaaccgagttgctcccgttgcatgcgaagatgggtcaggatcatttccagtgtcggtccacgactgatgtccgccagcatctgcaactcgtcgaccactaccagacccaatttattgaggaacgttttattgcagttgagtaattgaaagaacttctcataaacgataatcgcgatatcgaatttaccattctcgatgtccgagtcatactccttatgatcacgagtcgagatcaccaccttgattccagacgacgaatacatctgacggaaggtctggaacttttcctctgcgatggctttcagtggaactaggaatgccgtcttctttttgttgattgcttgatacacggcggcaagctcaccgataaatgtcttgccggaggaagtgggcgcggagacgatcatgctgttgccgtcgaacagcttatgcttctgtatcgcttgcacttgaattggttgtaaggtctgtatcccgagtttccgccagttggcaatcatgtcctcgggaaaatcgtagcgactgagttgtgtaatctgcatcttcatctcatcaatgaatgtgtttgaacgtcaaaatctgacacttatttcatcgggtactcgcggcacaatccgacaacaattccctgtatcgaacactcggatgccggttttacaatgtcctggtggtcgggattcgccgctttgagcgtgaccataccgttttttactgtatggaaatacttaattgtcacctcgtcatcgaaccgcgctatgacaatctgccccttttcggctgttttttgcggtcggacgataactttgtcccctgacaggataccggcaccgaccatcgacttcccttcaaccacgagcacataggttgccccccggcgcacaaaaacgtcatccacaagcatccatccaatccggttctctgtcgccaacaggggcaaacctgcggcaactcttccgactacgggaaccccttgttgtttcaagatggttccggtctcatcgatgatatccaaccgtctaaacggtccgcttccgactttccgcagataccctttattaatcaagggcttgacgatattgaatgcggtcggacgactgatcgaaaaatggtcgccaatttcctgcatcgtcggagtccgaccatgcttctggaaatattgggtgatccattgcaacaattccgactgtcggtcggttaaggggatttcgctcattttttgcctcgttacccggttaccagagtatagctaacaggtgttagtataacaaacattaccggttgaggaaaaacccgttaaggaagccgataaggaaatatcaggagttacgatattggttacggctcagagaggtctcgtcaggttgctttcagggcaaagaaaaacgaagatttgatataaatatcggaggcggcaaaacgctaacctacacaatgtaattacaggtaaagcgagggcaagacattttttacagacctgagttcaagctgatttcacaggactccgcgtttttctgaatttttcgtacctgcaggtacggtttaataattttatccatacgcaacagcctcgcaatcctcataatggtgcgtggattgactttcttttgataaataccgttacgtaatgcctcagttgcgatatccaaaccaattcggttccgatgtttgaaacaatcgacgatcgtcctttccaacgaatagatgtacaccggagtatcctcaattaactgttgttcgcgtcccaccttaataatatcaggcgatgttcttgacacctgcaattggagaaagtccgttttgggagtgcgcatttcactaggaagagtaatccatatttcgttgggtatttgtgtcaataaaccgtgataccagagcgcagacaacaaagagatagtcgccttgggtatagtcagtgcaaccggaataaattcagcatgcatgcatggttggtagtcagcgacgcagtatagaccccggccaacccgcttcagtttgctttccttcactaaccgggctaaaacatctcgttggatatcctgttttactaagtcgcttacttgaacaattccaataagtttgataaaagtgagtatttcttcggctcggggcataatcctacattccgtactacttgaaagattaagtatgacactttgtaacgacggtttgcaatcttcgatgcgtaaactttgtcgcactaccgatgatcaaacgtccagttcatgatcgttaatcactttttcaaaaaaaagttgtatatcgggataattctgttcaaggaaagcgcgtaccgccaagtcggcaattaccttccgtacatatccggtaaatttaaccaaatcgaatacattgtcccgataactacttgtagcccgtttaaactcatcttccatttggtaaagttttcccgtcagttcttttctttgtgcttctgaccctacggtttttgtcggatgcgctttactccattgatcttctggagtggaaagcaccaaagttctggtataacgacgcgaaaagtcgttcgcggcattcaagagttcaacaatttcgatttgccgatgataggacacttttttcaactcttcacaagtcaacctcgacacattatgttgacgtaatagaccgataacggaaggagcgactccgatcagcatcgaatccattttacgcacccactcttttttgacattcagagtagcggcgattcgatccagactgaccccttcttgaatcgctttattgatcatcgtatgtgtctcgctaaccgtcaggggattgacccgtttgttgtaagtatagacatcatcgtcggtgccgattagacattcaaccgactcgatctttaactctttcagcgctgtccaacgcaagacaccgtccttaatgtagtagcgtccttccttttcgacgacgaccagtggttcgaccaaaccaatctctttaatcgaactgacgatttttcgataggtcgtgcataaatgacctgtaagctttcgcggaaacaggggatacagattattcaccggcaaggtcactgttccggtacgaaaagagatattgttcatgcggcctcactttttgaaaagtttgcaaacaggtcctgcaaatgcttccctttgagtttcggaaaatccgttaatttttgatttcgcagcaaagacacccaatcgggatcgttgttcaaacgagtgaatgcttctatcagaatcatgatttggttctcgtatcggcgcgacctgcgaacgaagttttcttgcttgtcgagagttcgtcgaatctctttacgcaatgtttcgatagataattcgccataaggggtcttgccggatcgattcgagttattttcctgctgaaaacgaagacgttgcttaattaattttcgcaccgccggtacatcggaataatcgaatacattgttttcgacgcaatcagttagcaaccgttgtaattcgggaatcggctcttttacgatcataaatgccgcactggcactcacttttccttgttcaaccgcctcgattagtaatttgtccccatgctcgattaataagagataatccttgatcttgtccggtgtacggtcaagaataacggaaatttgttcaatcggcatcccagtgtccgcgagtcctttaattacttgcgcgaaccaaatgggcgggggtgtcatccgtgtagcattttcagcgatggacattacatacgccgtttcacggtcgacatcgacggtcaaggcaggaatcgtcgtgtgtcccaatttttgaaacgcctcaattcgaccttgcccgcaaaccaattcatatttactatgttcagggatatatcgggtattcaccacgattggacgctttaatccctgtcgccgaatcgattcgacgttttcttcaaattttgccggatcgcgttgtcggggattgataattttgatcttatcgattttaatttcaatcacatcacgtaccgatttcatcgcaggttttctccttattgatatgtccgctatcgccgaataaatcgtacacatcgattattttgtcgaaacggtatgcatcgagatagataccattcgaccatgacacaaataacttgtcggtttccatggcgatagatgggaaacaatagaaatcgaggatatttcccgcatcgtcggcaagccgaactgcgagcgtaagatcgatgtctacttgccggtcaaaacgatacacccaacgctttttgccattgttgttgcgaatacttgatgccataagttgaatgttcaactggtcgttcaaacagagatgtgtgccgtggtcgaccacagtgagtcccatttccaccaatgcggcaaatacttcctgccacaaccgttcctcaatggatttcaccaactctttcaattcgaaaaaccggatatcatagggaggtacatatccgactaatttgtaagcattgaacagcgaaccgaaccgtttctttagaatattggtggagggcatttgtggtgtcgactcgatgatcagaccggtgagcttcccgtgcgtctggaatagttcctgcaaacgaagtaggatatcttgatcgctccaaaccggatgtcgtttctgaaatatctgctgcgcttcgagaaatgtgtcgggtgagacaatcgcttcaaacgcctgtggaaccaatacccagcggtcacgcggattcttgcgggtaggtccatgcagccgcgaagatgtgcggttatatcgtaaggtcccggtgtacgtctcatctcgaagcatcactcgtattgtattctctgtccattcgccacccccaggagaaggtattttccgctcattcagttcgattgcaatgtttccttcccgtagcccccgtctggtaaataaaccaaaaatatgttttatcgtctccacttcctctgcattaccgggcaccaacgtaacccgctcattggcaatcgctttccgctcaccatcgtgcaaaatgccaactggatttctttgctgatcgagccgcatcctttcaaaaccgtacggcgcaggtgcaccgacccggaacccctgccgcgcgatagtcagcgatccggctaacaccttatcgcttaaattcttcgagtactccgccgccatcgctcgtttcaacgctttaattaaagagtccatgatcgagttgtcgttcttgaactcttccgtaacataaatgatttccttaccgtgcttacggcaaataaactccaaatgcgccgattcgtcgatatcctggaaacgaccccaccgcgttacatccaatacaaggatgatgctaaaactcagttttccgccaatgacgtactcgttaatcaactccttaaaagcatcccgtttcgacatcgttagaccggatataccgtcgtcgatgaagtacttcagaatgtgaatgttatgatgttcggcaaatgcgtcaatcgctttgcgctggttcaaaatcgagttttcctgcatctcgcgggtcgacttacgcagataagccaccgcatgcagcttgagagtagttgatagtttgttatcgataaatgtattcatgaaagccgttagggacagtttacccttgaaaccgttaatcaatggaagcacgcgaactaagcttcgcgaagtttcccaaaccacaaggtactcatgacattttggacgataactatcaactagtgagaattttttacgactaaagagagcatgatgaggaaaaccaagtggcaaaaattattcagcaacatcgaacatggtaggcggttgatagaatttgtaaatatttgcttaaataataaaaataatcgattacaatacgaggacatcgcaaagcagctcgaggttgatatcgtttctgtacatcgataccgaaatcagctcaattgtcttggaattacggtgcattcctataaaaaatctggtgtgttgataaacacggatactctaacgagtgagacggtattatgctttgtgaagttataccaaggctacatattgatcgatgagtcattggtgagggcagagaaatttactgatttaatacattcatcgtcagtcgattccaacaatcttcgatctgtagttgatatgttgaaggccactgttgaatctcagcatgtggtaatacggaatcacacaagtaaaatttgaacagaaaaaaaacggatgcccgtcgtgagcatccgcttgtactatcgtgaaaatttattaaaccgagagcaactccaccaaatccttcttcgaccggagccgcgagatgtgcagttcggataccttgttaaagagtgccggacccttgagtgcctcggtatcgcaatcgggctccatttcctttatgatgcggacaaagtcggcttttgtccgagcaattgaaatatcacgctctttggcaagcttctgcaactcgactactgtcatttgttcgtaggggttttgcgccacgttcgattcaggggcaatttccggtgccgggttggatttgggcttgcgtgtccgcttcggtgcgaccggtattgcctccggtgcgactgtcgcagtttccgtagtcggtgccgattctgtcgtttctgccggttcggattgcaccgttgccgttgatgcggcatctggcttgggtttccgacctcgcttcttcactatcggtgctgtctcagtttcgggtgaagaggattcagcaaccggctcggatactgtcggttgtggcggttcgggtggttcggtcgtcgtatcggaagtggtctccacgaccagtgtctcgacgggttcgctgggtgtctctacggtttcctgtgccggttgagttgattcgattttatcgatccaggcgagcattgccggaatctcttcgccatcgtcggtgcgcagggtcgctttcaatccctgcaatgcgatgatgtttccttgaatgcccttgcgggagccaccggtgataacgacacggtcgccgatttgcttcttggttttggttgttgtggtactcatgctgttctcctttcaagagagtgttgagtgattgatttggatttgatgattacgattgagtgagcagatgctcacgcttccttgaatagaccgttgttaatgagttcgcggataaaccgttccgccaactcctcgtcggatattttctctgattcattgaagatccctttgtaaagattgggacctcccgcgatttcgatggtgtcgaccagttgccgcagatactgccggaacggaagcgaccgttcgaagtatccctgcgtccggagttgttcgacgatctcgacggcagtgccgacgaagaccgcattttcattgacgagttcgtgcttattgatcatttgtgttgcctccttgcaacgttgaggatttgcttgcgatagaaatcaggaatacaccagtcacggcaaccgtcaagtatcgtctcgaggtatccaccggaagggggatagtaaccgttacggtcggcattcattatgtacacccacgctttcgtattgtgattgtttccggatttgcggagcggtaaaattttgcggtgatacaaccggggatatccttcaaaccggtctagtgcgtcgaggtcggatttggtgagcagatacaacgcaccgtaaacacgatgtccttttgctggttcaatcgatgccaccccgcgaaagacaagccggtagttttcgatataggcgacgcagcgaggcagatgccccgggcaacgccattccatatcgtcgagattgagattcgctccatacgcgaaatagggaatcgtcgctttattggacattggcgacctccgtattcttttgcggcttgccatatcgccatgcactattgcccggcaggttcttaagcaggatggttcgtgcggttttgaactcgttgcccttcattcccagaccggcaaccatgaagacccggaagttgaacttgggattgtcggtttcaattttggagtgagtcgtctttttgaggtcgagggcttttgccgacattgcgagcaccagttgaatccaggaagtaattcgttctgagtttaaggaggcttggaaataccggaattcaatcgtgtggattgagcggtacaaattgttgtaattaagacctcgatagcggctctggtcatagtgttgcgggttttgattagcatgtccataccatgcccggttcaaatcggtcatcgtatccggtttactctgaagcaaccggtcgatgaactcctgctccatcggcttagtgtaatgtgctctgcgttccggtgaggtgccgatcgcttggaagagtaaatcctcattgcgatagaccatcttcgccagattggttaaggactgtgcggtatgcggtgtcgcatcgacatgaacatgcacggagcaactccgatgggcgatacagccgattcccttaaccgcgatgatgattaattggagcgtcgggatatcgtcgtaggtcagaatcggcgatacaatctcggaacccttgtgaccgcggatggttgttattgatgcatcgttttggactcgccagatgcgaccatcaggttgcgtgaccagcgatgcttgaaaggttccgaactcttgggtgactcgcccgttgacgatagtcttgatcgcttcggcgattcgcttccgctcgcatccggcagtctctatctcgactccgaacttctggttgtgtattgtgtatttcatgataatgccttgcgttggatttacttgttggcaacaccttaagcgcggggtcttgcgaagtcaaggcaaggcaataaccgttaaagccgctactgtagcggcttgtaggttagctaactagattgggaaaggagagattatcgaacggttgacagggtcaaacgttaggtcgaaagcgctcccatggaaacgcgggacccgggtcaatcttgcgtccgggggctatttcattatgaccgaccagccactggattgggtgctcttcgcggaggagcacgagcagttgctcaagagcagcaagctgtagctccgggaacgactgccaatattcggtgccgatcaataccggctcatcgccatcatagcgttcggtataatcattaggccaagcgaaaaaggattcatcgcgcagcttgagcggaccccagttgacgagttcgattccaatcgaaaaggcattgacactcggacgaccctgccattcggaaacaccagcatgataagcgcgcttgtcgtccggcaccattcggacaatgcgtccgtctgtgccgattacataatgcgccgatactttatttgcggaattctggaaccacgcaatcgtatcctcaatgctaccattggcagtataatgaatgacaaccgtgtcaatcacgatattccttggtcgggaatatgcgttggttcttgccgcaggaataaattcgatgtcgtccagagtcattttgagtcatccttctttaatgaggtcgcaattttctcagcactgcgtccgacgatatagccaccgattccgatattgagtaacgtccacatctgctccggcaccggcacggaggtaatgccaaagatcggtgcaatcacaaagttgtgagcaacgatgtatgtaaacaccaacatcaagagcggtcgccagttgcgctgcagccaactctgcccttgtacctctgcgaccagtaccttcgccttggcatcgatctctttttccagcgcaccataatcgagtgcgagcatctgcgtctgcaggtcgtgattcagtttcgccgcaaggtctttatccgacactaacttgtcgatgatgccttcggctttatcgataatttgtcccacaatggggattgctgtgagaatactcatcattcacctcaatgatttggatagaaatagatttataacgagtgcgatcaatccaccgtaaagtggcgtgaataatacccagagcagcttcgtcatcatgagccggaagttagtattgcgatccatctgcacaacgagcccttcctttccgttgcctttgatcgcatcgtttaattccttcaatgcagcatggacttccttgcgttcttccttcgcttccgtttgcacggtttgaatcgattcttttaagtcctgcagttgctgtacaatctgctccactttagccagatggtactggcaggaatagggtggttcgagatgttcaccggaagtgtgttcaaattcactcatgcgatgctcgtaataatgccattagtgatttcaatgttaattattccgccccagggattcgatacttgtatcatctgagtaataccggtttttccgagtgcatttagtccattattcacattgagcgggacattggcattcagtgccgcaccattatattgcaacgcctctccggtcaactttccgagggaggcggggtcggttaccagttgcccgcttgttacacaatcattcgctaactgtgccgtgccgattgtcggaacaccaaatccaccgatgtgtttgcagatctcttcgtaaaacacggactccgaataaccggtgacccgattaccatattcgcacttcacacaatcgacatagacttgtccggcaggtttatttgacggatcagaaagtgcgaacgagagccggattgaagaggtgttataggggagtttgctaatgtcttgtaccaaataataccggataaactgtccattaccggcagtaagctttaaccattcgatggtgctgagttcattgccgttgttatcataggaagtcagtaatcctgaaaattcggttccggtgataattgcctgggcgaagacgtaagcggatacgacgatagcatcgcgcccgtgcaccgggatcggattgctgcgtccggtgatgacattcggtggcgcagaatcaccaaccaatcgcagtgaactaccaccaaataccgagtaatcggtcgtcgtatcgaagaaactcatcagacccatgctcccgattcgaacgatgggttctgcaccaaattatgtgcatcgaatgctgccagtgcagtcgcattcagtttgttggtagttattgcaccatcggaaattttggtatcgattactgcgccatcggcaagattcgctgtaccgaccgcagaattagcaattttcccggcagtgacagaattacttgccagcttcgatgcatcaaccgcattattgactaggtgggtagtatcgactgaatcacttgccagcttactaccatcgacggcattcggtgcaatctttaccgtagtaactgcgctactcgccagcttgcttgcatcgatggcttgattcgcgactttgatagcggttaccgcgccatcggcaagtttggtgtcattgatggcggcattggcaatctgtgtattccccaccgcaccgctagcaattttatttccagtgaccgcattcgcatcaattttctgggtagtaaccgcattatcaacaaggtgagtgttaccgacttcattgctggcaatcgaagtccctttcaccttgccatcggcgatgacgtaggttatcccgccatctttggtggtggtaagttcgattaatttgcgaccactgggaaccgcatcgttccaattcggagtacccttgagttcctgcagcgcagtggtaacattggcatcggattgtccccctttgattacaccaacggtgaccaaatcgcgggttgcgagttgcgataattttttccgtactgaataagcaatcgtgaagttgacaaccggtattaccgagagttcgatccatgtcgagttattgctgccatcgccgtcgttgcgggaccaaccgggacccgacccgtgcggatcactcccggcagttatcgcattggtcttattctgtttctgccagagcgcgaccaccttaatcggattgccggaagcatcaagtaaatcctcaccattatcggcgcgcgtcagatcgaacatactgtcccaactatcgccgatgttaccgatattgatatctccggtagtaaaaccgggacggtaggtcaagtaagtcggatggactgcggatttggttacatctttatcgagcaggggaatcgcgatatccttattatagatatcggtgtagaattgttcgatccggtcgtcgatggaagcgccactactggtctggagtgctgtggttaccttgccagaagcggaatcaatgagcttggtagtgccatcggaagcgaagaggtcaccttggaaatcaccatccgacttcaatttcgaaagtttcgtgaccatgccgctgtttagccggtcttcagtaagggtgctttctgcaactttagcatttgtaatcgtaccgtcttgaattttgatactggtgaccgcattatccgcaagtttggtattatcgactgcgccattggcgagcttggtggcatcgactgcactatccgccagtttagttgtggtcacggctgcggactcaatagagtcactcgtgatccggtggtcggtattgacaccagcaaccttcttgaagacgacaccgtcaccgaccagatcgagcgaatcgttctcctttagagtatagtcggagaaggcagtgagtttgtccccctgctccgctttcacaccatcaataaatagatcgaagttcggattcgcactcgacttctgaataccaccgaattgcagtttcagcttaaccgttccggttggaaccggagattgatccaaccggtaggtctggtagaaacgggtgaatccggcattaatcgccgattgtaaaacccagtcatggttaccgagcaaattaccattcacatcataaaacagggtgcgcgctacgatgtatccggcagtgtaggtcttgatatagagatagcacgagacagtgactgccgagagtccggtgacatttacaaaattggttttatccggatcggtgagcaatgaagccatcgcactatcggtagtaatctccatcgattgggtgccgaataacttttcagttgttgaaattgtgatttgatttgccatgtcaggttatcctttcaccagaccatttgttcaaaattgccattaataattaaatttggttccgctattgggcactgcggagttgtcactgaaatgcggtgtgaaggtttacttttcaatcgcagtccgcaggcaacgaggtaacattcgtactgtgtctccggttgaactgcgggaagaataccggaacgtgcattacgtcccgggataattactggcacaccagccgcatcgacatcttgacgctcggcatacaattcataatgagtgacgccgtaatcgttgcgcagcgaccacttgaattgcagaccaatctcattattcgctaccactgacgatacctgtgttaacaaaggtgtctccaccgcatcgccgagatagcgggtgcgataatttccgggctcgccaacttcgattcgataacgcgaaaacacgaccagcgcaggagcggtaaagagcaatgcatagcgactgtcgcgcagtccggtgatggtgagtgtgccatcggttgccactgtcactacccgcaccggcagcgagcaccatttcccatcgcgttgcactcttgccagcaggtcatacaacactgcgcttctgcccacgggaagaccacttaatgtcaatatccggtctgccattagttcgctcccgttggcatagctgccgccagcgcatctaattgctcttgagtcggggcttcggcaatggcgcgttggagagtaaagacctgttcggataaatcacgcgttacttgctcacgctcgatctgtttgatggtcgtcatcgctttgcgatcagcatcggcaagctgtgctaccgtcttgccatcgccactctggagcgcatcgacggtaatggcgagactattgctccagttgctcacgacattgtactcggacattgaccgaacgaacagtagcaatcgttgtcccgggtttacttcgatggagaacgactcggtgcggacatcggattcatagagtagtttcttaccggtgagtgtggtgccggagatgggagcattggtaagtggtgataacagcgttatggtcttggtgccgggatcgacagtgcgaactattccgctttcgttaccgacgatgattcgttgattcggttgaaaagacatagtgccggtatagatgatttcactcgtagtggagccattcccaaccgttgtggtcgcatcgtcggtttcgatctggcggcgctgtttagttggtgattcatttacacgaacgatggcatcggtgtgatttgcttcgagcacagcaactgatatatcgaccggtagcgatccggtattgggcaacaattcatagacacgaacgagatattgcacgatctcttcgtggtcgaacagtaacggttttgtccaactaaaaaataatacatactggttgctttgcggttgggagataactgcggcactatcgccgatcagattggtagagtgggtctgttgttggagcgccagcgaacggttttgctccttgccggatttaaccgcatcgatgccagccagcattccggtaatggttgtaatcgaaccaccaaaaccgatctccgggacatcggaaaaataaaacactgcattggcaatattgccggttgccgtagtggaaagtgtggcatgagtgctatcagtgactgccgaaatagtaaattcgagtggggaactattcgcccccggatcgattagggttcgcttgccgatataggaactatcgaaactggtgccgttgccaaccatcgcctgtgaaccgcttgagagagaaaccgttcccggtaggcgcatattcgataacacaccgttgcgaatcaagtcattcttggtattgcgcacttcaaaatcaaaggagccaccgggcaaagcggtattgccgcgcagttgctcgaaagtataacctgcgatttgtttggcaatgaccagcgcgcgcagttcctgcagcgacgataagtgcgccgatatttgctgactcgctattgatgccgcttgatacgaatcgagtgccagcgatagttcacttgatcgttgactggtcgggtacagtttcagttgagcattcgaaagcgaaagcaccggtgcgtttggttgcgaaggaatcttgcgggtgagtagcaactggtcaccattgccatcttggaagttgatcagtccgttacgtaataaattccttagctcgggataaactgagagaatattttccacggtaaggccgacaggtccatcggcacctccgatgcgaaattccgaagcagttgtatgggtatcggtgttcggtgcatgcaaccgttcatcgatcaatagcgaaactggctcccgcagatcggtaaccgaaccatcggtttcaatgtgggcgagcagtacctcaccggattgcggggtgttgtcggtgcgtgatacaatactaaaggagtcgtcgccatagatgttgtatttgtcgccagtcagaaagtgcgatacttcgtgacttgatattgtcgtgtattgtaaaaagacataacgattcgctgtcgattgaaaggatgtcgtttctattaattcaatccgtttgcaactgatataagcgacaccggatgcgcagaggtagtcttggattcccttggaaacaagcaatccccgcaccacaccatcactcaccagatcggattgcatggacgacagcgcttcctcaatcccgtcttgctggtactcgaggtcttcgatggtcggctttataccggagaagtatagtagtttcttcatttgcttttcttagtccacgaataatatttgcgtttgggtgtgcgcgggtttaaagtcatatatcgcttgttgcaattgctcgcgccggtgttccggcagtccattgctgccaatactcaccgtaaagcagaaattccagaccagctcactggcacggtagacccgattctggcggtattcgacatagtcggttttaccggcatcctcttcggaaaagagatgcgtcagattgatttccgcttccagcggttgatcgttaatagacagcaaaatcattccctgcgggtcggcataactttcgacgatctcccggcagacaaaaccgtgcgattcaattaatgcctttaatcccggcttggtgccaatccaccggcaggtattcggccaatcggtgagccgaagagccagtgactcattcgattctaccggataacggcgagtcccgcgtccgagggcaatggtatcgagatcgctattacgttccggcaatgcgtaataaccatcgtccggctccactacctgcgcataccatgacaaccgaattctgcggatatcgcttttcgcatcgtcgagcacttctccaatcgccgagagtaacccgtacaaagcactattttctgtgtccttttgtttgcggataccgggcaacagcatccagaggaaatcgccgatcacactcatcagtagaaattctcccgcttgagtgccggaacggattcgccatcggtggtctcgactggttcgataatgataccagtgtcctggtaactgcgtcccttgaggaaatgctcgatagtaagcgctcccagttccaaaaattcagtgggaccacagagcagatcctgcgcaggcaagagtaatcggacgttgtacacgccatcgatattcagaatcgcttgcagcaagcgcgcaactaacaatccctcacccaacagcaatttgtcagtgtgaatttgaatcacttgacgcgctgtattatcgatggtttcacgatcggcatcagagaagcgccatacattgaccgatacgtcgatggtgcgcttgctgggacccacgacccgtacgtcactagtgagtggtttacgttgccgcagatagagcaatacatccgacaacaattgcgatgatggcatgccatcgacacccaagaccacaactccaaccgtcccgggtccaaagggaaaatcatcgaggatctgtaccgaccgaacacccgggactgacaatgcccattgctcgtaggcggcacggttaccaccgacaccgattgcctgccacgcaagttgggcacgcttgcgcaatgcaccatcagtctcgatgtcactcccctcgcgatagagggttgataccgttttcccatttgcgagtaaaaaatcgtcattgatgacactggtaattccggagatcgatgtcaccagtcgcgtaaccgttccactaccaatgttgtaagcagtgccaatcgcttccgcttccgccagcacccgaacgaatgattcatttgcaggaattgtcgccggttgtatcgtcgaaaaccggtattcattaccggatgaatcagctcggcttttgacaatattacctgccggaatcgtcaagggatttgctgatgccgtccgattgaatgtgatccagagttgcgctttattgccgggcaaccgttcgactccgcactcgcgtgcgcgcaggtcgagccattcaccggtggcgctcatcagaaagccctgttgtgccaccttgaatacaaagttgtacagcgatgcgatgacatacgcgaaaatctccagcagattgcggattccgctcgaggtcgagaaattggtgaatggtgttttacttgcaacccgttcaatcaattcatcgcgaatgtcagtgtacgatttcactttgttgcattccgtttcaaatcatcgatactctttattccataaccccaaacgagtgtatgggtgtcttcgtcaccgaccgcttgaaaacttgcccgaaacgatttctcaatactttcaaacgagatcgcttccacccgaatcgtcgaggcaacaacgcggggatcgcgctcgatggtctgtgtgatatagcgctgtgccagtgcccggttgagcggagtgtcgttgcatcctagcataccaagcaatccgcaaccgtattcaggatgcggaaatagttctcccggtagggtgcgcaatgcatcggcgagatcgtggagcagacagtcgcgtccggttacgagggcaaaatctccagtcgccgaaacgacaaggtcgccatcattatcgaatgctaaatcggtgccgagatgctcaaacataaaaaatcctacattattgctatacccattgttacccatatagacccattaaatttgcagtcgcggtacttattgggtataattggatataattgtgtatcaaattggattacccatgtctatcacactcactccccagattgtccgactcatcgctgaaatcgatgagttcaagggttactggcgcggagtttcttcattatcgaccgatgcgctgcgaaccctccggatgtttgcaaccatcgaatcgattggttcttcgacgcgaatcgaaggggcaaaactttccaattcagaagtggaaatgctcctgcgcggcatcgatattcattctttccgcaaccgtgacgaagaagaagtcgccggatacgctgatgcgatgcgattgataaccgagtcgtttgctgaaatcgacttgaccgaaaaccacgtgaagcaattgcataaaattttgcttgcgcattccagcaaggatcagtggcatctcggcgaatacaaacagcatcccaaccatgtctcggcattcgacgaaaccggtcacgaagtcggtgtgattttcgaaacatcttcaccgttggaaactccgcatttgatgcgcgaactaattgccgatatcggacaacgcttaagggcagaatcggaacacccgttattgacaatctccgagttcacggttcgttttctcgccattcatccctttcaagatggcaatggacgcgtctcgcgcgtgcttaccaacctattgttgttgcgtgccggatacgactatgtccagtacagttcactcgaacaacaaattgaactgcaaaagcaggactattatctggcgctacgaaagacccaattagacctctgcgatcccgcttggaatgagttcttcctgctcacactcaagcggcaaaaggatcgtttactcgagcgggtcgaatcgcaacgcgagcaacagtcgttaccgattcccgaagcaattatccgcctagtcaaagagcgtggtcgtattacgatgtcggatgttgtcagccattaccggttcaaccgcaacacgatcaaaaagcatttggaagccctcgttcgtagcggacaactgataccgcacggaaaaggacgtggtgtttattacaccattgtctaaagcgacaacaagacaatgaatcactccgtcttagcgacctgcgataacagcgagtcgctcattggttcgatcggtggtgacgtcggagaaccgagattgcctgtatgggtgtgggtgttgaaaaaagtcataaatgaatcacctaacacgactttctcctgcgcactcgcacccaactcgacatgcggtgacgacaacggtcctaacagatcggaagaacatgtgcagcatttttccatacgtttggtttcttcgatagttaggcggaatgacgtcagaacatgatccaacacacacctgtggtgcgcaccagaatttccgagacactgattcggaaattcgcctaactcttggctttctctacctgtcattgcacagaccatgttcagactaacacccgcgacactgccaggttctcaccagctcccaatgcccgtagaatagtgactctgcgattgagttcggcactgcgtcgttgtaactcttgtgttttcgcaccgacactgcgaccctctgcgatggtttgcgaaaattttccggcatgttcctactattcatcgggtagtatctccgccgatggacctaaaccgatcagagccggatcgattggcactggaactttgccgcctttcgagtacatccgtacttgctgaataatctcgaccgcatactcggcaggtgatttcggacctgccgcaccctcgccatcaaccacccgttggtcacggtttacacggattgccgcaaggtgccgcgtgaacgcgcgtgatagatcgtcgatagtcgaactggaagcatcgccccacaacgcacgcagcaaacggatataggtaatcgcggcaagttgcgcatgccgcaggtcgctcgccttattcagatcggggaagacctcgtacaaatcggcaaggaacaaatcgaacgctttcttttcgcgctcatcctgtagctccggtaaatacgcaccatgaataacagcattgcgatttcccggacgcgccatgatcgcgccttcgtatttgccaccatgaaaccggcacctgccattcgcctgtgctggttgtcggcattgagttcctttcttcgtgacgacaccacagacggtattaccattcagagtacctgtaacacctgagcgttcttgcgtatctggaaccagcgcagttagcgagcgcgccttgacgcggtgctttttactggaagtactgtcattattggatttcttcattaccggtttccattcgaatcatggtggtgaatgaaattctttttgttattctcttcagaccttttcgtacctgattcagaccttataacctgaggtctgtactcgcattcgctgtaggaatcggacgttgcgatggcgagcagacctctgcacaccttatcgtataacctgttctcacccgcgcgggcacaggcacgcacgctcgcaggaggggtacaatcgaggtctgctgaggtctgcatacgaccggaaaagcgcatccagtaaggattccggtgtgcagaccttgctgcatacatctgcagaccttgacggaatgacaagcatttacctgcgttcaaggtctgccgcacaaacggttgagtgcgctggttcatgcattctccggcgtgaggaaataaaaattgtagcggctctgactcaccccttcggtcgcctgccggatgcggtaaccggcgaagttgcggtcgaccattctgcgcagggcatgtcccagcttggtctgttgcgagcgggtcgtaccgtcgctgcgcaaggcagcgagcaattcattcgtttcgcagaattcattcaactcggaaatcttgactggtttttcccggtacttttcccaccatgccgagacaaattctcgccagatcgcatggtcgggatcggcagattcgtattgcgactgcagattaccgagaaaaccgggtatcccaaccacatcgagaatgccaccgatcatttgcgaccaatgctcgaacgaaccgagcggtttggtatagggcggcatgcccgcatcgacccatgcctgaatgagtactaggattgcgtgcaccaattcgcgtcgctgtttgcgtacccatagcggcaaatcggcatgtttaaatttctccctcagccacggttgctcgaggtgaggatcgatccggcagcgcaccatccgccggattaaatccagcgacatcttcagattgttgccggtcataagccagagtgcatgattgcgaatcgatattttagtggttgcccctagtaagcggtcagaccaaaccgttgaggtcaaaactgttgccagattggtactgttgagtgagcgctgctcgttaatattatcgagtaagattatggaatcgtctttcagcaattcggcagtgatcgctttgcggaactcgtcttcgtcattaggtattgtgcgggcaccggtaatactgccggtggcaatgagggaaataatgttacaaagcagccctttacccgaaccgggcaccggcgattcgatcaaatggagtggcgaacaaccttgtatcaagggtcggatgaatggttggaacaatgccgctaccgcatgcgcgcggtcgctgtcagtaacaaacggaaaatcgaccagtaactcatccagtaaataatcgcgcgccgatttaatttctttcggagagggatgcgatggcacagcaattccggtgagattgtccgggaggtgaacatagagatgttcctccggataataaccgggggtattgagtaaaataccattggcggcaaagaccggggtctggacaatatcgtcgaaccacggaatgcgctcatcgatttcccgcgtaatgtcgcgcgcaatgtcgtgcggtggttggctgtcggagattccggtttcggtcatacgaacccaacgggcacaccggaatagcagaccgaagatatcgacatcatcgaggatttgtggataagctttgtcttcggtagtattgattttgatgcggatgaggtgattcgttcgccgaaaaacgcgcggtggttgattcgcagcaatgagtgcgtcccaagcatcggacaagatcacagaaagttgccggttgttgacgacaatttccggcaaatcatttgcaggttctgtggtcgcttgccgcgttggtagcggtatacctgtttgccgggaaatccattggcaggaatcgcggaaatgtttcgctttaccaatccgaataaggaaatcgaagaccgagatcgtttcaccggtgagaaaggaatgaaacgatccacgctcgatagtaccggtgccggtcgccactcccgccgatggattgcggtcgccggtgggggaagccgggtcgcggcattccaaccattccgcaccggattgactgccagtcaataaatcaccataaacatcggtcagtgtgagtttctctagtgcagtagttcgccattcgtcccattccgatgtggtggtctttgtcgggtgtggcgacggtgtcgttgcggtgttccgacgggtgggtgccaattctggtgaattgcgatggtgtgccgttaatgtctgttccaactgtttcggggaaacggtatcgaattgttccggtagaaatggatcgagttttcccaacatggatgcgatataaaattcgttaccaccaggcgctgcttgatgccaccatgggagccatagcaaattgccatagccttcgggtttgattgttgcttgtttcggaaatacctcgatgccgcgattcactttagcatcggcagattcgccgttagcgagtcgtgcatcttccgggtaaagcgccagacccagttgtcttgccataaatgccggaaccattggttcgaataaaacccacaggtgccacccttgaccaccacccgagcgttcgatgtaagaaggaatcccaaaatcgtttgcgcatcgctgtgacaataatactgcttgtttgggatcgaccagtccattgggatgttccggtccgccatcgaaatcgatgcaaagccatttcgttaatccttcggcatttggtgtgtaggaaccaatgcgaaagtgtccagtaactttcgttgtcccccggctgtggatcgattcgatagttactttcggaagttccttaccgcgaacatgtgccgccagaagcgcggggagcaactcaccggcgagcgccggattcggtttgccagagccattgcgaaacgccactttgtcggtgcgcgagaagaaataatgctgcaataattcgacacaatggtcacgcatgattttgccttgcttcatgaatagttcccaattttcggatcagttcgcggtacaaatcgtcatcgactggtaacggcagttgttcgcggtacgcattcagaatcagtagcaatgcatctgcttcctccggcgtcaattcgatacaaatcgttgccgtcaattgcacattcggttttagctcactcattcgaaacaccctgcccgatccgcgacggagcaagttccttttcatcggtatcttcagatatgtgagaattggatagactcattttttactgctttccattttaatttctgtgatggcggtttgaatacgatcatgctcgcgttgcagacgttccagtcgtaaccgttccgcaaggacgaggtcgcgggtccgacgaattgattccaattcacgaatctgctccgcagccatatcgcggatttggatcagtcgcttagtctgttcaaacttttcgtccactccattgcaccagcacatttcgatttccctatttgtctgcgacgtaagaattgattcatcgcaagtgtccgaaacgactaaacgcaatcatcgtgccaagattgtccggaatgttgtaagtactggaagatgctaatggtgctggtttccgggagtcgttaatgtgaggaatatcataacccgctatgaaccggagcgcctattttgctcgtttttaggggtttatccaccgctcattttaggcactgtcaagcaggcattgagttagagaccgcttattttaggcggtggatatttttttcaccgctatgaagtgttactgattacagaacgaccgccgaaaatgaacgtttttaccaaaattcagcgctcattttgaacggtcgtcagacagggcttggctttgcgaccgcctattttaagcggtggataactcgttttgttttccgcagtaatacctcctcttgatttcctcgctacttaccgtttctgattacatcaattctgtcataaaaaaaactggcacgccggttgccttaatagagtgcagtattgattgatcggaaaaaggtaatgaaaaattcaaaaacattaactgcacacggaatacaacagaccgagataaaactcattgcgatgtatcgcactccgaacgaagaggaaatggaacgtcagcatctcgcgtttcgagtgttggcaaaatggtcattgtctacagcgttacagcgacagtctaatgcaggcgcacgcaatcctccggcagccggagcgcccgaccccgccttgacttcgacaccccttgattgcacccttccagcactcaataacgattcaactggaggagtacgataatggttctgagtaataacaactatcatccggcggtgggatacttgagacgttccaccgatcggcaggaacaatccatcggagatcaacgccgcaccatcgaaggttacgctctcaatcatgggattgagatattgaacttctacaccgacgatgcgattagcggagcatcgaccgatggacgaacagcattcttgaaattgatcgcggacgcgaaactgaaatcgtgtccgttcaagcaggtcctcgtgtacgatataaagcggtttggaagagtcgataatgacgaggcgggatactaccggcatcaactgaaaacacgtggtatcgagatcatatatgtgtcggagggattcaacggtgacgataccgacgatttactgcgtccggtcaagcaatggcaagcccggcaagagttgaaagacctgtcgaaagtaacgatacgcggattattgactcgcgccgaaggtgggtggtggctcggtggagttccaccattcggttacgatctggcgtattattctcgcaccaacgagtacctctgtactgtgcggtttatgtccgatggttcgcgtagcatattaaacgagcagggagaattggttcgtgcggttccgaaaggagactcactccaatttaccaagcgtgaccgttctcgattagttttgagttcacctgagcggattcaacttgtgaaaacgatgtacgattggtatgtcgtcgatggtatcgggttcaaaggtatcgcaaagcgtctcaaccagcaagagaccgaccgaccgtttggtaattttcgtgctccgaattttaaagacggatggggacaatcgtctatcgcggtgattctgaaaaacccgatctacaccggcgatatggtgtggaaccgcacatcgttcgccaagttccaccgtatctcaaatcatgccgccattccgatccgtaattttccgggacactctcctttgaagaatggggaggaagattggatcgtgacacgcgatgcgcatccggcaattatcacccggacccgatacgatgaatcccagaaacgtcgcgaatacacttccaagaatggaaatggcaatacatacaactgcggtcgcggagcacgttcgccatttttactcaccggcatgatacattgcgaacaatgcggtcacaattggatcggatacaccattcagaaaggacgcaaacgactcgatggatcgaatgtcaagactctgtattactgttgtaatggatacgtgaccaaggggcagaaagtatgtaaacggcatttaatcgggaaagaaaaattggagcaatgggtggttgagaaaatcgacgcgatgctccagaaacatttttgtacaccggagggcatccaaaatctgcggagcatggtcgagcgtatcgcgattgagatgacaccacaactcggcgacgaaatcgatcaggttcacaaccgtattcgtgagataaaaacgacaacaaataatctcatcgataatcttacctcggctaaccgggattacgtcgacgtccgattgcttgaattaaaacgggagctggcggtactcgagtcgaagcaattagaacttgcctccgccgggagtaaccggattgaagcgggacgcgtcatcgagcaggcaatcgagctggcgaagaatttcaagcaagtattcgagtcgggaacaatcgaggagaagcgattgtttattcgggcgttcgtggaaaagattcagagtgatccggtgagttcctcattcaccgccgattttgtactgatacccgggttgaaagagacagcgggtatggagagtgtagtagaaacggttattgggaatgtataaagaaaccgccccacgggctgtgaggcggtcaaatatattgttccgattacttactttaccattactgacttttgcgtggccgaaaacatccctgcattcatgtgtataaagtacacaccggaactgactttctgtccgcttgagttttttccatcccagtctataagatacttgcctgcttggaaatccttgtttgcaatcgtagctacctcacgcccaagacgatcatacacttccaaaacaacgtggtgattaactggaacactgaatttaattcttgttgtcgagttgaatggattgggatatggttttgccaatgaaaactcggtcgggagcgtcgggtcttgtttgtgcatcgactgatacgaccgctgattaatcagctgtgttaattgaagaacatgctcgcgatatgtttcaagtcgttcacttgaattacctaaactctgtgtggtattgccaccagaacgcatacctcgcaaaatattcgttaattcaatgttgagaacagcaactactgaatctgttaagcgtggtgcctgtacgcgagcgctatcgaattcccttaaagcactatcatacgagcgtgtatagtcgagacaccaactagcatttcgttcgagaactcgtcgatatgccgaactatgtaaaatagactccgttagtaaccattgtcgtaaactatcctgtgataacccagtttgattccaacattcacagagttgaccgattgcaaagtaaccatcagcagaatcagcatattctgaaattattgattggaaaattggaattgcctcgataaaacgtccggagtctttaagtgctaatgcattcatcaactcattgacatccaaaattcgatttggtaaggtatcgggtacaccccaattaaccaatgtatcatacgtggtgtggtttttctcatcggtaactgtttgaacgtcggaaccgaaatagttattacacacggatatctttgccgaattattgaataccgcaaacctgcaatcataaggctgaccaggtgtgcgtttatcgtaaatatccgcatgactttccttcatgagcgggtacgattctccggttaagagcagttctgcctgattgtaaggagaaccggttgttggcccgttgttcatgaagatgttgacagaagatccactcttgcgaatatcgggggacgcgccaagacagtaaaccccaggaaaacccaaagacccattattacgaatcacattgttcatcaataaggggttgcatacatatatgtataacccgtatccaccacagttttcgatacatgaattcgttaagtcgaaagccccattgtaaatctgacacccatggaagatcatatttcgaatagtatcagatttcattgaaacataactcccatatactacgactcccatttcgccatcactaattgtgacaaaattgggagaaataccgtatggtccgcttaaccaatcgaattccattcctgtgagtgcatggcgaattactacatgtccaaaaatagaatgttgtgcatcgaaatttccagaaaatatgatcccttgccagtattcgcccgaccagtcatttaagtgatatacatcgaaaaagattttaccatacgtactgccattgcagataattccacctttgacagtaaccgagtgcccttgatcgagaaacacatgaacaccagaaagaatagtcaatctggcattgttataaatgaaaagatcaccattaacatgtacatctcttgtaatcgttgtatcgtgcgtaatttgcccggaaataactgtaataaatgggcttcctccgactatgtcagaagggccgccacaattcagttttgcattcggcccaccacagcaaccaagatcattcctgggattattcgtttcaggatatagatcatggaaaaacgttaaagaatcgccttgatcgataccaggtgaatttgcggtaagaacaaaatcatgccaattccaacagagtggattcataaactcaggactactgattcgtgcaccagtaccacccggaatctgattaaaatgcagattgtctttctgttgataataggtgtatcgaacctgaaattgattaacaccacctaagcatttcaaatcgaattcaccgtttcgattccggacatacacacagttatcagttacaaattgattagcaactgtaggggtatcaattaatacagttgcatgcgcggaatcggcgagcatatctgctgacaaatagttgtgatacagaattgaattgctgagacgaattccaccagatctcgatgtaactcccgataactcggagcgatcaatcacacaattccatacccaaggcaaattgcaattcgttagcgagtcagggttactataactatcaccacctaaagcaactataccaatagaattattatatattcgattgcggagataagacccatacggatgattgtcgaaaaagagacctggtgaagactggattgtagttttgccatcgttacccggaatacgatgtaacatgaaatttgaatcaattaggcaatcgcgcaccagcggtgacgcacctgtcgagaccttgatgccgatagcattgtatcgaatatgacaagtatcaattgaaatacgcgagtgattttgtacccagatacctccgcctttcaaaccctgtagtaccacgccactgtcacaattgatcgaaacatcggcgctcgcattaggatttttgtaaatataacttcgagatacggcaacggagaaaaatgtattatcattgggtgtgagtgtatcgtgttgtgcgttgttgactgtatcgcagaaaaagatcataccccaaccgtatccgttagatggtttatggctttcaggtgaatacccatgcccgttacacgttgatgtacacgagtcgattaataaattatgaaccattcgaaaatgaaatccagcataaccattggtcgaatcgccgtaatctgcctgcgaacaacaggttgcataacaattcgagaatcgactcgaattcgtacgattaaccgaccatccatcttgttgaacaaacgcaacaaatgaagaactgtcgtaacaatgttgcgagctgtcaataaagactcctacaagcgaggtgatgtcggatggtgcagtaacaatactatcaaagctcatgaaaatgctgtcacaatgaacgatcgaaatgccgaatgaatcgaagtttgctatattattttcggtaattgtcattaactgagagttcgcaagcacgagtggataagtaacgatatattcagggttgcttatggaattcaagaggaactgacccgatctgtcacctgaacacatgacattgcacgacaaaaactgtgaattcgaaataagagcatttcttgaagtggttgaatgaatcgccactgtttgatcccctggcgtgtagggaccgttgttaccaaaaaaggagcaggaatcgattacaacattctttgtcgaatccaataaaatgagtgttttagcggacggtagattgttcaaattcggatagatcaaataatcatccggataattgatgctacagttattcaaatgcagaattgcagtatctaggttcgcttttacccggatgacgatgttcgaatcgaacgtacttggatatacatttagtgaatcatggctataaatatagcagtgctggagccagctggatgcgtgcggatgatcgaaattgaattgaatcatgtgtgcgtaacggcgactatcaataattccgttgaagagaataggcgatgatgaagttccattagcatgaatgctaccgccgtcgctgatcaaaatcacttttttctttcttagtgaatttgtttgattaaccagagtgcttgtatcacacagaatcttgacacctgcctgaatcgtcaaagtgctagttaccttgattgtatcggggtttctactatctccgacaatcacatatatactgtctggcactaatgttcgcgctgtcatgtcgacatttgcacgcaaaaatgagattggttgggcgtaagcgctgtgaaatactacacaaagcatcaaataaagaactacggaaaaagttgaaaaacgagacatcgaatcctcctcatgctcatttgagcaacaaaatcggaaatcgtgcattctccccgccaacctgtacaaagtataatccggtcggcagggtgtctgggcaccggattgtaaaagagtttttaccggcgataacatgcaaaaactggtgaagaatcgtttgtccaagacaattgtaaaaagtcaattccataccatttgcacgtgggctttgaatcgtaaccttgaacatcccgttggtcggattgggatagggcttcccaaccgaaaaagttgtcggtaaagctgttacggtttcttttactgctgagacagacgtatcaatttcccacggtccgatatcaggagcggagccaaggtagggcaagctatcaaaaacaccaccatttcgaatcggtgaatggagagcgaactgccaagggatggttgtggaatcggtgaacagaggattctgaaagaggtttccgaaaaagtcagttgaatcgccattccgattaattcttgtgagttgcccgaagcgtacatcttgtaattgatttgtgtcgcactgccaaaacaggcaaccgcgaacatcgtattgtggtacagcattattgtactgacgtaaaggtcgtatagtattcaagaataaagaattcacaactgtcacaggtgggaggggactgggtatagaattcacggttttcgtgatgacggattgagcacctatcagcaagtttcgttttagttgtatggtaacgcttccatcataagtttgaaaagagttgtaaaataccgaatgggttaccttaaccgaatcatcaagctcaataccagcattcataaacatacaactatcaattaagtaagaagcatgatggtagaaatcgtatatttctaaaaaacaacgaaaatggaattttgtacttattattgcaactgaatccgaatctgcaaagaattcgatgccaccataagtgtaataagggtatctaaagaactctgaactacgaagtaaatttgtgcctttcgtagaaagtaataacagaaccggtagtctcgaacttcgcaaaactaaactgccattacctctcttcgtcaagtaaaatccttctgtcgtatccaaattccaataatccgcgagtaaacttccccctgaatcgacaaccatacttccaatccaagcatgagcatcaaacggaaacacctgttgaaaacgaacactgtcattgggtgttccgttgatttgaagcgtcccgtatacttgccataccggttgtgtcccgggtgttaacgtatgatacaccgtgacgccagaatctattttaacggtatcaccgcgcggaattgttaccggacgacaaatccaataaggactgtgtgctctggtgagtactgtatcatgcagtatcgacggtaaactcggatagaaccggtaaccgatcgataccgtatccggcattgtcactccgttcgcaacaatcatacggtatgttccacttgctaatgaatcgccatttgcatgcagagctatttgcaatgtatcccaactccgaactggttgccggaaattgacgagcggtgttggacccaatgtcggaagtacctgtactgaaacactcggtaaggtatcccatagtgtcacgacataatttttaagcgtatcggaagtgaatacccaggattgtcttcttgttgtatcctgccatgcctcaattggatgaatcgcgcgatggtcgaacggtatcgcaccgcagtcggcgcaactgctgtcggcatcatgtggtaataaaggatctgcaccatcaattgctatcgaatagagtcgtagtgaatcgtttccagaacttatgttttgtaatcgtagccatccgattcgattcgtactgtctgctgtaacattgtaaaacggacgtggagattgaaatgcattataacgtagaatcggtggtgaagcgccatttccccgaacaataataggatgagtggcgtgatagagcacgctgttttggatggttaccggacgagtatttccttcgccaatttggatcaatgctgtatcgcggggaaaaaaccactggcgctgaacaattgtacagcggtcgataagggcttgtgtgttgctaaactgaagacaagcaaaaggagaaacatcggatgtgggagtttggttataaaaaacggaattccgaatggttgcctgcgagttattgatgagaatcaattcaagcgtcggcccccttgtcgaatcaatctgaacagtaagaccgttgccatttgacggccatactgcaacatataaccaagaatccaaaacacagtgattcacagtaatcgtactgccagaaccctcgtaccaaagttgacgcaattggcaatcaataaaggtgctgctatgtccaccattcgcatcggcgatccgtaccgaaggatggccggttacgcgggtaagagaaaccgatacactctcgccgccaagattaccaccagcggcaaaatgtacatctgtcattaccgtggggttaccactaactgaattcccatatacaaagagacagttcgtgtatgtacctgtaccaaagaattgaacgccatccaaactttcaatccgacagtttgtgagcgttccgctgccatcacagtaactacttacattgtcgataaaccaacaagaatccgctgtaatcgaactactatgacttgcgaaggaacaattgttgtcgaaaaagcagtgatgtaaatcaatcggtgagttgaccgcataaatcccatattgtgcgccgatgaacgaggcatatcgtatagtaggaagatgagtaccagaatgaaaattcaaacaccaccattgcacatttgccgactccggtgcaaagaaaactgaatcaccaagtgtgccgagaacttggagtgtgccgttaattgtaattatcatgtttcggcgaaaaagaatgttgacgcctgcttgaagcgtcaattgcgaatcggtggcaacccaacagctgtcggtaacgatataaggattaccgattcgggttaatgttccagataaggaaccggagagtaaagtttgagcttgcgccgtaggaattagtgcgacgaaaagaaggacaacacatacaactgcagaatatttaccgcagataaccatcaatttgtcttccacttgaaggaaagaatgattttcgagaatattaagctttacaaaatataaactcttgtgaatgtaatgtcaagcaaatctaggctgaattgttaagtaaaaacgtcatattaattctggatagacgaaaacctgcctctattttttgatctgcgaagtacgatccccaaaatcaaaggacaactggctgaggtgacacaactctttttacactgagtgtggaattggcggctttttctgagaagatgatatcttgaaacccagtcccggcgcgggttgtatttttgtctactgcgaggttatgacattcgtcacaaaatcgagcgcgatgcaccggttctgaatacattttttctgtcatcttttctgtccatatcgaccctatgattttcgtcacttttgaccggaaccgagaggcgagggcataaaaaaagacacaaggtaaataccttatgtcttctttaattatggtagcgggggtaggatttgaacctacgacctttgggttatgagcccaacgagctaccagactgctccaccccgcgccaaggtctcattagtgagaccagccgttaatatagaccgttcaagtcaattacgcaactcggccaaaattgaacccgaaactagcttctatcactacgctctgataagattcggaataaccgatatttatcagcatcccttatgtgtataattgagttgaaaactgtatctccactaatcattattcgaatttacagagtagttcggtgcttctttcgtaatgataatgtcgtgtggatgtgactcacgcaggccggcactggtaatccgaacaaatttagcattcgtaattaagtcatgtattgtaggtgtgccgcaatatcccatcgcagctcgaagtccgcccatcaattgatgtacagtgtcagccagtggcccgcgataaggaacacgcccctcgataccttccggtacaagtttctccggttccgtgccgtgttgaaagtaacgatccgaagaacctttcttcattgccgccaatgagcccataccatgatacactttaaacgaacgcccctcaaaaaggatatgctcaccgggcgattcttccaccccggcaaacagagaaccaatcatgactgtttcagcacctgctgcaagcgctttcgcgatatcaccggagtacttgatgccaccgtccgcaattaccggaatattatgtttcgcagcttcttcagcactttccaatactgcagtaatctgtgctgctccgacacctgcgacgacacgcgtggtgcaaatcgaaccgggaccaactccgatttttaccgcatccactcccgcagaaattaagtccgcgaccccttcctttgtaacaacattccctgcgactaaatcaattttcggaaacaattcgcgtaaagattcgaccgttttaattacaccgatgctgtgtccatgtgcagaatcgacaataatcacatcgcaacccgcttcaataagcaggcttgctcgttcgatagtagcgtcaccgacgccgactgccgcacctacccgcagacgtccatgtgaatctttacatgctatcgggaattgccgttttcggaggatgtcctttacggtgattaagccaacgagtttaccttcatcatctactaatggtaatttctcgacacggtgttgttgcaggatttccactgcgtcgtcaagcgacattcctggacgaccagtaattaatttccgtgtcatcaccttctttactttttcatcaaggcgtgtttcaaaccgtaaatcacgattagtcaacataccgactaacttgccatgatcgacgaccgggaagccagatacaccggtttccgccattaactgaagtgcctgagcgatggtcttttcaggggaaagtgtgataggttttgcgacaatcgcagattccgagcgtttcacccgatcaacttcaacagcttgttcctgcggggtcatatttttatgaattataccaattccaccctcgcgggcgatagcgatagctaacggagcagtagtaactgtgtccatcgctgcggaaacaatcggaaggtttaggcgaatatttttcgttagacgagtcgaaagctccacatcccgcggcacaacttccgatttagctggtataaggagtacatcgtcgaaagtaagtgtttcacctaagatttttttgtgtaaagtgctcatattatttccttttcttacaatatttccgaaatgcggaacgcatctttttctaccaaccggcggcacggaacgacatccataccataccaatcgcttttacctttaccaaccagtaccatacacctatactgctaccggccaacacgacaatcaataggaaagtagccgcccgcgttgaatttctaaatgcagttagtatagcggtaatgtcacggtacaaaccccatagcagaaagaagaatgccactaccaaccaaccgatactgatagaatgtgcagaaagttgtccgaccaaaatcaaactaagcggtagtaatagtaagtggttagcgaaaccccatgtgagatatgaaattgctttggtaagtgcaattctttgacgggtaaaaatcgaaacgaatgataatataattccaaagatgcctgcaattacggtaaagaaaactaatagaaacgcaatacaaatcgcaggattccagattatcaggttagcccagactttaacaatggggttaccgataagtgtagtaagaaatacatcgaacgagtaatcgtgccgtagcccaaaaatggttgcagcaccaagtgttgcagttattagtgaaattaacaaaccaatgattacagtttcaccaaattggaatatccgaccatcacggacatcagtaaagaaaccacctggatgtaaaagactccgtgtgacgtgcattcgcagtactttattttgaccgacggaaaatgcgaaaagcagtaacacaagcaaaccagagacgatgaaagttgccgcgctcgaggcgggtgcatcactgaccggtgtgggtttgaccggtataccgtttaaataatctcgcaatgtcacaaaagtcgtacgttcattgcgttgataagaaatcactccaaccggtaatgtgtatggtgattcatcaggtgttcgatttaaaagcggatactgggtttgatagtcatttaaaccgcctaacacaaagccagcgcaagaatgaacggcagtttggtcaagcgtttttatcaacgacaaggattgacgcaattcggaagcagcatcgtttcctttttgcgttagtgggtcgagtaaaatacctatggtacccgctaacaatggactagcaccttccggcaacgtgagattctgtgcagtcaggccgggtaatcgctcccatatctggaaatcggctattcttgtagttagcggttttggagttgaaagaaatactaaatgtccggtttcgtgacgaattttttgaaagatatctgcgtattcttcatctaaatcatcagttgggagtccaaacccgggactaacgccgagtatggatgggtggttgccagaatgatccgcgaattgacgtaaaatagagacgatgtactggcgaaattcttcaccacgtaggatgcgggcaggaggaagcgaaaccggtgtttccaccaataaatacaagccatagcggtcagccaggtgaattagataaggatggggaagttttccgattatgcgtagtgtattcagaccaagtgattttgctgcaaaaatgtcacgttcgagttgaaagggagttgctgaccaccccgtctcgggaaattcttcgacataattggcagctactatttttattggttgaccggagtgtgtaaaaaaaccggaaggtgtaacttcaatgtcccggaaaccgacatattcagtaatctcatgaagaagttgctcttggtcatataaccgcaaatttaaacgataaagattgggttgtaccggactccaagacagtacattcggaacagtatatgtcgcagtaccttgtttgatagagcgttgcggtaattcgatgtcgatgctattcgacgcaatcaattcgtcggaagagaaaggagttagcgtccagcgtaattgcaattgtgtgggcgtgccggcaggtagcgcatacgaaggtaatggtttagaatcgcgaattaaataagtcaattgcaaacgtccaccgccggttccagcgacagtattcaccgaataagattcgatgcggcgtaaaggtagggcaagaagatacgcgtcgcgaaatatacccgagtaacgttttggtgtatagaaaccagccgggaggggaaactcatctgaccggctcacttctgcttgcagttcaatgcttaaagtgttgtcggtatcgtaacggagttgattcgggggaatgtcgataaacatcgcatcagcgccacgtccgagcgccaagaactcaccgtttaatgtgacggaagcatcttgtccgatgccgaggaaaattaagcgaaattgataattagccagtcgagacggtacacgaaatatccgcgagattttgacgggatcggttccattgtaactgaacggaacgcggagggtagctggagtagagccaccgaaaatattccattcaccgtttaacgaaattattttcgtggaatcagttgtaccgtcgattccgattaaagcatcgaatggatgggtatccccgaatttaaattcttgcgcatttgcgatgaaaagcgtagtgaataggaggagaagtgtgataataaatctatacatggattgtttcagtgagattatcgaaaatgtgtagtaaagttacgaatatagagtaatcattaagatacgaaccaaagtaccagtattcctgctgctattcgataccaaccgaacggagaaagaccaccgcgttgaaggaatttgacaaaacctttgacggcaaaggcggcaactacggcgctggcaaccataccaacagtgaaaacgccgatactggcatgatggaagacttccttgtagctctttgccaattcaaatactgtcgcagctaagattacggggagtgcaagtaagaacgagtattccgcagccgccgcgagcgataaaccggcaagcatgccaccaagaattgtagccatagagcgggaagttcctggccaaagcgaagcaatctgcgctattcctataatcaaagccatcttccatgtcacttcaccaacactaacaccggatgttccactttttttacggtggatgcgctccaaaataatcatcaggataccgccaacgataagcgcaccagcgatagaggtcggattgaacaatttctctttgatagcgtggtgaaacaatacaccgacaaatgccgcgggacaaaaactgataaataggttcaaaatgagtttacgtccagccggatcggcatgaaccacaccattccacatttcagcgattcgttttcgatacagaccaataattgcgaggacagcggcaccctgaatgataacgttaaaatcatcgacggcatttttggcagattttgacattcccatccaatcggcagtcaggacaaggtgtccggtactggatacgggaagaaattcggtcaggccttcgacgataccgagaatcaatgcctgcaggtaggtgaattgatagactggttccgcaatgccagtatctactggggtttgcggggaaccagcgacggctaaaatgcaaatcggtagcaataacacggttataacgccaatactcagaccttttctcattttcacctttttatagataaatcaaggaaactattcccattccactgttgccggtggtttagatgtaatatcgtaaacaatacgattgacttgccggatttcattggtaatgcgattggcaacacgggcaaggaaatcccaagaaaaacgcgagaaatcggcagtcataaagtcgttggtgttgacgctccggatagcaacagcccgctcataggtgcggtaatcaccttgtacaccgacacttcggattggaagtagtacgacaaatgcctgtgaaacgtcgtggtacaatttatcgcgacgaagttcttcgatgaagatagcatcgcactcgcgcaaaatgtcaagcccctctttttcgacagcaccaagatagcgaacggccagaccggggccggggaaggggtgacggtcgacaaggtttgcgggtaaaccaagcgcacgacctacttttcggacttcatctttgaaaagctcgcggaggggctctaacaaaggaaaaggtagtatttcgggtaaaccaccaacgttatgatgggatttgatggtagcggaagggccgcgaacgggggaactttcgatgacatcggggtaaagggttccctgtgccagccatccgataccttcatgcttcttagcagcattggcaaaggtctcgatgaagacacggccgataattttacgtttcttttccggttcgctaactcccgctaactcgctcagaaattcatgttcggcgtttacgcgctcaattttcagacccaaatcgcggaatgccgcctcgacctgatccccttcattcttgcgtaagaggccgttatcgacaaaaatcggaaggagacggtcaccgatggcacgaccgagaagggcggcggtgactgacgaatcgacacctccggaaagaccgagtaaaacttttttatcgccgattcgttcggttaaatgccgcgtagcggtattgataaaggcttcagtcgtccaattccctttcgcgtggcagatatcatacaagaaattgtgcaggatagtgctaccaagcggagtgtgggttacttcagggtggaactgcacaccaaagcggtttttggcaatattttcgatgatacaatgggcggtactgccgctgctaccaatggtagtgtagccatcggggagttgcaggatgcggtcgccatggctcatccatacttcaaattcggctggaagcgaagtcaatagccgtgaggtgtgggtgtcagaaacaaaagcgcgaccaaattcacgatggtcgctgggttcgacctgaccgccggtctgatgggcaagcgcctgcaagccgtaacaaattcccaaaatcgggatatcccaatcgaggacgctaggatccagtaacggcgcaccattgtcatataccgatgcggggccgccggagagcaccaaaccgatgggttggcgggcagacagctcttcgcgggtgtaattgtggcgaacaatttcggaaaaaacgcctaattcgcggattcggcgggcgataagctgggtatattgcgagccgaaatcgaggacaagaatgcgctcgcccggttcggcaatggtttggatagcttcggattggtttgtgttcaagtgaaatcccggagtttctggtattacgtatggaacacaatctaatcggggaaggggggagataaaagtggcagcaccacgggcattttggggacgggggacgggggacaggggactggggtcggggaaaggaaggatattggattagagattcaggatttgggattcggttaggaaaagacgaaaaaaagaaaggttgaataatcaaaataatagaagtcgaaaaacggggaatttgttttgcgcgaaggagtcgcaataatggaaagaattgaataataaaagtttggaagggaaattggttgcgactaactcgcaataattggaaattgtatatataagatatatattttatattaaattgtggataactctcaaaaagttttcacaaacttttttgggacagagtacggaaaaggatggggggatagggaacaggtaatagggaatggggaaaagataaaaaaagaatggggcaatgagttcagggaagaacaaaaacaaaggagatgggaatgatacggaagaaattaatcaagttaggtggtagttatgctatcgttctcgataagtcgcttttgttgatgctgggcatcaaaccggagacgacattaaatgtcacgacggataactaccgtatcatgattgagtcaagtgagaatcggcgaaagcgactagcgagcgatgagtatctcaattcacttatgagccagcagggggtattgaaattgctcaatcgtgaggggctgaaggtagcggcaaaaaagaagtagggggaagatggttgccggtcgccagttaccggtaaaagatgtgggtgtactaagcttcaaaaatgactataaaaaaggctacaagcaaaagatcgtcacgtcatttcactacgtatctgcttcgcaggatacttcgtttcattcctcgcaaatctaattggacaggcaagagtgcctgtcctacgaatcgcctgacaagaatgtcggacgtactgttttaacgatgaccgtagtatattaggatgaataattggaaggatgtatgccgcgaattcgggtattgtcggaaatcgtagcgaaccgcatcgccgccggtgaagtggtcgagcgcccggcatcggtgctgaaagaactcgtcgaaaatgctatcgatgcggaatcgacgcgaatcgagattcagattcgaggtgcaggaaggaatctaattcaagttgtcgacaatggactcgggatggatcgcgaagatcttttattggcattcgaacgacacgcaacgagtaaaatccgccaatttgaagaccttgaagcactgttgacacttggtttccggggggaggcgctgccatccatcgcatcggtcgcacgagtggaagtgaagtcacgatccgcagatgaagagacgggatggtatcttgccatcgatgccgggcgtgtcgtacgaattgaacaaatcgcggtgccagtcggctcaacattcagcattaaaaatttgttttataatgttcccgcacgacgacgattcctcaaatcgaatgcaaccgaattcggacacattcacgtccggttcaaacgattcgcgttgtcacgccctgaaatagaatggaaatttaccaacgacgatgaagtgctctacacgctggctcccggtacattggaagagcgggttacacaggtattcggggaaaaagtcgcggcggatttgcgtcccatcggttgggaagagcaaggacttcgattgaccggaatggttggaacggcacctttactcaggatgcaacggggcgatcaacacctgtttctcaataaccggctcattcgctcaccgttcatcacgaatgccgtaacggcaggattgggacagattgcggaaccggggatgtttcccttctacattctgtttatcgagttgacgccgaaacaatttgatgtgaacgttcacccctcgaaagaagaagtaaagttcgataatgagccgttaattcgcagaattgtggtggatgcggtacgcgatgctttgcggagtggcgggttggaacaaccgacccaccggtttgaagaggagcacaccggaacaaaaacagtttcggaaaattacccggaaccgaatgtcgtacgtgagccgaacgcgccggtgaagcgaccttcggggttcttcgaccaaccacagggatatgtaccggtacggtatcgagaacgtccggcttcgcaatattcattactcgaaacaaaacgggattgggatactgcgacggggggcggcggggaactggcgagtgcggcggacgacacggcgttgcaacagctggcggcgggatttgagagaggcgaagcaagttcactgtggcagattcaagggaaatacatactcgtacaagtaccgtctgggttggtgattgtcgatcaacacgtcgcgcacgaacgaattttgtatgaacgggctgtgaaagagatgtcgagagatgggtggaaagttcaggagttgttgttcccggtagaaattacggcaagcccggatgatgtggcggtagcaggagaattgattgaggaatttgcgaagttgggatttcgaatcgcagtaaaagacgcaacgacattgattttgagcggcacaccgcaaggattgaagcacattacgcaagatgaagtgatggtaaaacagattttagatttgtaccgaagagattttgaagcgcgaccggaacagatggataggttagcggcaacatttgcatgcaaagcggcagtgaaagcgggaatgccgttggcaatatcggaaatgcagacgttattggaagaattgtttcggtgcgatttaccttacgtgtgtccacatggaagaccggttttaattcaactcacgatagatgaattagaccgacgttttgggcggtcgggcgggtgaaacgactgctgtgcatcgtgggaccgaccgggagcggaaagaccgcagtcggaatttgtgttgcggaaaaattgcatgcggaaattgtgtcggtagattcgcggcaagtgtatcgcggatttcggataggaacagcgcaaccgacgcaggaagaaaatgagcgagttgcgcatcacttagttgattttcaggatgcgaacatcccgtttacagcgggggcatatgcaaagctggcacgtgcgaaaataaacgaactgaagaaatatggaaagaatatcgttttggtcggaggatcgggactttattttcgcgcgttgttcgaagggttatttcaaggcccgccgattaatgaagcatatcgcagtgaactaagggaacgggcaaaaaaattcggcgtaccggcgttgcataacgaattgcttttactggacccaacgctcgcggtaaaaattcaaccgcatgactatccacgaatcgaacggggactggaagttttttatgcatcgggtacaccgctgtcgcaatggtgggaacagggttcagaaaggttcggtgatgagcctgtctatgtgggattgaagcgggaacggccgaatgtcattgaacgtatcgcacaacgaacacacgccatgttgcaagaggggtgggtggaagaagttgaggaactggtgcatgcggggtacggtgaagcgattgagcgggagaaatttcacgggtaccgggaactggcatcttacttgcgaaatgaagtgacgctggaagaagcggaaaacgcaatcaatattgtgacgcgacaatatgcaaagcggcaaatgagttggttcaggcatactgacggagtgcagtgggtggatgtaggtaaggatgatgcggcggaagttacggcggaaaaagttttagaaatttttcatcaaagagaagtagaatagaaatgaatctaattgaatgggtaatggaagcggcgaaagtggcgtcgttcagcagttacgaggagcgattgcatccactggtgaagagtgcggtggcgaagtgtccaggtgcgaagttggagattgtggcggataataatctgatggtgaccgtgccggggaagaagagtggagaagcaattgccgtaacggcacatttggataaaatcaatcatttcgggatggacaggacagacgaactctcggtagtgcgtgaagatgggaagttgacgggattattggatgatgcaaccggagtggggacgttgttgtatttgatacaagaatgttcgaagatggaaacaccgacgctgtactttttgttctcggaaatggaagaagggacggggctgaaacaagcgccgagtttgttgaagaacaatggtgaggggtactcacacgggatgggagcgcgacgtttggcggcaaatttagtgaaaacgaagcgattgccgaaagtcgtgattacggtggatacgacaccgtttttcaagggggagcggggtgtcgcattatatagccggcattgggaattcaatggactgacaccgacaacagaattaatagaaaaaacggctatgattgaagaatggttcgcgaaaatgtatccagatgttgtgcataggaacaatacaaacgattatctcgaatacggcaaaatattgaatgaaggtacaggacgagcgataccatcgattgcgattgaaccggcgatatttccgtaccattgcgcggacgaaggggttttcgaatcagatattgaacgggtagcggaaattgtaaccagtatgttgtatctttgattatcttataaccgataaattcacactacacccaatacctaaacttactttatggcaggaacacgtgagaattggggaagccggatcggcattattttggccgtcgccggtggcgccgcgggtctcggaaatttcctgcggttccccactcaagtcgtacaaaatggcggcggtgctttcatggtgccgtacttcatcgcgttcctttttttagggataccgattgcatttgccgaatggacactggggcgattcagcggtcagtacggacgtgggtcggcaccgggggtgttccatgtaattgcacgaaaaccgtgggcaaagtacgctggaattttcggattattcgttccactcgtcatcaacttctactacctcatcattgaatcgtggtgcctcgcatacgccgcgtttagtgtcatcggatggttgggaaatatcaccaatccggcagacatgaaagatttcctacaggaatttcaaggattgttaccaccgcgccagttggggacatttccgtgggcgttgatgtttttcggaataacgtttattgcgaattattggattgtgtcgagaggaattgttgcgggaatcgaacggttaaataaaatttgtatgccgttgcttttgatactcgcgatatttttgacagtgcgggtattcatgttagggacgccggacccggcatttccggaacagaatattgtcaatggacttggatttttgtggaacccgaactttcatgcactattgaatgtagatgtatgggtggcggcggcgggacagattttcttcacgctgtcagtaggtgtaggggcgatactcgcatactcgagttacttgaaaaagaatgacgatattgcgcattcagcgctctcatcggcggcaacgaatgaatttgtcgaagtgattttgagtggttcgattattattccggcggcattcgtttttcttggtgcggcaggggcgcaggatgtcgcgcaaagcggtgcattcaatcttggtttcgttacgatgccgctcattttcaataagcttcccataccgggcgtaatcgggtttgcgtggtttttgctgttgacgctggcgtcgtttacttcatcggttgcattgatacaaccggtattgacttttattcaagatgaactgggattgacgcggaagaaagcgacactcatcgtggggggattgacactggttgtttcactcttggtaaaagcgacactggcgtatggcacactggatgaacttgatttttggggagggacactgttcccggtgttgagtgcgttggtgctcgtaatcatgtttgcgtgggtattcggggcgaagcaggggttggaggagttgaatcggagtagttttatcagggtgccgaaatcattcgtttatattatccaatatgtcacaccgctttatttgcttacactgattgtactgtgggcgagaaaaaattattcgatgattatgatgacatcgatacgtgattcacaggtgtggaaagcgacgctgtatacccgtggcgggctggtcggattgctgttgattttactggtagcgatatattttgctgggagacagtacggtacgctggattcttcttcgaaaggggagggggaataatgtcgcattttgggtggttgattatggtgttgagttggttgtttatcctaattctgacggcgtattgtatgacgatttattttaagcatataaagaaacacacttgattatgggttgattactatattattttgtaatgtaatgaaattgattgtatgtgatgtgaggttttcgatgtatccaatgaaaaatttcctcgttatttctcttcttttgattaccgcagtaatcgcattcgcacaaccgacatgggaaccgttcgggacgttccatggtggattagtttgggtgcttggtgcggatagtagtggcgtaatctacttacaagcggaatccaacgaaatatacaagacaacagatcagggtgagacatggagcccacttcacattcgagtcgggcgagatacctatcctgcattttggattgaccgaaacaagttgtttcggttttcccgtgatacgctgttctattcgcttgaccatggcgatagctggctatttcagtgcattatttctgacagaacgattgcttatgttcataccgataatgagaatcggttgtatttggcgacctactccgaatctcatggaaccgagttacgcaagtcgacaaatggtggtgtcagttggacaaatattttaccttattctacgagtgacaatccacaagattttttagtgacaacaaatgacatactgatagttcccatttactttggcatttataggtccgtggatcacggtgttcactggacaaattttcaaccgagttacccggatatttactcggtgttcatagtgggcatgtttggttcggctcgaacaacttatatagaaactgatcaaggtttatgggtatcacgtgataccggagcgacgtggcaacggaaggattaccctgaatcaactcaaaattatttcgatgcatactgtggcataatgataaatgatagcacaattactgtaggtagttatggttgttggtatatggtcttcaattatggtgattcttgggttcgttgtaccgacctatcaccggaatcagcttttattcgttcgaatcaatttcttgtctcactttcacaaaattcactcgtacgttcctcaaataatggaataacttggacacgaggagcaacttgtcccgacggagataagtggagtcatttctttgtcgattcattcggtaatcggttctactcagcgcagacaggattctatcgatgcatgagcggttcgaatgattgggtgcaacttaatagcgctggtgcatctggtatgcttgattgtcaaatgacggaatcacctcaaggtgatttatatgcatacagaagcggggtttataggtcaaccgaccatggagtaagctggactctgtggtctcacgacttgcttgacagtagttgggtttatgatctcttttttgaatcaaactcgcgaatcatcgctaatacaaatcgaaatggacctatttatacaaacaatggtggtgaacattggattcaatttggttcaaataactcaagtatgtttctgtaccgaactcgtaaatccggcaacacctacatcagttgggatatgaattatctgtatcgattccagacttacggaagttcgtgggagcttattccattatattttggcgcacccgatcctttagacttaattcgattcgattggtttgatgtaagcccaaacggtacgatttacgccacgtgcgatacggttatattcaaatcgacaaatgaaggagaaacgtggtcacagacaagccacatcaatattaattatggtgaaattgaaaatttccaaatagactctacaggcacactatatgttccgtattgggcagattccttaggtcaaatgcgactaaatcggtcgacagatgaaggtgttacgtgggaagatattggtgccggattgaatatttattccgtgtttgatatacaacttgatccgtcgggtcatttgtattgcgcaacagagcggggtgtgtaccgaacaacacagccagtttcagttggccagaaaatagtgtggcaagcgttgccgggttcattttcactgcaagcgaattatcccaatccatttaattcgactacgacaattcgattttcactgccaaaaccggaacggataacgctctcggtgatggatgaagtgggacggaaagtgggagatttgtttacacaaacaatgacggcggggaatcatgtgtaccgatggaatgcgaccggattggcaagcgggacatattttatttcgatgaaagggggaagtggagaacgggtggtgcggaaagtgcagttggtgaagtaggtcaacgggcaaggggccatgggccatggggaatgacaaaagatgaaatacaagaaatagataatgaaattgttaagggacaggataaatcctatcctacggaaagacaaaaaagatacggatgaaatgaaaaacgtgttttgtgtataaacaaagcaaattgttatacaaaccgtacttaccaaattacgacccatcgaactcagatgataaagttgattcatgagtgatattcatcactttaacggaaaataattttctgcaaaccttgtaggaactatgttttgaatttatattgattgaagagaaacatagtgctactgactcagttagtttattacgcatgtcactgtttgtgtacatgctaaaattcgttttgcagagataaagcttagtcaattggtgttatttcgcgtaactttcagcaagtaaatcgagaagagtgaaaatcgactcaatccttctggtcgaaccggatgagcgtctccggaaatcctacacccgtgcgatggagtacgctggtcgtaatgttttcgcctttcctaccgtttccgccatgctggactgggtttccccacaacatcgcaactcgattttcattctgaacgatcccccatccgaacttggatataccgaaattgtcgatgaattccgccgtcgaaccgaactgccaaacgacatgccggtcacttggattgctgtcaccgatgatacagaacgcaattcactcgaatttttaacccttaccggtgcgtcatttttattgcgcagaccgctatcggtaaggcttttattagatgttatcgatgcaatagaatcgtcattcgtacggaacaatgaaaataacgggtcgagcgatgcaccgatttttggtatgccgacacaagcgaagaatatcatcgattccatcggtatcggcgtcatatcggtgttggaggatggtaggatcattttcgcaaaccggtcggctattatttcacttgggctggagtcgtcgcaaatacaggatgtaccgctacgggacgtatttggtgcggaagcggaagaacttatcctgaattcaccgatttcaagttttatcgtgtcacgcgaattacacgtggaaacgcttcgcgggccgatgattatcgaaagctcgctgaccgaactcaggaatgagtctggcgacgtttgcggtagaaccatcgttttccacgacctgacacagttacaccgtctcgaagaagcggtacacatgttcagccgcagtattctggattcgctgtattcaggggtaatcaccatagatttgaacggacggctggagtttatgaacaaagccgcccgcgaaattatggggatgacgaacgatatcgttttcggatcgacactggcatcgattttcggcgaaagcatcgcaatggaaatcatgcaacatgccggtgaagagaagccgtggcggacgtacgagcttgcatttgatatgaactacaaccggattcaaatcggttactcagtgacgacgcgcacgaaccggttgggtcggaaagttggaaccgtcatccatttccgtgatatttcgctgataaaacacatgcaggaagagcggatccggctggaacaactggcctcaatggagattctggcatcggcgctggcacacgacattcgcaatccgcttgcaagtatttcggggatgacccagctcattgaaatgaagttggacaagacgcacacggcggtagagatgctgcatcgtatcaccagccaagttcaacgccttaaccggttattccaatcattctttgcggcaatccgggtaagccgggaacaaccggaactggtgaaggtagcggcgatttacgaacaggccgtagaacttatgtcaagccggataacggtgaagaagctcaaagtcaagtttgtggagagcgccaatcaggtcaccgtgttcgtcaatcctgaccaattcttgcaaatcttgttaaatttattggttcacgctattgatagtgtcgatgcaaacggcgaaattatgattgaagcgagtccactggacggcttatcgcttccggaaccggaacaagtgctgatgctggaagcgctacggcagaattattcggggagtggaacagtagtacgggtcaatgacaacggcccgaaatcgtcgccggaaattctcgcgcggctgtttgacccgttcttccgtgcggaagccggggggacggacatcggtttatttgcggtacaacgcttggtacaaaagaacggaggcgttataacgccgtaccgtttcgaggaatggaaccggatttcattacttttgccaagcattcccatcaacttagaagagtgacgaggatgaaaaacaacccattggtttcgggccattcaagaacccgcatcgaaagttgggaattgttgttacaaaatattccgggttgtatcgatgtgttacacagcgatttggatagcgacgtccaacggatttgcaaaatttttgaagagagcgacgcattaatcgggatgggtgaaagcgcggcatacatggaaggtgagaactttgtagcagtcgcagtccatatcgagacaaaatggttgttcgcgcgctatgaacgccgcgtcgaaattggccaagtacatgcccgcgtcgaggaaaaattatcacaggaacgagtaggaactcaacggtaaggagtgaatatgcaagaagtaccgattgaaaatatcgctgtatccgaaactaagtcgattatctctccagaagggagagtcgaacttaaggatatcgtaaatcgtactcacggcacgattcgtagctatctctacatacttttttcaccgctattcggcggcgaaatttcactcggcccggtgaagattatgatgaatgcggaaagcccgcaggaatcaatggcgcagttgcagtaccacctgactcggccctggccactcaaatacgaagacgtactcaaaatttacaaagatgcctatcatttctatttccaatttacatggacaccggcaaaagaaacggtaaagttgttattcgaccgccgggaaaacgcacttatcaaacgtgaaatcgccggcaacgcattatcggtaatcgttaaatatctttcaagctgggaaaaacttgcggtaccaacctataagcaagtcacggcatttttgcaggattcgcctcaactcaaattatcccgtcgtgaattggaagtattgatttcgaattcagtagaaaaggcatacgcaagccagccaattcaaggtgtacgggagattatcaaggatacatccgcactgttcaaccgggatcacggctggcaagggaaataccgagcagaagaaatttcggacatgttaatcgaccgggggctcggcggatatgttcacgcgataaaggttgaagcaaaattgcgcggtgaggaattatccggtgaagaatggtgtaaagcgctcgaccggctgaatttaatgaacaaagaaggcatcctcacgaaagcggaaaaaattgatcaagttgcggaacaagaagtcagtagtttcacttcgttcttagagaatttataaaatgtggtactggtctatcataccgccgaaaagtttcgagcacgcattcgaccggattgccggtgtacagggtgtggcgggcgtgacgtttgtttcggagtggggattaccgatactgaccagaggaaaacttaaccgccgggataatacggcgattgcagggtttgcaacagcattgtcgttagcatcggaaacagcagggacgttaccttacggcagtacgaaaacgattgcggcagccttcgatcaattagaaatattttgtgtttttatttccggcgggatgctggttttctgttgggaagcggatgcatttcgtccggatggccgcagtaaaaagtgggcggagatattggcgaaggtggaacactaatgccacgtcggaaaacaaaactgttttcggagttaccgggtcgggaccgcgtgattgaagcggaattagtcgaccacgatggaatcgtaatcgaaaaatatccacacaacgattccgaactattaggcccacgggtggcaaatttaatacaaggattgtcgattgcattagcaaaagtcgaatgcgaaggcatgaatacagttttggtaacaaattccgagtgtacacttgcaatacgctcgagtagcgcgatttatttagccgcattaatgcagccggaaagtaaccttggggctttgctggcatttgcggattcggtagaagataagttagaaggtatcggttcggttccaagtgaatcgtaattggtatcgacgtaatcaggggaaccaatatggcaactgtaaattacgccaaacgtgaacttgactgtaagattgtttactatggtccgggactctgcggaaaaaccaccaatcttcagaccattcaccgcatgcttccgaacgagcgccgcggtgaattgtcttcggtagcaaccgcacaggatcgaactttgttcttcgatttattgccattggaaattggtaaggttcggggattcactgttcgtatgcaactatttacagttccgggtcaggtttactacaaccaatcgcgcaagcttgttttgcaaggggccgatggtattgtgtttgtcgccgattcgcaatcaggaaaaatcgaagaaaacaaggaaagtttagaaaacctttttgccaatcttcgtgaattgaaaatgaatccggaaaccattccgctggtgttgcaatacaataagcgtgatattccgggtgcgatttctttggatattctgaatgtagaattgaacccgcgaaatgtcccttacctcgaagcagtagctacgaccgggcaaggggtattcgatacgttaaaaaccataacaacttgtgttatcgacgatttcaaacggactatattcgcagaagcaatccaagagccaccaccagtccaagtaccggcagaaccgccaccgcgaccggtcgcaacgccgacgccaatccgacaaccgcgcccggcatcgataccgcagtctcgccaagtcaaagccgaacctcctaaagcgaaagtcggatggtttaagcggctcttcgggaaaggcgcaaagtagtgatcttacgggacacgacattagacgatcaggcacttgcaattgtttcgactgcactcaaagtgctggtcgaagaatcgcatgcgacactggcgttactaatcggcgaagatggatacgtttattcgcgagaagggatacccgaccttcccgatatgatcggccttgcgacgttggttgcggcatctttcggcgctgcccgggaaacggcgaaagtagcgggcgaaacgaattttgaatcgacattctggaaaggtgaaaagaacggaatcttcgtcgtccgattatcgacaaaccatcttcttgtcgcattgttcaccgataatacaacgctcggattggtaaaagtgtatgcggagaaaatagcagtccaacttggcatactactcaccgaacggagccacgatacggaatttaccgaacttgacccgcaaaaagggagatggaaagatatcgtcgaagcactacgaggaggcggaacagaaccgcttgacttatgatgcaaaatcaaaagaaacggaacgatctcatcgagagtcggattacgcaacataaaatcatcgtagtggacgatgaagaagatatcgtacttgcgttgcgagggcttttcgattccatagacgagaatatcgagacgttgtattcgacggatccgttagaagtagaatcaattttaaaagagaatcctgacgtagaagtcattattaccgacattcgcatgccgaacctttccggcctcgacctgatggttcgcgtccgccaagaacaccccaacataaaatttatcgtgatgacaggtttttccagccccgagctgcggacacgaagttatggacttggcgcagttcattatatcgaaaaaccgttcgacttcgaagcgctccgcaaagaagtaacaaatattctttccgaacaagatgagagtggctttgagggtatcgtcgggagcttgcatctggcagaagtaattcaattgttaggattgagcggtcggaaatcgagtattaaagttacctccggacataacgagggggtcattgcaatcgatagcggaaacatcgttcatgcaaggacagtaaagaatgtagggattgacgcattttacgaaatgtttcaatggccgggtggaaaatttacggtcgggccgttcgtccgcacacaaaaaaccatcggtaaaccatggcaatcgctggtcatcgatgcagcacgcgtagccgatgaagcgaatgttggcattgaacaaagccacgaaaacgaagaggaaacggtaagcgacgatatcgactttgttcaaccgttagaaacaccagaatcgtcagctcctatcaattcaccggaacctactatcgctccacatgcaggtaacgaagatctcacatattctgctttggacgatttgctatctttacctgaaaccgaaccgacaccggatccgcattcggaagcaaagcggttctcgtttgccgcaccgctatccgcagaaactattcaagctaaaaccggtaaacaaccgcataccaatccatcaccagaaccgactttttcgattccatctactgcaaaacgaccaccagtagatatagacccgagaccggtgcaacaaaccaatttaaagacaccaccaccgtcaagtacgcgaaccgaaccagtgaagaaaccgcaacaaccgcttgcaaacgaagcacaactgaaacgcactgaagcggaaacgccgaccgccaaactacctgcacccgccgatttagaaaacgtggatttccggttagaagcgactgatgttttaaaagattaccgtactatcgagcgcatcactgagctgtttgtagaattgcacgaattagcaaaaagcagttggccggacagcagtacttcattgccactcgaccgtattcaaatgaataaaattccaccgcgcatcgtaaactgggtggttttgctgatgtcggaagacgtggatggtacgttgggtaagatggcgggttcattcgatttacaggacgatgaaagccgtacgatgctgactaacctgcgcaatcatctggcgcggaagcgagtcgtctcggcgaaagagtggatggaattggttcgacgctcgattgcatacgaagtcggattggtactggaaccattgccgacgttaagcgcattttgcaatcatttgttaacgagccagacaaaagaaaatgccatcgacattattatctcccgcgaccaattagaccccgaatttcgcgcaattgtcgtacaggtaataacaaatggtttttccgaatcgagtttagccagcgtatttaccgaaaccatcgactcaatggcgcaagaacgacggtgggaattggttgaacggcagtttatacgacttgaaagctttctcactgaaatggggatgccaccttcgcaagttccgattgaatgcgtgatggcgattttgcgcggattggacgagaaaaacgttgcgcaaggagtagaaattgtcgcatacgtcggtgttaatcatttaaatctctctcaattggaatcgatacgcgataaatatcaaaataaacacagcggttcctaaaatattggagtaaggaggaccacattatggcgatagcacaatcgcaaatggcggcggattggatcgaagaacttttacacggacggaattcactcccgtaccgagagctggttggttgggataaatcgacagttctgcgggacgcgttgatcgaccgtgcgaaggaaatcgtcgacaaagaaatcagcaggatacttggttctcctcaattcgaccaatcggtaaacgacgaatcggtcgcgaaaggactggaatacgctttgttggaagcgtttacgtttacgatgaatgatttacaagatgctgctggtaaatccatttccgaaacaagtacaagttggtcggatactccactcgatttacgttcgctggaagccgatgccgaatcgctcgcacagcagattttcgaacgtgcggaaggtcttggttttaccggcgaaaaattagaaccgaatgttcttgttaccgtactgaatatgtccgaagtaaaagtcctcgcggatgtggtgaaattggaagaatcgctccatgtaacggaaatgtcagttgaggatttagcattggtattggcgcgatttcaagcattgcgcaacgattacgtggtaacgcgtaagatggttgttggcggtagtatcacagaactgtcagcagaggtggttgaaccggaaaaacaagcagaactgatatttacgccagcaccgcgtccggtagtcgtggacgataatccatttggtctccctccttcacctacaactggtacgaaaccaccggcaccagcgaaaccaccaatggcactactaccggtatcaaccaagccaccgatgatgccaccgacaccaaccaaaccaccaatgaccccaccccatcacgaaccgacgataaaattagccgaagcaccggagcatcaactttcgattccgacgatggcaccgccaacaccagcacctaccaccgctgcgccagtacttaccactccaagtacattgccttcggtgaagagtggtgagacattcgatttattcgagacatggaaagaaacttttatgaatccggcaaatcgcaagtcgataatggaatcgctacgaaccaaaaacgatgcggaatacgaatcatgggtaaacaaagtttcactacagacgtcatggaaaacggcacgtatccatatcgataattacctgtacatattcggggtggaccggacggcaccgatttggctgaagatgatgaagacctcttcgttgttcttcccggatgcttaagtaaatcggaataaaaaaagtgcggtagcgataccgcactttttttgggacaagaattggttacccggaacaatgagtaagcagttgggaaatggtagtagtagcaaggccgacgcaggtatccgtggcaccgtaatagacgaacacttcacttgattcacgagcgaacccctcattgtcgacgtctttcacaatcgcaccactgggaaaaactacgttcggcacttgtcccattagctcatagggttcacggggttcaagaatattgtagtgtccccgggcgataagcttggtggggtcttgcaagtcaaggagaaatacaccggcttggtagatgttcgcactaccaaagtgagtcgccactccatgatagatgcaaagccaaccgtggcgggttttaatcggcgacgggcccataccgattagctcatcccaataatgaaaacgaccggaaataatgggtgcggttcgtgtccaatgaagcaggtcattggattcggagagacaaattgtgctccctgttaccggaccaccttccaatttgaaatcgttggggcgatccaagcgcaaatatttaccgttgaatttttcggggaagagcacgccatttcgaatatcacctgtggaagctataccgagaaactcgaacgatagcatgtcagaagtgcgggccagacctaagctgcaaccgttatccatatccatcgcaaacatgatgtaaatggtatcaccgattaaagtagggcgggcgtcgtaacagtgataaacggtatcagaaagcaattcgattccggtcaggttgacggaattgtttgagattttgaagtgtatgccatcatcactttgagcagtaacaaaagaggtctcgcgaccacgattttgaactcgtagaattagccaaattttgttttggaagaaaatagctccgggattgaatacggatgtaacatcaaccaagccgggtggaatgggtggaatatcgttgcgggtaaggatgggattattcggataccgtttcatcattcctcacttcccattttgcgcttttcaacgaagccactgtcaccgtggtcacgaatttgggttcgaagacggaatagcatatccttgaggtcgcgaagaccaccaatagaaaaccaaatgatgattgcaatcgaaacgacgacattaatcacgataaatattttccagaaagtcatccacgatgtatcggggactgtaccgtggagattgaagaatgtgccaatcaggaaggcgaccgtccacaggaaaacccaaccgtaagcgatgacataaattattttatcaccgcgggtgaactctttgcccattcccatcattcgccaccccttgagcggcacctcttcgacaactttcatctcgctttggatggcatattggccgcggtgaaggagtttgtccatatcaaactcacgtttctttccactcaatagcgaaacgaggatatagacgatactggatgcacccattgcaagaccccagaactcctgaccgtttatcggaaaatccttgtcgatttgttggaggatgataccgccgacagcgatggtggaaccggttattagcgcactccatgcggcgggtgttgtaccgcttttccagtatagaccaccgataattacggcaccactaccaccggtaaagatggcaccggtaatggcgaaaaagaggaagatgtactcgctttgattgaaaatgatactgaaacagaaaatgaatatgcagacaccaagaatcgagaggcgaaggatacgaagatgttgttccggctcgaatgcctttttgcggaaggggaggacaacatcttgtatgaagatacttccccacgaatggagataactatcgtgagtaccgatagtcgccataagcatgacagtagtgagagcacccatcaaaccgaagggaagaagttttgatagaacgaggggaacggtgagttggctttgaatcgccttggcatcgacacctttgagaatatcattgacgcttgaggcaacgacggcgaaatctttattgtgcatgacgacgtatgcgacaatcggaacaaaaatcaacatgagccatttgggaatgtcacggagattgccgaggacttctcccatttttgcttcgtgtgcacttttcgctgaagagttgtaaccctgcgtcccttgccacgacatctttccgtaaatcacgccgaccacaccaatcagaaagtaccaaagattgaaatcttttactttgctggtgtggtaaggatttattagggaagcatccgggggtgccgcggtgaggccgatgaagatttgattccaatcgattgtcatcaagaaataaatgacgatgatgataaagacagtgttgacgaagatgccttgaataaattcggtgatgatgacggcgatttgaccaccagcaaaaaggaaatagatagcgataccaagaaagacagccatcacggttgggaacatcgggacagataatccggcaacggaataatgttgcggtaaaccacagaaataaatgaagaaccgggcaccgacggcagggaagatgccaaagttgacgataccggaaatgaaggcgagcagtcctgcgaagattcggaaacggcggctgtagcgtatctcgaagaattgcgccatcgtcaatgcgcgggtctggcggaagcgatagattacccaacccgatacggtaatgatgaggaggacgatacccatcgtaaattcccaccatcggagtgagaaaccggcgatgtaattcatctcccacataccaacaatagtgatggagccgagggcagacatcccttgcgatacactgattaggtagcgcccggcagttcgtccggcggagagaaaatcggcgacggattgcatatagcgtttgctaatcatcacgactgcaatgagtccggaaatcgaaatagcgacaatcagccaatcaagtatagataggttcatatagttctatgttcttattatcgcgtgtggaacttcaatctcggtaattaccggaagatgatcagaagggaaacgcaaatcatctttgaaatcggatatagtggcatgttgcaaaacccgtatggattttgtgacaaaaataaaatcgatacgctcgccgattatcccttctttgacgtgaaacccggaaaaggtatttgccgggccatgatgaggtaagagcgagatgttcttggtatcgtacaattggggaatggggagagcagtggtcatgatggtgtatgcggaatctgtttcggaggaattgaaatcaccacaggtaataacggggagagtgtcggaagagagctttgcgattctcaaacgaagcaatttggaactctcgatacgagcaactttgccgacatgatcgaaatgggtattggtaagtagaaaaatcgcaccattcgaagcatccattaactttacccacgtacagattcggatgcaagcggcatcccaccccattgtcggtttttcgggtgtagcggaaagccagaatgtgccgctgtcaattcgcataaagcgatttttcttgtaaaatatggcgctgaactcgccagcatttttaccatcgtcacgaccgataccgtaccatgaaaattcggaaagtgaatcagccaagaagtgaacctgatggacgagtccttcctgaatacataggatatccgctttgtgaaattttattgtcgatacgatgaagtcacggcggtacttccaattgtcaagggagtcctgaggattgtcgtagcgcagattgtaagtcatcacgcgaaacggcgcggcagatgcacttgaaattacgagtgcaactagtatcaacgagccgagtagcattaaattgatttttttcataaatcacctctaatcggcaatcatgccccattttggattgggggtcggccccattttaaacacgagtttgccaccacggagaatttgttcatgacgtaaactaccttcgaatggcattccatttaacttggcggattgaatgtatttgttgcgatcggaattgtcgacagcttcaatgataaattctttcttgttacccaaggttattgtgactttatcgaataaggggctgccaatttggtagaatccaccaacgggattagcaggataaaatcccatcgcactgaatacataccaagccgacatttgcccgcagtcctcgtttccgcacaaaccatcagttttgttcgtgtagaaatcgttcatgatttgacggacaagtttttgcgtcttccatgccttgccaatattgtcataaaggtaagcaatatgatggcttggttcgttgccgtgggcatacattccgataagacctgacacgtcggcggtagcaccggttcccgataaatcagaactctggttgaaaagggagtcgagtttctgctcgaattttgcctcaccacccatcagtttgattaatccgggaatgtcatgttgcaccgaccatgtccattgccacgcattcccttcggtgtattgaggttgcaactcggttgagtagcggggattaaagggggaaacccatgagccatcgaagttacgtccgcgcataaaaccggtagtggaatcgtaaagattgcgatagtaaccggaacgattggtaaagagattgtagtcggcggtgtcattaatttttttcgcgacctgagcaatgcaccaatcgtcataagcatattcgagcgtcttggaaacggactctcgctcgcggtcagcgggaacatactcgagagtcttgaatggcttaatggtgtaatttgattccatcaacgaattcgtaaaaacagatacacgaatattttttacggaattcaccactgcaaacggcaggtcaaaaagattgacaccggggttaagccacgacttcaatgtcggatttccatcaactgaaatgttcgcgtacgccggtgcttccagatgttcgaccatcacgcggacaaactgttgcttaacacctttatcgaccgcgagtgcataatcggtttcaaatttcataccgggttggttttgatactcgaatgtcatataccaatcgtaactatcgcctttttcaccaacgatagtgagattgaggggttgacctttctttagtaatgcggtaggaacctgcaggaacatattgccgaattgatcatcgtacacatcttttaaagtcgggacgaaggtgagtgatgaaccgttcgtgttggtgacagtccaatttttatcattccggtcacgaccagtattaaaagtgaaccatttctcaccattcactaataaatcgaaccggtgccaccctttgtttaccgaacgtccggcaagccacatgaaggtaaccatcgaatcatcattcgattgcggtaacgcttcggtttgccattcaattttcatgtcaccagtggtagcgcgaacaagaagtgcctttgtcacgtaagggtaagaggaatggtagtcaatcggttcgccggaaatggtttttgcatatccactcaacactctgtgcttatcgagacgaagggatttatagtcgaaaccggaattgatatcgttttcgtgcagttgcgctaatttcttttcgatggaatcgggttgcgccatgttataatattcgagccctttatggttggcaaaggcactcactttcattgcatcgagcgctcgttttccgtcgataaaggggagacctttcaggaaggcatcggcaattacgggtacggaatgatagccaatcatgcattgtgtttcccaaccggcaagcggccaaacggggagatagccgtattcagattgaaaaccaagcatcgaaaaatacatatcgacgacacgggcggggtgcatgattgtgaataagggatgttcagcacggtacgtgtcccataatgaaaaagtgctgtagttgtggtagttggtggcaagatggtttttaccatcgccgccgcgatactggaaatcgacgtcgtgaaacagcgtgggggcgcacatcgtgtgatagagcgcagtgtagaaggtttgtttgttgtcgatattggtaccctccactttaattttactcagttcatcgttccattttgtccgtgctataatacgtgtggaatcaaaattccaacgggggatttcagcatggagatttttaagagcaccttcaattgaaacggcagaaattccaacccggactaaaattgaatcatctttttcagttttaaagcgtagaaccgctttggcagtttttccgctcgtttcgtagggattatccacccactggttttcccgcaccatttttgtggaagcgaaaggagtggaaaattcagccgcgaagtacacctgctgtgtccatgcccagcccgaagaacggcggctaccgacgatactattcgctcctgtgacttttactgtggattcaagggggctatcatcctgcccatatcctgcatcaataacaatatatgcggaatcagatttgggaaaggtatagcgatggaaaccacaacgttcagtggcggtcaactcgactgtaatgtgattttgcggtagttccacccgataatacccgggagtagcactttcgcagtacactttcatgtcgacgaaacttactcctttaatggatggtacaagatgaataattttatcgaaccgaaagtgcatcaatgtatccggtgcaggaatgccaatcatcggttgaaatagaatatcaccaaggtcagcgcacccggttccactgaggtgggtgtggctaaatccaactaacatcgaatcggaatagtggtaaccggagcaatagtcccaccctcttttcccgatgtcggggctgagttgcaccataccgaaagggacagtcgcgccgggataggtgtgcccatgcccaccagtgccgatgaacggatcgacataatctaccggctgtttcatgtggaaactgttggtggtggcagccgctaatccgtaggtgagggcaaataccacggcagctatcgctgccggtgcaacatacatcaaaagatattctttcgggatggtctctttacggctcacagtcgcattgctaacaggaatacaaatgaattcagtaatacaaatcacgtatgcgacaactgtacgtttaatgtagttgaaaatagttgaaggtttcatcatcgcctcacgttacaaatatgttccggttccacttgtgttttaattaagcggcaacacgattcgtggtcggatgtttggaaccgaccagcgcataataaatgatatacaaataacagagcgcgggaaggaaaaatgcggtgtgaataccgatactatcggcaagtacaccctgcaattctggaattaccgcaccgccgaaaatcgccatgacaagaatgctggagccctgactggtcagatgtcctaaatcttcgatgccaagcgtgaaaataatcggaaacataaccgaattgaagaaaccgacggcaagaatggtgtacatcgcaggcgtaccggtaagcataatcgtggtgactacgagtatcgcggcgaaggtcgcagcaaccgcgagtacaccgcgtgattttagtttttgtaacagggctgaaccgatgaaccgaccgaccattgcggcaccccagtaaaaggagacatatttcgcggcaacttcgggggtgagacctccgatttctttttgaccaaagaaattgacgagaaaactaccaatggatacttccgcaccgacatatagaaaaatgccgattgcggcaagacgggtgtggcggattttcagtgcatcgcgcaagtgggcttttttcgaatcgtgactctcgacggtctcgataacagggagatgaaagagtttcattacaagggcaagaacgaataatgcgattgcaagacctatgtatggcatttggacggaagaggcctgtgtgatgcgagcggcgtgttgctcaacggaaggaagcgcggcaatttgttcagcggaaagtgcagaacccaaaatcaaaataccgccgatgtagggagcggtagtgtgaccgaaagagttaacagcttgggcaagatttaatcggctcgatgctgtttctggtttaccaaggacactcgcataagggtttgctgcaacttgcagaacggtgataccggtggcaaggatgaacagaccgagtagaaagaggggataggaaagcatgccagcggcgggataaaacaacaacgcaccgataccactggtacaaagcccggcgacgacacccaattgataaccgatgcgtgcaatcaactttccagcgggaatcgacattaacaggtaggcaccaaagaaggtgaattgtatcagcatggtctgggtgtaattcatgtcgaataccgctttgaggtgcgggacgagaatgtcgttcaagcaagttaggaagccccacatgaagaagagcaaagttacgattgcgaaagcggatttatatccttttttttccattggtggctccgtaagaaagtggtggggttagcgattgttgtacattttatcttctaaatcaaattggtacccgaagtggtaatgggaatcctgatcgatggtggcgacacccaacccgacacgtaggcgggcatcatattccgccgaaaagccagtatcagtggtgtgcagtgaccgtaaggttttcgcatgcttcatcaatgcgggtgaaatatgatttaactgcgcgatatcatcggtatattttttattttgttcaaaatattttttctcgacatagtacacctgatgcataaaatcttttatatcgtcggattcggatacctgaaattttgcttcaccgactggtttggatgtgaattgcacgacgccccacttttccggcatgtgcatattgatggccccttgcggcgaccagacccaattgtcttcgggtttgcctgcaaccttgatatatttatcatcgacgatcttggtttgccattcgacacgggaaaaattgatgtaccattgttcatcttcggatggggcttttgtgccgtggcttattcgctgcaaaccgcgccacggcatagctatttcgacggtccaaccggaatcgatatcggcggaattgtttaacgttccctgaattgcaacagccgttttcattccagtgatttcccagctattgtcagcgctaccgttatcccggtatggtttggggagaaacaaatcccatgtcgtattgagtgcgttcaactccatttcaccatattcccagttatcaccattgggatccatgaatacttcgaaatcattgtcgtggaagataacggcatcatgttcagtcaaagtggcccagacgtgcggttcatgaagttgggcggcgatatagaaacaggtatcatcccaccgcattttgatttgggtctcgaagcgaggcacgggtttggtattcccctggatatcgacaaacttttccgaccacggaacttcgagccatgcgggatcgtttagtttaccgtcgattgcaatcggtgaagttgttttgtaacagagataggtttggtagtgcgatgtggaagtaatcggttgagtatcctgtgcgaatgatacaatcgcgaacgtggtgagaaacaaaacggcgcaaactactctcatttacaaatccttaatccaaaatgaagggtaacactcaaaattattttttatcgagttctttccaaatcaatgcggcggaaccgaggatagcaacattttcatcaggcaaaccggacggaagtaatttcactttgtccttgaagatattgagcatattggcttccatgtgacggtgggtcggttcgaaaattagtttgccggctttcgccaagccaccgaacaggaagattgcttccgggctggtgtgggcgacggcatcggcaagtttaataccgagaattcgtccggtaatctcgaatgcttgtaaagcaattgggtcacccgcggaagcggcttttgctatcgcttcagcagtcacttcgttgaagctctggttgcgaaaaaccgtagggaggttggtttgtccgatgagttcaaacacagtacgtttgataccacctgccgaagcgtaggtttcgagacaccctttccgaccacatccacagtcacgtccgttcggatcaaaaatggtatgtccgatttcaccggcaaaaccatcgtgtccatatagaacttcaccattgacaacaataccgcttccgacaccggtgcctaatgtgatttcgatgaaatttttcatcgtcttcgcaccgccgaaaatcatttctccgatagctgccgcattcgcatcattagtcagaactgcaggaacgctaaatcgttcgcgaaacattttcgcaaagggtataattcccttccattccaagtttggtgcattctcaactgtaccgctataatagtttccattaggagcgccgagcccgattccttttagaagaaattcgggatgtattgcgatgagtgcagtaatggcggtcgcggtagcggtaacgtaatccgtaggttgtttatgaccagttgttttgatgttcgtggaggaaatacaattcccatcatgatccactacaccgattgcagtattagtcgcaccaatatcgattccgacgacgatgtctttcatgttgttttatcccaagtaactcaagtagataacgtacgaaaaaatatgcatcaagtcatctctttcggcaccccagccgggataaatcgaaaagaattatggaagaagcttgtatttacgaagcatgacaggtatttttcgatattctacaattcttccttccatttgactaaaggagccgctatgaattcaacgcgactaacgcggaacgattggtatttcgtcgtaatctgtttagcaatccttgtcggcggtattttcttcagctgcggatacttccatcgtgcatttcccgaagcatccattgatttcaaatacgaccgcgacaactcccaaccggtagctgaaaaatatttgcatgagcagggttttacgcctccagcagattatatgcatggcagcgcattcacttatgaaggttacgcgaaaacgtatctggaaaaagagttggggaatgatgccgcacagaaatattacggtaatccggtattgatgtggttttggtttcaccgttggttcaaaccgggtgaaaaagaagaataccggataaatgtcactgtggacgggaaactggcggaattcagccacttgctcccggaagaagcggtgggaccgaacttagaacaagattccgcgaagaagttagcggagaattttctttatgcaagctacaaactcgactcaaatcacgtccattactactcggtagagaaagtaggccgaccgaagcgtacagattggacttttacttaccgggatacgacgattcagccggttaagggttccgactatcgctattttgtcaccgtccaaggggcgcgggtagaccgtttttaccaatatttgtttgtcccggaagcatggggcgctagtttccgaaagatgcgcagttataaccatgcagcgggagatgtggatagcatctttttcattctgactgcgctggcaatcggaattgtattcttcatacgggttcgaaagaaagatattcactggcgaacagcgctgtggtttggcgggatcggtacagttctctttttgatgaaccagctcaatgaattcacatctgggttcgtgaactacatgacgacggatccttggtctggatatttgttaaaagaatttggaacgatgatcggcgtttcggcagttgtcggattctcgattatgctgctgaccgcatcagcagaagcaatgtaccgtgaacggtatccagacaaaatttcgatgccacggatgtttacgattcgcggcttgcggacgaaatcggcatttaaaaatattctactcggtttaacgatgtgttcgttctttttcgcatatcagattgcgttttatctgatagcgaatcattttggcgcgtggagcccggtggatgtgccttacgatgacttgcttaaaacttcgttcccatggatagcggtgttgttgatgggatttttcccagcggtatcggaagaatttatgagccgcgcgttctcgataccttttctccaaaaactattccggggcaaagtaacatggctggctgttattatagcagcgtttatctggggtttcggccatgcgacttatccgaacgagccgtggttcatcaggggtctcgaagttggtatcgctggtgtgattgttggtatcctcatgctccggtttggtattctcgcaactctggtttggcactattcggtggatgcactttatacttcattcctatttttccgaagcagtaacatgtacctcatcgttacgggtgccatcgcggcaggattgctatgtattccgttattgctcgcatttatcgcctacctgcgtaaaggttcatttgaaccggagacggggatgagcaatgcagatagcgtgccggttgggcgaataggtgaaagcactgaagaaaaagtggagattgaaagtgctgcagaaatcagcgtatccacagggaaagctgtagagaaaccgggaagtaaagttttagttggcggtgtcgttcttgcggttttgttatttactgcgggaattattttgatgctcgtacccgttacgaaatttggggaagatgattcatttccgattacgaaccagcaagcgattaagacggttgcggacagcttgcggagttgcgggtgggcgaatcctgatacgctaacattttatgtccagttgaatccagtgtcattgtcagggaaaggatcatttgagtcgtatctgatgaaacgggtacgcagcgtgaaagaagcgaacgaagttattaaagagcgagtcggcgagaaaacaataaatgttcgtgcgtttaagccggagtcgcgaacgaaatattttgccaaagtaggtgcgacgtcaggaaaaataaaaaatttaagtatcattcttcccgaagaagcaccgggcgattcgctgtcgaaagattctgcgcgaacaaggattgaacggatactcgtttcacgcggaattgatttgagtaagtgggatttgaaagattattaccaagaggtaaaaccgaaacgggtcgatcaattttttacctacgaagcgaaagagggcgacccgcgtcatgtcggagacgcgaaataccgattgagcgcatttgtagtcgggcattttattaatgtcagcggttcctattggtataaagtgccggaaaaattcgaacgcgagcaagattcgatgacgttcggacgcgggctttataagggtctcatcattttagccattgcggttgttgcgattttgatgctttggcggttattgcaatttacacggaagggcatcatcccgtggaaacggatcatggtgtggtcgatattgccgggcattgtttttgttcttggcagcttaaatatctatccggttttgtacgatacatatatcgtcaatccggaagttccgtggtcgatatttaagattacaattctggtgggaattattgtagggagcatcgggcaatggattttcgtcgtgcttagttttggtttattaagcggattgtatcccgatcttggtaaccgaatcaaagaagcgaaacatgaaaatctcctgacaacagttctggtcgcggcggcggcggcaatcgggctatccctcatcaaacacacacttcccgatttctggttcggtaaccatccaagatttataccagtggggtttgattcaaccgcctcgtcgttgtatgtaccgtatcctttttttgagatattgagcacgcttgtaaaagaccttgttcgattggtagtcttgattgcattcattcattatatctggtcagcgaccgggaaatcaatttggaaacgtgtattgttttttgttgtcgcgattttggtttcaatgccgcttgaaccgttgtatcgaaatgagatgttgttcggtatgattaatgccatcattttcgttggtttggtttgggtattgttgaagaaaatcacaataggaaacccgattgcgctgatgacagtaacagtatttggtgttctactatccaagctgagctcaaatttgagtacaggaaatcctgacattctgataccgacaatattggccggtgcgttggtattggcgggatttatcaattgggtatttggacgggataggaaaactatttaggaaagtggagtgcgggcggggacgcccgcactaccaaattaaaggaaactctcaagggacagaatgaattctgtcctacgaaaaaaggaaggaacagactatgggcggacacagaggtccgcccatactttctttgtcgaagtttgcgacctcaggtactgctgttattttactaaaacgattttgcggattgctgtgtatgcatcactctgaagccgcacaaaatagactccagccgctaacgttgaaccatcgaaccggacattgtaacgaccggcggatttcggttcattcagtaacgtcaccactttccgaccagttacattatagacatcgattcgggtcgatgccggttttgacaaatcgaatacaatctcagtcgatggattgaacgggtttggataacaaggatagaaataaaattctttcggcagttcgacaaacctatccgccacatcattcacatgcacattcattctcacagtaaagttggtttgaacgtgattgtcattggctgaaaatagtatcgaacccactaacgtatctccgttgacgttaccgcgggcatcccaatgaatgcggaacggcagccacccattaggcggcaaggagaatgttgttatcgaaggtgaagcccacttatgtgaattaaaaaacctaatcgctaaataaggcgggagcggttcgcggtagtaaacgttgaaatattgtgtatgatcggcactttgcaatccaatcgtttcagaagttgaattcactccgttagtgttgtattgatagacgatagtaccgtcgcgatacaagatgacctcacaaccaaagtttccactaattgcgtacatgttcggccaagcgatagccacataattcggggtggaaacatagacaattgaatcagtcggtgagggtgtccagtacacagtaagaaatgtctgcatcaaagtatagaggagggcttgcggctgcgtaccaagaccgccactggattgcgaaaacgtaatccaaccatatcccgacacacgaaccgtgctatacgtggtgtcgaaataagggaaatcgaagggaagagtaattgttcccgtgacgggagtatgtggagtaatccattggtagtgcggcccaccgggatcaacactccgtaaatacgtaaatccgtctatcccggtattcgtaatcacattaccggtaaccggtacctgacccatattaatcaatgagtacgaaacgctaccggtatcttccggtgcaagcgttcgttggatagggtatggtgtaacacggaaccaaggtggtggtacaatacggatgagagtactggtatcacctaccgttccaaattcatcagaaaggatgcggattctaaccgagtctgatgcgtctccggtcactgtccatggggtggatagcgaggttgcgggtaagccattaaatagtgttgtccaactactgtcaggatagtaacgattcaatgaaatggagactgtgccggtaagatttgaacccgtccacgagataagaataggatcattcatcgccaaaactgttgagtccgtaaacgaaaggtgtaataccggtaaggcagaatttatcacaatcggtggagtagtatcaccatctattccattcaacgataagatacgaaaccgagcgatactggtggcagaatccgtaactgtccaaatgaagagaccgttgttcagcgtactggtagtgatgctttcccaattgccgattgggtagtggcgatttaactcgatttttacatttgaaatggcgcggcgaccaccccacgcaatacggtactgtgaaccgatgtgcagagtatcacggccaagcggtgaaaaaatgtgaagaaatgaatcagacggcgcggtggaaaacaaaatagcagcattggcagaattggaattttggatttggctgctgccgggtgagtacgaattccaataggaatactccaaaccgcgtcgacgagaattatctgcgattccaatggatgcataatcgggttcgtaagaatcgccgggcatattgtggaacgatttgtactggaacaagattggtgcatcaccagtcggtgtgctccaatattcctgctgtcgaattatcaactggaattcgttcgcacccgcgccaaacgttgttactgttcgccaacttatgacaaattgatgcgaagttgaatcaaagtgagtgtatactccacttccggcaccggcaaacattacatcctcccagaatactgccaacatgttgcgtgcgccttcgggtgcggggagtcgccaattacggaaattgttaaagacaggttgcctgccaaacgccgcccagccattagaacaaattgtaagggagtcgtatcgactaccataatattgcgccgcgaatggaaggcgaatgacaatactcgagtcgtaattgtatgcggtatcgtttagtgctaaccgttgacccacactattatcgataatttcgacccagttgtaaacgggagcataaggataagcgacgtcagattggtcatatgcacgataaccataggtatcggggccggtgggcatggtcgacgtcaaaggtaacaccggaagctggaaataaattgtgtcagtaacagcaccattgttgaatattgccatcatggcagctatagtaccagaactgagtaggggagacgcggagacttcccacaattgagaagtgcgacaagtaacctcagtcccgatgggtaatgaatcaaaaaccgtagtatcggctataacagaaatacccgatgtgagcgaaatcaatcttgcgcttgtaggtgtgaataacgcgaattgtccggtatttcggacataaatacgcgtatatacattcattccaggttcgagaacggaagcaccaactaacagcactgaatcacagactaagtttacagttagcactggaatagtaaaaaacaaagtggaatgctgagtgcctgaagtaactaccatcgaaaaatgaatagaatcgttgttgtggaaattgttcgatagtgcaatacggaaagggttatttgacggtaaaccttcgttgggattgattgtattccattgtagtgaagagtcggaaatagaaacacgcgtgtcgttacaatggacgacggcggaggggggttgtaaggtgatagcttggttattatgaagcgaaggtaaaatgtcgattgtttcaccgggatttaaattttgattaccatttccgaatgtaccgtttgtggtgtcatcatcaatcgagaatccggtaagagatagttgcagtggtgaaatattaccggtgacaactatcgtgtcgacggcgggaataaaattttgtccagcaaacgggccggtagcggttacaatcaggttgccagcggtttgcaatgtcaggggcagtgtgacctgaccgacactatcagtaaacgcgcgggaaaaacattcggttattccagatgaatttttcttccaggcagtgacgaggatatttcgtacaggtacttcgatatgaatgacggtacaagtgatttgtgtttggtcaacggaaacggtatcaacagtattacacagtagtgattggggtacagcagtccagatgtggggcgtaacgtcacccatcgcgttattccaattagtaaaatcggtaacgctaccgggggtcccaatttcaaaatttcgccataattggaatttaccttcgaggtacattgcaccggggtttacagaattgtttgcaccaaatccgtaatagacaccggtcgcaatgacattattatatgcaggatgggttgcatggccataagtcgacatcccacacaacgcaccggatggtagagccggtgaaccaaagcggataagcgcttcatggattccggtcacatcgtcaccgtaccagtctccactggaacaagtcaaattgagagaaacgaaggggcggttaacgttattaaacggtaaaaacattgcaggattcaactctcctgtccatgcggcgcgatgcgcccagagcattatatgcgaagtcgcctgttgtatcgtctggtaattaactccggcgctatgctcatcataccggatgttcacgataccccggcttcgcatcatttcaaggtcgaattgaatcgcagtatgatttgaatatacttcgtgggaagtccctgcatatccccatccacttgtgaaatacgcagtatcggaaacagggggatttttttcgtagttgatagtacgattcacaatcgtttgaagcgtttgattattcgaagccgaaaatcgactcacaaatacgtcggcgagattgtcatttcctgcaagttcggcaaatgcttgatcggtgtaacctacagtagtttgtgcaggataataataactgggtagatacggagtacccataccgccttcaccaactaaaataactgattcgagcggaggatttgccgtgttgtatacggattggatgtacgtctttataggagttggatcgaacatctgcgaggacggatcatataacaaaacaggatgaccactggcgtttttccagtcgatgtaggaactcattgtgttcagaatactggttgtgttgtttgaaattatcaatatctggccggggggagcattttcattatctgtcactaattcatcggcaccaataatgtcgcgatataatgaggcaaaaccaggtaccggttttggaggggttgtaagttcgtttatagctggttcattatttggtacaagttcgaatgtaatcgcatcataaattcgcaatgtattcgtaacaggattgtattgtacgggatagaaagcgaatggagcgattctggcatcccgcataattgcgggatcaccaagtttgtagcattgttcgggataccacgcgtcggttgagtaggtattattatcaacgtagaacggcggcttgagtgacgaatccgatgaaagcgaccattggggtagtaccggctttatgacagtatcgtgatattgcttcgatagaacacggacggtaacattgcctttattagggagccgaacagcgcgaacaacagcagggagtgagggttttccagtctcccatagttttgtttcaccgttgaggtcgatgtacatccaatttttattttcgagatgaatcgagtcgaacgaaatattcggcgaatgaaaattcaaacggagatgtccggtttcatatcgagtagtttcgaggcggatagaattggtatcgggaatgccggtaaatgagttggttatcaacgaccaatcacttgggatagcaaggtgatatacaactaaaagaaagacaagaacagttgttacggtgaaacaacgttgtcgacgcagggacttccgtgggttcgtgctcatgcgacagtaatctccatccaatacgtagtctaagcttatcatcatacaaaatcaagacgtaaccaatataaatcaaatttatcgtttgaaagagtcgatcttttcattaaactaatttattgatattcaattcctttgtacaatcgacacacccacctgattcgtcaactgaaatggcaaacccccttttttcgaaaacagcaatcatagcacggttatccgtcgtggtttgggcataaatccgcttgacattccattgcaacttcgctacttcgatacaataatcggtaagcgcaccgccgatttcgcgattttgccatagatcggtaatcaaaatcgcatactcggcggtatcgtgattgggatcggaaatcgtacgaccgataccaattaacatacgctcgccattttcttcgatttcagcgacaattgcgagctcccggtcgtagtcgatgtaacagtacctgcttgctacatcatgggaatcccaatggaagaagtaacggaaacgtgagtaaatcgtttctttcgagcaaccggcaaggagcttccgccatttcggttcatcttccggttttatgggacgcaggaataccccggttccatcacgaaggactattttcgaaacgaatttttcagggtatggtcgcaatgcgagatgagaatatggtacagtggatttattaatatgcgagcttgaaaccactattcgagcatccaacgcaatgatctcgtttggtgctaccaatagcggattgatatccaactcggctatttccgggtaatcagcagcaagataagagagtcgaattaatacgtcgatgagtttatcgatatcgatgggagcacggccacggtaaccgattaacagcggaaaaattttgagggattcgagcatgccacgggcaaggcgctcatttaaagggggaaaagccagcgagcgatcagcgaacaattcggcggtcacgccacccatccctaccatcaggatagtaccaaaaaccgggtcttgcttgataccagcaatcaactcgagtgaatctttgaactgaatcatgggttgaacggagataccgtcaatttttgcggatggttgtttgacccgaacattttcaagcatccgttcgaaagaggaaatcaccatttcctgattttcgacattcagtaccacgccacctacgtcgcttttatgggtaatatcgggtgatagtattttcaagacgacgggataaccgacacggccagccactgttaccgcttccttagctgtggaagcaggaatcgggcgggcggtaggaataccataggtttcaagtaactgttttgagacgtcttcggatataattccatcgacaatgccattttttctcagaaattcgtcatgtttttgtgcacgatcccattcgaattcgacagcgatatctttaggtgtttcgtaaagtgtttggagattccgattgtattgaaccaatgtcataaatgaacgaatagcttgttcaggagtttggtatgcggctacaccattatcaataaggatgcgaatcccctcacgcatcgattcaccgcccaaccaagcagccagaaccggtttggaagaggtatcggctaattttgcaatcgccttcgctgttcctgtcggattagtcatcgcctgaggagtaagaataacgaggacggcatttacatttttatcgttcaatacgatctgaaccgctttttcgatacgtttggtgcgggcgtcccccaatacgtctaccggattccgatgtgaccatattggcggtaactcattgttgagttgttccattgtggcatcggataatttagctagtaccccgttagcagctatcagggcatcggtagccattacccccgggccgccggcgttggtaacaattgcgaggttaggaccttcgggaaatttgttcctgccgattaacgcgacgacatcgaagatgtcaccgatatcataaacgcgagcaaggccgacgcgctggaatgcggcatcgtaaatatcgtcttcagccgccatcgcaccagtatgagaggcggcaacttgagccgattcaggaaatctgccagccttgtaaactataattggtttactacgagcgaatgcacgggcggctgtcataaattttcgggcttcttgaatcgattctatatataacacaatggattgagtgttctcatcttcaccgaagtagtcgattaaatcaccaaattcgacatcgagtgaatttccaatcgaaacgaaataagagaatcccactttcccttcgagtgcccaatcgaggacggaagtacacaaagcaccggattgtgagataaacgctacgttaccggtccgcggaatggcaccggcaaagctcaaattcaatttatcgcggggaacaatcacgccaaggcaattgggtccgacgatgcgcatattcgggtacttggcatgaatatcggcaatgtgttgctcgagctttattccttcggcaccggcttctttaaaaccggcagagagaatcacaacaccacgaataccggtttcggcacattcaaggacaagatttggcactttttcggcaggtgtacagataaccgccaaatcgggaaggcgaggtacagaagcaagattgggataacattggatacccattaccgcttcgaaatcagagtttacagggtatactaccccggagaaacctccaccaacaaggttggagagcacttttccaccgacactattcggattggaactcacaccgataagagcaatacgtttcgggtgaaaaatcgggtcaagattgtggatatccattttagcaaatcaagtaaagttgttaaagaaaatcaaagatagctatgtacgcagtatccgcttacactttgaataaattcatgaatgaacgcgcgtcgaatttttcagcggaaaaaatcgagtcttttaattgcgcctgccggtcggacgtaagcagcgcatcagaaagcgcattgaatttattttctatgtcgagaatagtcatcggttcgcgagggtcgcctttgggatactcaagatacacggaatacgttttaccattctttagacgaatagtgacgcgagatggttgtttggcggggaacatttgttcaaattcgacgcttgcctcgccttttattttatgaattacttccgaaagtttcgggtcgtttattttttcgggagtaaaggattgagtagttatttttctgtctaatattgcgcgtgctacacaatacgggagcgaatggtcggcggtttcacgcgacttcggttcgtatttgtgcgaatcaaacagaatatcacaagcgcgagcgatggtggtcacgactacttcctcaatctcatccgggtgaatatcgttttcgagaaccgcttttagtgttgcagtaatatgggtatgggtaagcgcttctgtaggaaatcctttcataccgcactcaagtattttataagaagatccaaggttgcccaccaatttcgattcgtcccatcccgcaccgaaacaatccatgaacccttcttttccttcaaatactttctcagttcctgaataaccgtttttggccagtagggctgcaaatacaccagattgaacagccatcgggtcgacggtatttttcatcatggtgaggacacctgcagtcggacaaccgatggtatgattatgacagccggatattccgattgcattcaccatctggtcttcgttcagtcccaacaattttcccgcaacaattggtgaaacgaattgcgtcagagtggcatgatgccatttgcgttcccgcacaccgagtacggcaaattcacacaaacgttgttcgaattcataagcgagaacgattgcgagaataacttctttcatcgaagcattggacagttcaccggttgataatgcggcgggtattaaatcggatgggtgggacggatcttcgcgccaatagatatcattgaagtcgagcgcacgaatcatcaatgagttaataagagtgacattgactgcgggaagtttatttccataaccgatgaccgtcgcttcggacgaaccacctatcccggtgtagaggttatgtaaaatcttaacgtcttttgtgtggtagccgccaaaagcacaaccgaaggaatcaaataaaaaccgtttcgtttcctgtacgactttttccggtaaatcttcgtatcggagattgcacgcaaatcgagcgatttgacgtgaaaaactttcattcatttgtgcgtcctttaagtccggtatgtaaggtgtttctgtgcatattggatagcgacaaaagcagaactgatgatgtacactaaaatactgaagatttgttgaattataaaattcgcgtttttggttaaagtcgaatcgtttcaattgcgtgaagatgcacatctaaacaaaaaaaacgccacgataccgtggcgtttttaatagtaaattttaattactcggatgctggtttaagaccgcgcaaccgcagaagtttttcttccggtgtttcttcttcgaccaaccaaggaagttccagtttatctatctgtaaaggtgtgatatcaagctttccttccagccaatccaaaccgaggttggaaatttcccagtatttacgcggtgaatcttgtttcatcaatcccgcttttacaaggcggatccgagcccacggaattaaatatgcccagcgttcggtatcagttccgccaacaatttcagtatccccggcttgaaaggttggtgcaagacgtgaacgaacaacatcgcggcaatgggtgtattccatcgggcctttattatcgcgcagcacttctaatatcgggcgataataatctttttgggttaagtggggtgcttgagtagcatttttacgcggtctgccacgggtttcttttttcttcggtgcgccttcaacttcgagtttcggtttattcttgctaccgggttttcttccccgtttctttttctcggtagagccagccacttcaatagaaggaatgataccggtttgcaataagagcgatttcggttttcggccacgcttgccgggtattttgattgcggcgagcgttggtacaccggtaatcggttgaccttgcaagacctgccagtcagtttcgattgcctgtagttggatcaggatttctaatagggaatgaatgctattggtggtgactttcgctttttcaaaatcatgttgttcaagttgtttactcaactctattcgctgttgcaatataagttgagtgacgtcagaaacatgttttgtgaatgcgctatccgcggggaggttattactcatttaatgctccgaactgaacgatattgaagaagaagatttaattatggctatatagtacagttttttttttgttaaagcaagaaactcgattggttaacacgataaaaatatttatataagcaatattatcaataacttaggaatacaactgtaaaacaggttttacaccttgtaacaacgaagtacaaagtaccgtgttttttctcttggagcataaactgttgtttcatcatgtttccgaggaataagctcgagttgctttgctcaatcaaaataactctgttataaaacgaatttgattttataacgctcacattataagatgcttatttgaattatactaaatatggtaattggtttaaatgttattaaactaagtaattaatctgatattgtagtaaactttcctaattacattacaactactaagctacagcttcttcatcttcttcccgctcgacaaattgtcggtatcgttcattggttttaagtaatacggagtggggtccctgcccgacgattctaccttcttccagcataatgacttcatcggcttgggctgcggtagcaaggcggtgcgtgactacgagaacggcggtttcaggatactgggtgcgaaagttcaaccaaaactgctgttcggtctcggcatccaaagcactggtaacatcgtcaagtaatagcaagcggggttttctcgccaaggcccttgccaatgccaagcgttgtttttggcctccactcaattcgatgccacgttgtcctaaaagtgtttctaagccattgggaaacaggcgcatttcatcggttagccgtgaatattgaacagcgagctggacgccggtttcgtcaatctggttatctccgagccggatattttcggatacagtttcactaaataaaagtggttcttgggtaacaatacttatttgtgataaccgttgccggttatcgactgaatcgataagttggccgttccaaaataccccacctgtttcaactggtaactcaccgagagcaacatcaagcagtgtcgatttgccggaaccaattggaccaacaatcgcaattgtcttttccggtgaaatattgaaagagacgtcggataagaccattttttccgcattagggaatcggctaccgacattcttgaattccaaccgttggaactgacccggagattgggtcgctgtatgagtttgctcagggtagttctcgacctctttcaatcgatcgacataagcaaaattgatttttgtttgtgcgaaaaagaacccgatagtaaaaatgggttcgataagaaactggaaatagttcgcaaaggcgaagaaactacctaccgtcatttcaccgcggatagtcagcacaccaccaacaaaaagcactatcacgacaccgaaattctgtaccaacatcccaacggtttgtaccattgcgtttattcgaataaaactgacttccgccgtaactcttcgtttcagagattcggataagtgttcacccaattggttttcggcacaaaatcccttgacaatcctaatcccgctgaaggtggtttctaaaaagtcgtttatttcgctgattgcttcctgacgtttccgggtgcgttcttcaagttgtttcatggtatgggaaagcaaccaaataaagaacggaagcggaataaatacgagaagcgtcaatttccaactgaatgaaaacatgacacacaatgagaataggataacgaacgacatctcaatcggacgcatcacgccgctacaactgtaccacgcgagttttaagtcattcccttcgatgtcgtcagtgaggcgtgttattaagtcacctgtacggtatttgagaaagaagtcgtagcccttgcgaagaattcgccggaaaatcgtctcacgcatcaagcgaccaaatacgaggttgccgtaggcgcgtgagttcggcaagattgcgaacatcaatccctgataaagtccgaccgctatcagtaaccagacccagtggcgtattaccgctggtggagcgtgcgtggtgagtttatcgagcacaaacttgaacatcagcgggtaagttgttcgcgctgcgatagagaaaaccgtgagcaatactaccaccgtcatcagacggcgtttctgcttccaatactttgccaaccacccgaaatcaagctgcgacatgtgctatctccgggaattggatacggtacaagcgggtatagaacccacctttcgcaagtagttgctcgtgggtgccgagttcgattatttctccccctttaaccacagcaatcgcatcggcatttcggatcgtcgataagcggtgagctactattacggaagttcgtccggctaacagtgtttgcaaggagtcttcgatattccgttcggtttccgggtctacactcgaagtcgcttcatcaagaatgaggagttcgggatcgaataccagagcacgggtgaacgcgatgagttgacgctcgccataagaaatattcgcactgcgttcggcaaaaacagtatcgagtccgtttggcagtttggcgataagtttacccgttccgagacgatcaattgcgcgctggacacgctctcgcgatacatccgttcgcatcactttcagattttcttcgacggttccgggaaagagatacaggtcctgcaatacaagcccaattcgtgaccgcaaatcattttgagataggttgcgtagatcgataccgtcccaataaataaccccctcgtcaggatcatagaagcgacagagtaagttaataatcgtcgatttaccaccaccggtgggaccgacaatcgcaatgcgctttcctttcggaatggacagcgacacgttttttagtaccggtttattcggatcataggcgaaccggacatttttcaattcgatgccggttgtgaatggtggtagttttgtaataacaacgggattgtcaactaccggcgttctatccaataactcaagaatacggtcagcggaaccaagcgcacgttggatttcacccaactgttctgtcatttcgaataacggttgaaatagctgtgttaggtattgcgcgaacatgacaacgacaccgatactgaatgctccgacgcgagtccaatcggcaccgatccaaagcataccaccgacagcggcgacatttagcaaccccaagggtaggaaaaacattgtaaacttgaaaaagattccaatcaggaatttaactttatcagcatttacatcactcagacgtttctcggcatacgcttccctgcccatgaggcgcaacaatcgagcaccttgggtaaactcggtaactacggcggtaacagcggctattttcgcacgttcctcacgaaacacgggacgcattttacgaaagaaaatcaaagccgctgtaactacgataattacaatcaggttaagcgataccgcgagtcgccagtcgataggatacaaaacagaaagaatgccaattacgagtaatatcgttgaaataatttggaggccaaccgaagtgaacaacccgacgagtcgttcacaatccgattcgacacgtgagacaaggcgtcctaccgggtttttgtcatagtatgccaattcgaaagttacgattttgtcaaaaactacgcgctttaaatcattcacaacattcaccccggcggttccgagtagaatgttttggaagtaccggaaagtagttgctccagcgagcagaaatagataaacggaagaagaaaatattaccccaagagtatcgtgttcagggagatttgtgtcgaagatgtgccgaaaaatcaagggttgacagactgtggcaccggtggctaaaagcattagcacaccaccaatataaaatttgcttcgatagggcagagtgtatggcaatacgcgtttaacagcagtaacacgtttttttagtgaaacagtttggggaatttcttcttcgatgttatcaaaagccggcatagttggtttattctaaagtattgaaaaactggtatccttgtatagtggcgccaaataaacgacaagttgcagtatgacgtgaaaagaggactggagcgaaagataaaaagattatagcagatttgcgaatgtaacgattgaagctaattccgccctgagaatccggtcgccaagcgtcaccgggataaaatgcagcgtcaacagttgtttcgtttcatttgcggtaaaaccgccttcggggccgatagcgatgatattattgtttgttgtggattttggtaaagtatgaatgggtttacccgattgatctgctacgagccgcgaatactcaccagaaaggtattcgagaaacgcgatacattcggtccatttcaatccactaccccgttcaccattgattatttggggcaacttcgaccgccgacactgtttcatagctgtttcggcgattttcgacaacctatcagtccggatcgtgaatggttgggtatattcggtttcgataatcagcagtttcgacaaaccgagtggtgtgagtgattctacaaccgcatctaatttaggttgtgcaagctttcccaatacaagaatgcgttcgctttcaggttcataagaaggagcgggttccagatggtcgatgatacaagagtcacggtcaaactgttttagacagccaacaacggccgtgccgttgccatcgactattcggtattgttcgccggcatttgcgcgtagggaacgaaggtgctttcgctcggtatcagggaggtcgttacaaattgttttggaagggtcaagatgggggtggtagagtgtattcatttactattttgataaccgttttatggaacatccgaatggatgcgattcgctgttgatacttggtttaccggcaaggagacgttcaatagaatcacgtaaatcctgggattttaccttcgcttcttcctgattatcgtcaatccgtccagagtaatatagcttgccggaattgtcgaagagaaacgcttgcggtgtcactttaactttccacgcatcggaaagagtaaaagccgggtcacgataaattgggaatgttagtccattttctttagcgtgcgacgcgacttcggcattgctttcggtttcgttcgggtttacaccgacgattgtcatacgttcggcgtatgtggtgtcgatactttccatacgatcattatatgcattggaaaccgggcaacgagtcgcaaggataaataccaacgtcggtttatcgccggcaccgccgattgtaacggatttaccattgagcgttgtgacggattgtggaccgatttcggcgaaagcagacaacgcgataaaagagaatgcgactacaacccaagaggggctgttaaagcgaaaacataacatcgaaacaccttaaagctaactactaagtaatacgagtcagaaacccgtaaaacagcgattgtaactaattaagcttcagcttcgtggggatttcccacccaacggtcaaacagggatttacccaataaatcgaggaaatagaaatcatcagaattcgggatatatacgctatttctcccgacggcattttgtccagcgatttcaccttgcttctcagcactacgccaaccgaagttgattcgattcacttgatttttaacgtccagtacctgagcacaatcgccacacgcgaaaacgtttgggaagtttgtctttagttcttcatcgacgataataccatcttcacaacggatacccgaaccctttaggtatttggtgttcggggtttccgcgggcgcagcgataatcgtttcgacttggaatgtttttccaccggtactaagcacacttaatgttttaccatccacatcgaatatatcggcgacttcgacgccaaattgcggcgggactccagtgttgacgaggagttgctcgatttcgcgtgctgtcacacccggtaactcgcgggaccagaataagtctggccgggcgaaatacacgactttgttgccgtgatttaccaactgtcggatgatttcgacggcgatataaccaccgccgagaaccaatacttgtcccttaccaagagtttgcttcagccggagaatgtccgagtagttgtgtaaggtgcggacatattgccgaaatggagatataaaatctaaatcgggaattgaacccgaagcaaggattaaaaaatcgtattgaaccgtttcgcctgacgtaagggtaatccggttggatttcggttcgactgattttacgcgggaacccagtttccatgtgacattttcatacacagtcggtggtgtctttacgtcgtgttggaattgttcacggttgaacaaatcgaccagcatcggcctaaaataaaagggtgtctggtcggcactgatcaccgtgatttcggcggacttttcttcgcgaattatcgcccgaacagctgccagccctgcggcaccagcacctactactgtatatcgcataatggttccgattacgatgaaaagcgggagtggttgcactcccgccggttaattagaatttgaattataactgtgttccgtagaaaataccggtatcgccaagttcttcttcaatgcgaagaagccgattgtatttagcgatacgctcactccgggaggcactaccggttttaatctgcccgacattcgtggcaacgaccaaatcggcaattgtagtgtcttcggtttcaccgctgcggtggctaatgacacaagcgtaactattgattttcgccagttcaattgtttcaagcgtttcggtgaccgtaccgatttggttgagtttaatcaaaatcgaattggcgacacctttttcgattccttcatccaaccgttcgggatttgtcacaaaaatatcatcgccgaccaattgaatttcgtcggcaagttcttcggtaagagcaatccaaccatcccaatcgtcttcagccataccgtcttcaatcgaaacaatcgggtatttgtgaacccactcgtggtagagctttatcatctgatcggacgtgagttctttaccttcgcctttgaggacatacaattttttcttgtcgtcgtaaaattcactggctgcgacatccattgccaaagcaatttgttcgccgggtttgtaaccggcggcggtaattgcttcgagaatcagctcgattgccatttcattggcggctaaatcaggggcatacccaccttcatcgccaacgccggttgcgtaccccttcgcctttaacactttctttagtgcgtgaaaagtttcagcaccagcgcgaagtgcttcacggaaactgtcgaaacctttcggatagagcatgaattcctgaaagtccactttcgattgggcatgagcgccaccgttcaatacgttcatcatgggtattggcaaataccgggcaccgacaccacctaaataccgatataggggcatctggattgcatcggcggaagcgcgggctaccgccatcgaaaccccaagaatggcgttagcgccgagtttcgctttgttttccgtgccatccaactcaatcattgtttcgtcaattgcgatttggtcgctggcatccattcctatcaacttcggagcaattaaatcattcacattatcaactgctttaagaactccctttccattgtaacgggcgttatctccatcccggagttcgagagcttcatgaattccagtcgatgcacctgacgggaccattgccaaagcgacggtgccgtcttcgagcgcagcttcgacttcaatagtagggttaccgcgcgaatcgagaacttcacgggcaaataggtcgatgatttccatgggattacctcttgtaatgtgtataagaataaaaagttatctaagtagaacgaaaatcacaaatcgaaaccgggtcatttacagataaaatggtaaattggtttacgtatgaacattacacaaaacgtgttacgataaaaatgaacgcaacacccaaaacggtcagtccaattaagggaaatgaacttctctggctatgggcttggggtagaatatcgctaactccgatatagagtagaaacccggcgaaaaaccctaaatacaatagcaagaaatatgaagagacggtgaacaacagagtgacaaacacaccgaccatcggtgcaagagcatccgcaagcagaaaagcccgggcactccttgtgctgttttggtggctcaacatcagggtgactgtattcatgccatcagtaaagtcgtgagaaataacagcaagtgcgaccaagaacccgacttcccgactaacctgaaaccctaacccaattccaatcccgtccattaaactgtgaccgattagggcgacagcagccaatttgccgacatggggatgggagtgagcggcatattccccttcgtgcgaatgatggatgacaattactttttcgaagatgtggaacagcaggaaaccgataactaacgctatcattggtgcagtgggagaaaggtgattatcagccacctgatttattatctcgggaaagatgtcgaaacagacaacacttagaagcacaccggcggtaaagcccatgatgtaattcaatttatttttgaaatggacagcgaagagaccacctaaagtggtggaaagcaacgtggcgaaggagagggtaaatgcaggcatcgtcagataggttgaactaaaaagcgttaacaaaatgtagtggtggctcatcggctatttctttcgtcgcatacaaattttgcacagaccgtataaagttagcgaatgccccgtaattcggtagttcgtatttgtttcgatttggtgtaattgtgccgggttgagacagatacgtaccgattcagtgtgatgacattgctgacagataatgtgatggtggtgttcgtgatgtccacgttcgcaggcgatatagcggctcccacgttcatcggtctcgatacgttcggcaaggcctgatttagtgaatgcggtcaaatttcggaacagcgaggcacgaccggcgtggtgtccttgagcggctaaccgattgcctaaatcgtctgcagatagtggtgttcccgcttcgcgtaacgcatcaagcaaaacgatacgaacttgcgtcgcagagagtccggcagtccttaaatcagatttagtcatatttccactatttgatactcagtatcaattataaacaaagtgaacgacgaatgcaactgagatttgtttagtgattttggttaaataaccggtcggcgaggagatctttttgcaagcgctcgtgtagttcccacagtgcatttcgattggaatcccacgtgaattggcggtgcatttctgaaaacgagccccaatataatcgggtatgttcagccgataactttaattcgaatccggtgcaatcgattgcaaaggtatattcaggtacaaccaaaagatcgagcggccattgttggtttggttgaaaattgtgttttggtatcgtgttgattgaatcgaggcgatagaatttcattttatcatttattcccgcttcttcgataccttcccgaacagcggtttgttctggagtttcgtcgccttctccaccacctgatatcgcctgccaatttccgtcatctgcacgttttagcgcagcaaattcaaactcgccagtcggtcgttttcggaaaggaaacaagagtatttggaaaggtgcgcgcatttagtgtgtctcattgcattatctttttataaaaaactgagtaattatgattatcggagcagttgctattactaccatcagagttacgaataaccaaaccggtagaaaccaagtaacgatatgaatagtgaccaattgaagggttggcaacatgcttgggaagaaagtcaataccaagcatcctattagaagtacgaggatgattacaataagcggtttgcggaaatttttccagtcagttattgaaggggaaagatggagtgcgatgcacaacatagcataaccgattacataggtttcccaacggttgaacaattcgggctgccagagttgaccgatgaactcagacaattggagttgcatatttgcgaaatacttttgccaagcatttacattttcgatatgaagcgcggagggtggggaaaaccgtgtatatgctaccattgtgaactggggccagagtattcgaacaaggagaaataacaccacagttccgccaaaaagaggcgcaacaggtataacagcattacctacccaccgtgcccaccatttcttgtcgtcgtaagtcgtttccagcacacctaactgaccggacttcgggttcggtttgaagggagcaaactttcggatacggtgaccaccgattagagcggctatggcatgggacacctcatgaatagggacaccgagccaagctgtcaggtagagcagacgaaatccaccgatttgaataattctcttaagtgcaagcgaactcaaatagacaatgaggatggtcaatgcactaaaagggagtatcacaccgagggaaagagaaaggaataagagacctgcactctgtaagtattgtagaacttgttgaaggtcgatagacatgaaagaatatcagaaaatttatgaagcagaacaagaatggagattaattttcgctctcttcttttatcaattcttgaatagtatactatagaagaaatcataacgaaatggagaatagatgactctgccactcgagaacacttttatttcgatattagcatgcccggaaacgcattcgccgctggcattggcatcttatcgtggagcgccggtattggtttgtaccaacgcgaacgtacaccgctgttaccctattatcgatgagatcccggaattgctcgttgagtcggcaattgtactaaccgaaaaagaacacactgagttgctacgaacgattgaaaagttgtaggaatgaagtattctattgggatatctgaagattggagattagaagaactaattctgagatgtcaaacggttttagaagaaaaccatctggcttccgatccagggtctgcgtaacttgaacataatgagaatacgctgtaattagtatgaccgctgtttttggactttccgcctttacctttgccagcagttccaacccattcattctcggcatatatatatcggtgactatcaaatcgaaatgtttccgtttaaacatattgtaggcgactgcaccatcatggatgccaaccgtctcccacccgattgaggcaaggatttcggccaacaacctaacgcttgaaatgtcgtcgtccacgattaacgcgcgaaagtgtttcgccatttagatttccagaattgtacctgtaagaatataaacgattcaatgactaaagccatgaatacaagaggcagaaaaattattcggaatttccgtgaactgttagagattcattaagccaatgccaatacggttcattcactcctgccatctcaaatacagcaatttcaggaatttcatagggatgatttttgattatcgtcgaggtgagttcttgcaatttatcggtagaagattttatcagataaacagattcgttatccgtgacaattttgcctttccataagtaggtcgaaacggcaccgggtaatttggtaatacatcccgccaaatgttcagtcaataccatttgcaaccaaagatcgtcggcgttggcgggaagggttgtgagaatcaggattggacgattttcagttttaccgttatcaaaccagttcagattagacatgaatcatgcgttttggaactttgatagttatccattccgttccattccacaccttgaattgtgtgtttgcttcaccttcctgatttttggtcgaagcgggcaagccggaagtacgcaacggtggtttaatcgtcgataccggagcaggtggtggaacaggtttggctggtgccaacctctgtggcggttccggcgtcttttgtatgggtttgattggggccggttttgcctcggctttagccggcgtgacgacagtctttcggggtacttcctgaacgactggaggtgtagtttcggataataagtgtttcttttttaccttaagtaacttaactgaaatcgctttttgcgaaacaccgaagtgtgtggcaatcttttctgtcttccatcccttgcgatgtaaatcgagcaattcgacttcttcttccggtgtccatcgtttggcttctccaccgacagatgcacgctgacggggtatcgacagcacatcgaccgcacctgtttttcgcattgcttgacgtaatttttgcagtttcaccgcaactgatttcggtgtcacaccatattttttagctaattgttcaatcgaatgtttcgacgattcgtggaagagtgccgcttcttcaacgggcgtccaacgcttcggcatagttactccatgacagataaggttatgttagtgtaagagatgttaatgttcaacaaacggttcatcggtgttcgaaggtaggcgaaaaaaatagcgtgaccgaatttgaccgaatcaaaacaaagcgatataatctaagagtatgctccgggagggtcaagtgcgcaagcaccttttttcagaatttatgatagctgttgccatcgtcaatttgattttggttgtgaatatggcacttgcggcgactcctgcacaagtgctgatacccactttaccggataaaatcactttcgcgggacagacgataccgcttgaccgtgaaaacgttcgtgaacagttcgacgcaatgttcaccataatgtgtacggataatcgcggccaattgatattgtggtacaaacgcgccaaccgaattttgccgatggctaagaaaatcgtctcaaatggtggtttacccgaggatttggcgtatttagcggtcgcggaaagcgatttgattccacgggcgaaatcgccatcaggcgcatacgggttttggcagtttcttcctgctaccggtcgcgagcaaggattgtatgttcatgatggtttggacgaacggggagatttcgtaaagtcaacgattgcggcatgcgcttacctgaaagaactgcacaatgatttaaaccaagattggtttttagcaatggcggcgtacaataacggcaagtcgaatgtgaagaaaatgatgaatgcgcagcatgcccgcagttactgggatgcagtcccaatcagggaaacagcgatttacgtaccgcgaattgtactgatcaaaacgctatttgaaaatccccgcgcatttggtattgaaccggattccatagtaaggtaccccgatttaaacacagtgacggtcagggttaccctcactaagccggtagaatttgcagcggtttgtgattgggcagatttggactaccgttcgatgctgttttacaacccggaaattgcgaatccatcctacataaaagatgtcacgataccggcggacaaacttctctcgttcgaaatccctaagggaagagcggatcattttaaacaagttctttcggaacacggtaaagtcgaatgagtcgaagtgctatttatgttctgaaaaaacagtactccgggagtgtttgcttcaatcagggactcattgtatcttaacgagctcgcgctgcaagtatggtgtgaagcaggagtgaacggataacagaatgattaaaacgaaaaatagtaaagtcgacgaccagaatcgcaagtggtatatcatcgatgccgatggtatggtgcttgggcgtttgtcgtcggaagtggcgcggattcttcgcggtaagcacaagccgacgtggtcttcccacatcgacaccggcgattttgtcgtggtagtcaatgcggaaaaaattaaagtaaccggtaataaaatggaacttaagggttactttatcgcaaattcacgaccgggcagcagcaagacaattcctttccgtacgatgcaacgtaagcatccgacggaaatcattcgtcatgcggtttggggcatgttaccccgcggcgctttgggcaatcacatgatcggtaagttgaaactggtcgtgggtcccgacgcatctaagtataccgcccaaaagccggaagctatcgcacccgataagttccgcacgttgtaattcgaaccgattgtactcagtacggaagattagagtagatgaaaccaccgtttttttatgccaccggtcgtcgcaaaaccagcgtagcgcgcgtttacttaacgccgggtaccggaaaaattactgtcaacaataagagtttacttgaatacttccgccgtgaagtattgaagatgaccatcatgcaaccgcttgatgtattgtcggcccaaacaaaattcgatatcgaagctcattgcaacggcggtgggttatcgggtcaggcaggcgcgatgcgattgggcatggcgcgtgcacttatcatgttcgatgcggaactcaaagtagaattgcggaagtacgggtttatgacccgcgatccacgcgctgtcgaacgcaagaagtacggacgtcccaaggcacgcaagcggttccagtacagcaagcgttgatgccgatatcgccgggtggcgagttatacgcgaaggtttaaaaaccgaagcaaggagaaaaggttatcctgtatgcccagagttagtgtggaacaactggtcgcagtgcaagcgcatttcggccatcttacaagcaagtggaacccgcgcatgaagccgtttatcttttcgaaacggaacggcatccacattatcgacttgatgaaaacatcagagatgatcgataaagcagcggaagcagttttcaatatcgtcgcttccggcgaacaaattctctttgtcggtacgaagaagcaggcaaaagatttaatccgcgagcaagctggccgttccaattcgccatacgtatgcgaacgatggcttggcggcacgttgaccaatctgcaaactatccgcaaatcggtcaaaacgatgcagtcgattgagaaaaagaaaatcgacggcacgtacgaaaagattacgaagaaagagcgcatcacactcgacacgcaacttgaaaaactgacgttagcgctcggcggtatccgtgatatgaagaagttaccgggtgcgatgtttgtggtcgatatccgtaacgaagcgattgccgtagccgaagcgacgcgccttgctatcccggtgattggcatcgtcgatacgaatagcgatccgacaacgattaagtacccgataccggcgaatgacgacgctttcaagagcatttggctcattatgcaagcggtcgcaaatgcagttatcgaaggccaagcagtgtggtcggaaaaagccgcagcccgtgaacaagaagttggtgaagttgcgcaaggcggtggtgaagataagcaacgccgcgaccgtggtgaccgcggtgatagaggcgaccaaccgcgtggtcgtggtccccgtaaacgtgaacgcagcgaacgtccggtcgagaaaccttcggaaacgcctgccgctgaataaggggcaatcgttttcgcatgattgttgaacgaccccgcttggggtcgttcctatgtaaaagcatcgccgtagttacggcaaaaatcaaatccgattctatagcaggcaaacgcctacgctaccatcgaagaggaaaaggagaatattcgtggcagtatccgcaaccgtagtcaaagaactacgcgagaagaccggcgccggtatgatggattgtaaaaaggcgctcgaagaaaccaatggcgattttcaagaagccgaggactggctccgcaaaaaaggcatttcttccgcagcgaagaaagcaggacgggcaaccagcgatggtacgattgccgcgcggttatataacaataacaaacgtgccgtgattgcggaaatcaactgcgaaaccgattttgtcgcgaaaactgcagattttgcaaaactcgtggacgtggtttgtacagtgttgaacgagttgccggcattaccagctacagctgcagaattaccgaagattgtggaagagacacgcgctataatggttggcaagcttggtgagaacatgatggttcaacgtttcggtcgcatcgacttaaacgagccaggtaagattcaactctacatccatccgggtagcaaacttgcagtgattgccgaaatcaataccggtaaagcggaaacagtgggtaaagcggaattcgtcgaattggccgcagacatcggtatgcagattgccgccgcggcaccatcttcggttgaccgccacggattggcacaagcgaccatcgaccatgaaatggaaatcgcaaaggaacaagcacgcgcgaccggtaagccggaagcagtggttgagaaaattgctcaagggaagatggacaagatttacagcgagttttgtttgctcgaacagccgtttgtgaaggatccgaaggtaacggtcactgaccacatcgccacagtagcgaagacactgggtgatacggtcaccgtaaaagggttcattcgatacaagctgggtgaataacattacgaagcaatagagaagcggcactaacccggtgccgctttttgttttagtataagctttcgtttcaggaactgaatttggaaaaaagcgtgtaaacagtaatcttatagacaacgctatttatcacattagaagcgacttcagctaatccattactactcaacccgaaaggaataagaatgcaccgctcttattctcgtcttttcaaaccgactatcacgctgttcttatttttgttactcggttcgaactctgtattcgcccaagacagtttgaacattacccatttgagctcactctttcgttcgtggggaggggctacacagattcagctagaagattctcttgcctacgtttcgactgtcaataacggaatcgcggtcttggatattcatgacctcgcgtcacctcgacaaattgcttatcgcgaattgccgagaaaccatccgatcaacaatttcgctgtttcgggcaactatgcttacatcgcagcaagagacagcggcttgcggattctcgacgttcatgatacaacgaatatacacgaagtgggttattatgtaagtgattcttcgcgattcgtacaagtcgtggtgcgggatactttagcgtttgtattggacagctcgaaaggcgttttagttttcaatatcagcaatcccaactcatttcaattgctcggttcgtgccaatttccatttgaattcacattcttcatgatggatgttcagatggtcatcgacggcaaccatgcgtacgtgtccgccgggacaaacgggatgcgcattatcgatatttccaacccgtctaatccgaatgaagttggccattacgattcaactactgttcaaagtgttaatgagctcaatggggtggcgtatgtatcggatagaatgtccggttcggtgttattgttggatgtcagccatccggattcgatacgcttactttcttcatacgaggataacggttattcaggggtttcactaagcgattcactcgcatttatgtttgacggtgcagtagaaattgtgaatgtaactgatccgactcaaccgcaatttttaggatattactataactatgacgcttggtggccaacacaggtaattcgaagggattcggtggcgttcgttgctgattacaattgtggatttgaagcgctcaatatcaataataccggagatccgacaagaattagtgtttacgaacaagcgacaatttaccaagcaaaagccgtgggagattatgcttacgtagccgcgaacgacggattacatatcgtgaatgttcaaaatccgtcttcaccttttcaagtcggtttctacccttcacagtatttgtcggcagttgctatcaatggtgactatgtctatatcacggattgggctaccggtcgtttgttagcgataaacataaccaatcctgccacaccaaccgttgccggttcttatgctgcacaagtgtactccgaaaacatagtgatatctgggaactatttgtacttaacggatttaccacgcggttttcagatttacgacatcagtaacccggtttcaccgcactttgtccacgcaatgagtacatttggtaatacactgggaatcaccgtctcgggtaactttgcttatctagcgtgcgacacgagtggttttcgtattatcgatatctctaacccgcacagtccatacgaggttagcagatataataacgaatggtcaaccaatcatacgcgtgcggtctcgattgtcgatacgattgcgtatgttgtagatggtggaggtcagttaatggctcttagcatcgccgattcttccaatccctatctcatgggtgaatgctcttgtcctcgtccgttcgatatttatgttaccggaaatcgggcgtatttggcatgtgatgacggcggcttgaggatttacaatgtcgctcgcgccgattcgatttaccagacaggattttatcgcacggaaagtggttatgcgtattcggtttccaagcaagggaatatcgtgtacgtagcgaatgacgtcagctttgacattttcgactgtaccgctggaatggaatcggtcggtagtactcacaatgcgataccgttccaatttgaactcaaacaaaattatcccaatccatttaatgggtggacggctatcaattattcccttcccgtttcaggtaaagtttcgttgaccgtttatgatgctttaggtcgcaaggtcgcaaccttggtggatgggtatcaatcggcaagccgctatagggtaaggtttgatgcatcgaagctggcatcgggggtgtatttttatcaattgaatgcgggcaaataccacgcaaataagaaaatggtcatggtgaaataagaaaccggaggtgtgggttagggtcgagggtttatgaggttcaagctgagtaaataagttctgggaagatttagaaatgcggcaccgatggtgccgcttatgagtcgtcagaaataagtaatgagaccaagcttagtgcttactattgttggaagatcgagattttatcactttttgataaaaactgtaagcaattgtttctgggacaagtggaagccattcaatgtcgtcatcataagttaagtaatcaaaccgaaccggattaacaccacctcgtaaatgaggaactagccaagcatctccacccgcgatgaaataacgcatcgtcgctcgatcaataacataatgccaaattataaatggtactttcggatcccattcgcaaaacttgcgagcaaattttagttgacgtgtttcagagcgaatctcttctttgatttctaacgtaaatgaagagtgtgtattccattctttgtaggaatcaagattcacatagtatatcgagctgtcgtcacttcttaaagtatcgcgaccgtatttaatcacagtccattgtacaggagtttctgcgaacgcagatgcgaagatgcaagtcaataataaaaaagcgattatcctcatctttttttaccctcaattaaaatgcttggtatatgaaccaattaatctattttgaactacggactgctttccgtttttcaaattccaataagtcttgatatgttttccaatcaatttgttcaatgactcttttccaattatctgttcgaaagagttgtatttatttagcagaattggattgacttcaattttgataaaaaccaaatttgtcaggattgatggacattttctgggcggagcaaactcaccgaagcaaaaatccagaatatcttcaacccaatgctttacttcttgatatactttgtttgatttcttggtcattcaaatttcctttcttagtcacaaattgtacataaaaaattatcaaaaaccaaacatattgtgttgattaacgagtggatgttgtgtgttttaaaccaacaaaaaattatccaaacctattcagttcgaaaatagaattctcttacttttctttctgtatctggtagagtgtcactgactgtttatgactcgttgggtcggaaggtcgcaacgttagtggatgggtatcaatcagcaagccgctatagggtggggtttgatgtgtcgaaattggcgtcaggcgtctatttttaccaactgaacgcgggcagataccacgcaaataagaaaatggtgatggtgaagtaaagagatgctgagtagctggatgaaaaaaaacgcagaccgaagggcctgcgtttcttttcaaaaagtaaaagtttatgctaagtggttgagatgggtatcgagtgccgacttgtggttagcggctttgttggcatggatgatacctttgcgaaccattgtatcgagagtggaggttgcttcacggacgagcggaagtgcttccgctttcgtcttagcggttaatgctttcttcaacgtgctcttaattgtggatttgccggcacgattgcgggtattttccgccttcgacgttcgcatccgtttcttgcatgacttatgttgtggcattcgagacctctactcgtaaaattcgatatattcttccaaagccacacaatatacaatcgtgccagtttgaaagcaaactcaggttaaatcgggttttggcactattttcaggttatttagccgcaacaaagcaatacagattgaaaagggacacctacctgacgtttggtcgtatgaagcatatcatgcgtataaggaaaagtaatgagataaacctgttagaactaacggggctgtgtgcttacattacgtgtaacttttccatccaccggtgaaatgaacaagaagtataaacttataattctattactcttagcggcattcctcagtatgaatggatgcgcgtattataactatctgtataatgcgaacaacaatttcaaacatgggatggatgcgaagcaggtggcaaactccgcaccgggtaccggaaaagccgacttcgataaagtaatcgacggttgcgccacgatgctggaattttatcccgattcacgatgggcaccggaagcgcttatcctgatggcgaaagcatactacgaatcggatcaatactcgaaatcacttcgaaaatgcctcgaactcgaaaataattacccgacgagtaaattcatccccgaagcaaaactatgtaaagccaagtgctggcttgcgttgaagcagactaaagagggacgggacttattgcttgtactggaaagcgaaccggatataaccgttcagtataatgcgaggttattgctcgctgatgcgttaatggcggattcgttattcccgcaagcgctggaacaatacaacgggatggagggaaaagcacctaacaaggagttggaagcttccaccacacaagaaaaattggaatgtcttctcaagctgaaacgttatgacgatgcgattcttacgatagataaattgttgaagtataaactcctgcgtccgaagcaacacgaataccggatacgacgtgcacaactttggaataaaaccggacatgctgataaagcgattgctgacttaacgaaattgtacaaagacggcagtttccgcaatcaacgggacagtaccaaagtagaattgggagtcgcttactttacggcgggagacacggcaaaggcattatcgtattggaatgatatccttgaaaacgacaaaattcataatgatatcacttcggaagcggcgtattaccggggcaattaccggttcgctactcaccaagaagattccttaatcactcaggattggacacgctcaagccacgaccgtgcgggaggagcgtttgctgtattagcggataccgcaaatgcacattttatttggaagaaagcgataacggcgcggtatgagtcagcacgcgctcaatatgatgttctattagatttaatgaatggtaagccagtaccggattcgattcggaaccgttatctagcaaatatgcggccagtaccatcttctaacgacacggcaaatgcaaccagtaccgaaatagagcaaaaaccgcctaaccggggtagacggccaaatgcatctgatacgacgaaaaaaggattaagccaagtatcgaaacttactggcgaagtttcaaaaaaaccggaaaccgtcgatacgaccgcacacgtcagtattgcaccacctgagaagcagattgttccaaccgatacggtaaagacgaacgaaattcaagccgatactctcacgcgttttggacctccagcaatcggcacacttacggttaaaaaagattctattcagaatgttgttggtgatacattagctacgataaaggatacaactaaaatcgtaacgcaggatacgacgaaactttccacttccgatacgacattagcatctaaaataacacatgccgattcgctgttggatacaaccaaaatggggcttgacaccgcaccgattgtaacagccatcgccgatgcagagaaagaccttgtacgtattgtcgatgagaagaaagaagaagcattttaccggaaagatagcactgcggcattgggatactatcccgaacttcttgcgttgaccaagaaaagagcccacagcgcctatcaattagagtatgccgtaatgtcgcgttcggttggtgacagcatccgctccgacagtttatatcggattgtagcgtcggattcgattcacgtacccatcgcgaatgcagcacgaaaagcattaaacatggatttattgccggaaccggtcgacacatcgaatatgatgttacggggcgcagaatggatattggatgcgtttcaagacactacaacggcattaaaagtatatgaatcgattgcgaaaaaagatacagtacatctgtcggaaaaagcgaatgctgctattgcaattctaaacatcaaccgggttcctaccgactcgttggaaaagttgttcgatcacttatcgaagattgccaaaatcccaaagaacgtagcattcgcaagacaaatggtatcctatatccaagagacacgtcgagcagattcattgatggcaatattgaaagcaaatatcattcgaatcgatacgataaaagtaacctttgattcattggttgtaacctatgactcggcttcaggcaaaaacgacacaataaaaatacagcttaccaaattggcacctgatactatctggaaagttgcaaaggtggatacatccaaaatcacggtggattcactggtcgtaaaatacgactcactttcgggtaagtatgatacaacgaagatacaagttaccagagcgataccggatagtttgcgaaaagcgttggtagtggatacaactaaagcggttcacgatacgaccggcatacataatgggagcaccgttgcaaagccagatacaacgcacattctggctcctcccgacaccggaaaggttattacaccaccagatactacgaaactaaagagcaatgaaaagggcatcaaaccggatacaacacacttacaaattccggtcgatacgagtaacactacagtaccacccagtccagcgacattgcctgctggacacgattagcaggagttgcatttgaagtttttagaaacgggtgcaattgtttaccgtgaagaaatccatcccggtttatttttgattcgttatcactcaccgcaaatcgcaaaaatcggggaaccgggacagtttgtccatatccgtgtcggaagcggcgttgacccgctgttacgcaggcctttttccatccagaacattatcggtccggaaatcgaaattctattgaaagtatatggacgcggtagtgatttattgagtgcattacaggtcggtgatacactggatacattgggaccgttaggaaacccatggcggataccggatgatgtgtcttcagttgtcggtgtttcaggtggagtgggggttgcaccggtattgtttcaacaggaacgttggaagaaagctattccattttatcatctgattggtgcacgaacgggcggtgaattaccattaactgaacggcagatacaccattctcatatcaatattgcgacagataatggtagtcgcgggtttcacggtacagtagtcaggttagcagaacaacagatgaatgagggtgtgtttggagataatccttactttctgacatgcggcccgtgggcgatgatgaaagcactcatcgcatggacggaattgtatggttaccgcggacaattttccgcggaagcgcgaatgggttgtgccgtgggggtttgtcaagggtgcgcggtagcgagaccattggaaaacggcacggcacgccaatactatttatgttgtaaagacgggccagtcttcgattttggaaccatcgacatggaggtaagtccatttggcgcttgatttaacatgccggttgggtgatttagaattatcaacaccacttattgccgcttcaggttgtttcggatatggcaccgaatatgccgacctgacgccacttacagcattcggtgcagtcgtcacgaagacaattacaccgcaaccgcgaccgggaaatactttaccaagaatttgggagacggctcacggcgggatgctcaacagcatcggccttgccaatgtcggtatcgaccgttacgtcgtcgagaaacttcccgagctgagaaattatccaagtaaagtgatagtatcagtagcggggaataccatcgcagaatacgcggcacttgttgcgaaaatggagccacattccgaatggcatgcgcttgaattgaatatctcctgtccaaatgtgaaggaagggggaatcagtttcggtgtaaatccgaagatgacggaagaagtcgtagcggcgtgccgaaaagaaacaaagcggcaccttattgcaaagctaacaccgatggcggtttcactggcagagatcgcaaaagcatgtgaagcagctggtgcggattcggtctcgatggtaaacacatacgtcgggatggcaatcgacacggaaacgcgaagaccaaaaattggaacgcttaccggaggttacagcgggccgccaatcaaaccgttggcgattgcaagagtgtgggaagtattccgggcagtgaaaattccattgattggaatgggaggcattgcgactgcggaagatgtagttgaatttttcctcgccggatccagcgctgtgcaaatcggaacgctaatatatgccgaccccgcgataccgggaaaaatagtcaatggattaaatgcttactgtgagcgacatggaatttcatcgatgaaggaattaaccggacaattgcaaacagacataccacttatcaaacaagtgaaatgcgattaatacgaaatttaccatctttcctactcatattgttcctcctgatactcacaacaggttgcgctccccgctatacaacaaaaggcgttgacagcaaaaacatcaccaccgataaaccggaaaccgggacgacagttgagggaattgcatcgttttacagttacgaatttgcgaaccgtaaaaccgctaacggcgagatattcgatccggaaggattgacggcagcacatcggcaatggccgttcggaacgatggtggaagtaacttcgataaagaccggaaagacagttgtagtgcggattaacgaccgcggcccattcaccgattgcattattgatttggcgtatggagcggcgaaaaaaataggaatgaaagaaaatacaccagtacgactaaaagtaatttctaccggagatggtaagtaagtacaaaatatgagcgaaccaaccaaacagaaaaatgtggtgttaaggcgggtactggtcgcggtatgggggataccgttactcattgttccgactattctcggcgggtggtatttcgccgggttattcagcatcatcgctgccatcgcggtttttgagtacgtctcgatgttaaacgagatgggaacggaggtaccgagattactaatcgcaatgctggcgggtatttttgtattgctcgtacaattccatcaggaattggttttcgagttcattttggtttgtatgatactaattccgattgtgctattacgcggtggaacttcgagtaaagtgttacaaattttcggaacactcggtggttttttatatatagcgggctcaattgcgcagttatgcatattgcgaaaatctgttcttgcgcctactgagtggtggtggggaggagtgttcatcatttacctcttctcgacgatttggatttgcgattcatgtgcttatttcggcggtaagcgattcggtaaacacaaattggcatctactatctcaccgggtaaaacgattgaaggggcaatattcgggttattaggcgcattagtatggtcgttggtgggaatagctgttcttggcgataagctccccgttttatttttagttcttaccgcgctgatggggggaacggtgggacaagcgggcgatttaatcgaatcggcgattaaacgaaatgccggcgtgaaagattcgggtcatttgttaccggaacacggcggtgtttttgaccggtttgatagtttactacttacaactccagcagtttatctcctcacggtatggtttttgagttaagccaaacatgaaactcttgcaatgaccggaagacgcatcatcattggtacagcgggtcatatcgaccacggtaaatcgaccttggtacgagcattgaccggcatcgatcccgaccgtttgccggaagagcaagaacgcgggatgacgattgatctcggttttgctttttggaaatacgggattgcttttatcgatgtgccgggacatgagcgatttataaaaaacatggttgcgggcgcgacgggtatcgatgcggcgttgctggtcgtcgctgcggatgacggaatcatgccgcaaacgatagagcatcacacaatactgaatttattaggaataacgagaggcatcgttgcggtaacgaaaattgatgggaaagatcccgactgggtggcattagttgttgaagacgtaaaaaaaatgttagcaggtggttcgttggccggtagtccggtactggcggtcgattcagtaagcgggaaaggtgtcccggaatttgccgaagcgttgggtcagctggctcaagacatcccggaacgggtcatcgagtcaccggcgctgctttcgattgaccgggtatttgtgaaaaccggattcggagtcgtggtaacgggtacagtggtttcgggcaagattagtataggcgatgaattacaactgctaccgcagaaatcaactgttcggatacgaggaattcaatcgcagaacacgacacgcgattcggtaggggcaggggagcgggcggcactgaaccttgcgggagtggatcgcgagacagtcgtgcgtggtaaccggttatgccatccgggcgtatttgtaccgaccaatgcattcgatgttttgctgacggtgtgtagcgagcagccgattaaacatcggtcacgggtcaggatgcacattggaacagcagaagtaatcggacggcttgatttactcgatacaaccgtttttagcaaaagtgataaggcgggttacgcgcggttccaaagcgaagaagcggttgtcgccggatttaatgaacgattcgttgttcgacgatattcaccagcggaaacaattggcggtggaattgtcttaaatccaatgccactaaatcgactccggcaagagggcaaccgcgagcgattggaatgcctgagacaatccaatgacgagttacaggtgattgctgcaattcgtgaatgcgaacccaaatccgtgtcaactacgcggattgcggttgcactgtcgatgctaccggtgagagtgatggaactttgtaatgcgttacaaaaaatgaatctaatattttttaataatggcagcgcggttacagctgaatttctttcgcatgaaattgattctctacgaaaacaactacaggtatttcataaagcgaatccagagcgggtaggtattccggcgatgacgttactggaatcattacagacgcgattaggcaatagtttatccgatttattgattgcaaaattacaaaacgaaagtatcattgtcgttgaaaaaggaattattagacttacatcgcatgtaccgaaggtcactgaaaaagaatctatcaatcttacccgctttgctgagctattgcggggttacgcacttacaccacctttgccaagcgtcatagctgaagaattgaatattaccgaaaaagaagtttatcggtttgccgacttgatgcgcgagcgcggggaagtagtcgttctcgaaagcaggttctggattttaacggaaatttttgaagccgcgaaaaccaagcttgtcgataaattacaatcacagggatcgatagcgctcagtgaaatagcaattgaattaggagtctcgcggcgctacgcagtagcaattatcgaagagttggataagcgcgatattacggaacgggtgggtgatacccgtcaactaaagaaaccatgaagcacgagttaacatcaatcgtgaatggttcactcaatttattgtttccaagaaattgttacgcttgtcaagagcgtattgaccaaggttggatttgcaccaaatgtttaggtgagttgaaagttggcgtccggtttggtggcgcgatattgccaccattggaatccgtaaatgctgtttggcattacgatggtgcggtgcgagctgcaatcgacgactggaagttttcgcatcttgcgcagttaggtattcatattattgagaatgcatttaccgacgaatggttacaagaatatgctgcagggccatttgacgcgattgtaagaatacctcctcattcattccatttgcgggagcggggatttgatcccgtccaccaaataaccaaattcgtatcggctaagaccggtgttccagagaagccaatcctacttcgaaaacacgcggtaaaaccgcaagtggcgtcatcgttgcaggatagagtccgaaacgtacgtggtattttttccgtccgggatagcatcgagtgttcgattttattgatcgatgatgtaataactacaggtagtacattgcgggaagctgcaaaggcattgttagcgaatggagcgaatcgagtttgtgcgattgtgattgcgagtgcgggtacgagatccattgcgcagctcgatgagacaacttctgttcaaaactcggaaaaagtcgcttttcaaaacgatatcccgatataagcgattgttcttgtgtgaggagggcaaacctaccgtttggcattccacctccgtatattttcatttcacatggtatcactaatgcaaactgaccgccttcatgaagagtgcgccgtatttggtgttttcggacatccacgcgcctccgacctcacttaccttgggctctatgcgctgcaacaccgcggacaagagtcaacgggtatcgttacgaacaataacggacgtttccatttacaccgcgataagggtttggttgcggatgtgtatcgtgcgcctgcattggaaaaacttcccggtgattgcgcagtgggacataaccggtattcgacaacgggcgcttcgactttgaccaacattcaaccactcttctcggttggacgcgacgggccgatttgtattgcacacaacggaaatttggtgaatgcaaggaaattgcgccacgaattgatggaaacgggttcattgttccagaccacaaccgacactgaagtcgttttgcatctattagcacgctcaaacggcacatggaaagaaagaatgaatgccgtttccaagcaaatgtcgggtgcatacacattattgatgatgacaaaggatgaactgataggattacgcgatccgaatggaattcgaccactggtattggggaagatggatggtgcatatttcctttcgtcagaaacttgcgccttcgatttaattggtgcggagtatattcgcgatgtcgatcccggcgaaatgattatcatcaaccgaaacgggatgcgggcagaatattatgcggataagacaacagcggcaccgtgcatttttgaattgatctatttttcgcgtcccgatagcatcgtttatggcgaaagcatcgaccgaacacgcagagcgatggggcgacagcttgcgatagagagccccgccgacgccgactttgtgatttccgttcccgattcgtctaatgccgccgcgttgggttattctcaagaattagggattccatacgaacacggtttgattcgcaatcactacatcggacgcacatttatcaatcctaccacagagctacgtaaagctggagttcggatcaaattcaatccggtgggttcggtactgaatggaaaacgcattgttgtagtagaagacagcattgtgagaggtacaacgctaaagcaactcacttcactgctccgccatgccggcgctatacaaattcacctccgagtcgccagtccaccgatacattttccttgtccttacggtatggattttccgacccgcgaagaacttattgctaacacctataatcccgatcaattagcagattgggttggcgccgattcgcttcggtatttaagccatgacgggatgttagcagcggcaccgtcgaagaacggtggatattgttccgcttgtttcggtggtgtttatccggtgaaactcccgggtgatttcggtggtaaatccgatcttgaacaaaaatcaggatgacatcaaataaccgtcacccattagactggtttttcctacttcgacctactttactttttccggtctgcactgttttccttgccggataccggttcggttttactcccatttcattgttggattggattgtatttattccttccgctattgcactcggcggggcggtatatgcattgaatgaagcatttgacgtcgattccgaccgagccaatgaaaaattgcattttttacaaagtggaatatttacgccgcatacaacgaaaatctatggagcgatattaggtactattggtttgctcggattgtggtgggtagctaaatcggcgattatttggatactgctgggattcgtagtaactggggtcttatacaattttccgccattccgattcaaggatagagcttcagcgggaattgttgtcgctgtattgggtggtgggctaagtttcatttcgggggtattgatcggtagtggcgagtggagcttagcggttcatgggataccgtacgtcatcgcattcggggcaatctcgctattgacacaattactcgatactgaaggtgattcacgaagtggaaaaaagacggttgccgttcaatatggcatcggaacgactggcatcattgcgtggtggggagttgcagcggcgacaattatagcatttttgttgcaagattggatactcactatttcggcagggataacactcttattcggatttcgccttcttttacaagacgatacgaattggggagcgctgacggcaagagtcgctattttggtgttgtcaatttcaattggtgtgctctacccgttgtatttgatttcgataattgtatattatttcttagcaagatggtactatcgagtgcgctttcagatccattatccatcactgacaggaaccaattggtaaacctatttcggaaatcgaaacaagagcgccctttcatcggcgtggtacagggtatcggcctgcatcaattatggcaggtttccaacctgttaagtttgtcgcggttggttatcattgttcccgtatgcttttttttaatacgcgatcaggataacgataaatattttgcccttggtttgatggtggttgcatgtctgacggatttttttgatgggtatcttgcacggaagctaaatcaagttagcgagcttggaaaaatcgtggatccgattgcagacaaaatctgtttgttatcagtagcactttgtttatcttcgccgactcgaacgatacgttttacttattggttgctgatcgttgcatttttacgcgatgtattgattgtagtatgcgggtactgggcatatcgggcaaaaaatgtcattatgacatcgaattggtggggcaagtggtcgactactgtatttgcggtattggcgctgacaatcacgttagatttaccggatcaaaactggtactttttcttcatcgatcatgatgtgttgtcttggattacgttagttctattaatcgcatcagcattaagttattttacgaggtttctcgatattgtcgccggacatcctcagaaacaaacgagttaatgattacagttggcgggacaacgacctaccactactcaattttgtatgataaaattttataacacactttcacgaaaagttgaagaacttcacccggttgacccggacggcaagacggtacggatgtatacgtgcggcccgacggtctataattttgcccatattggtaatatgcggacttatatctgggaagattttcttcaccgtgcactcgaatatgcaggtttcgaagtcgaacgggtaatgaacatcaccgacgtggacgataaaacgattcgcgatgcgaggaacaccggcattgatttctacgaattcacgcagaagtacacgaaagcatttttagaagatttagaaaaactccatatcaaacattcgacccactacccgaaggcgacagagtttgttccacaaatgattgagatggttaaggaattggttgattcaggtaatgcttatatcgcggatggctcggtgtattaccgcatcgatagttttgccgaatatggaaaactgtcgggacgaacaaatcgcggcgaacagcgacaccgtatcgacgtcgatgaatacgatgagaaggaaggcgttcaggacttcgcattatggaaagcgtggaaaccggaagatggtgatatcaaatgggaatcgccatggggagcaggacgtccgggttggcatatcgaatgctcggtgatggcgaagtattatttgggtaacacgttcgacattcattgcggcggtgtagatcatatttttcctcaccatgagaatgaaatcgcacaaagcgaagccgctaaccacgtgaagatggcgaacatctggttgcatggggaatggcttttcgtcgataacaagaagatgtcgaagtcgttgcataattattacacgctacgcgatttgatcgataagggttataccgcgcgggcatttcgattctacatgctgacgttcaattaccggatggcggtaaatttttctttcgatggtttgaacgacgctgtgaagcggttggaaaaatttgatgagttctggttagcgttgattccggcgaatggaacgggtacgaatggtgttgttgatcaaaagattaccgaatatgaaacggaattttccgattcgcttgccgatgatatcaacagtgcgcgggcattagcggtaatttcggaagcgttgcgggcatttaatggtttgcgttcgcaaggcaatttatcgaacgaagagacggtgttgataaagaaattttggcaaaaaattgatgttgtgttacaaatcctaattccttgggaagaaagagcttcgctctcggagaaagatgtcgaagccagtatccaatctcgtatcgcagcccgcaatacaaaggactttgcgactgccgacaagattcgtaaagaacttttagaacaaggcattgttctggaagacactccgggaggcacgatttggcgacgtaagtgacgtcgaatcacgcctatttcttgacaaatcagtaaaattatattatcctaccttgttgctttcacgctgacgtagctcagttggtagagctcccgacttgtaatcggaaggtcgtcggttcaaatccgaccgtcagctccgatgccgtcggagccgactgtgagggtagccgactgaccgtcatcgagcgcatgccgaccggatccgacgcgattcagtcggtttttcttcgcaacggtttcgacttgtgctctttgtcacggtggggtggccgagcggttaatggcaacagactgtaaatctgtcgtgctacgcactacgtaggttcgaatcctacccccaccacagtgcgccagatgtgagcactggttcatatctaacttgtaattatttgcgggagtagctcagttggtagagcatcagccttccaagctgagggtcgcgggttcgagtctcgtctcccgctcacacgtatagcggatttgggtctgcgttgtacatgcaacgctgacgtagctcagtaggtagagcacatccttggtaaggatgaggtcaccggttcgatcccggtcgtcagctcgctttttattattcaatagacgaaaaaatagcagaatccatacccatcgaacaggggagtagacaccatgtctaaagcaaaatttgaacgtaacaagccccacgtgaacatcggtacgattggtcacgttgatcacggcaagacgactttaacggcagcgattacgctttgcttgtcgaagcagggtcttgcgacttaccgttcgttcgattcgatcgacaacgcaccggaagaacgtgcgcgtggtatcacgattgcaactgcccacgtggaatatgaaaccgcgaatcgccactacgcccacgtcgactgtccgggtcacgccgactatgtaaagaacatggtcaccggcgccgcgcagatggatggtgcgattattgtggtagcagccaccgacggtccgatgccgcaaacccgtgaacatattttgcttgcccgtcaggttggcgttccttacttaatcgtctttatgaacaagtgcgatgccgtggatgatcctgagattctcgacttggtcgaattggaaatgcgtgaactgttaacgatgtaccaattcccgggtgatgatattccggtaatccgtggtagtgccttgaatgcattgaacaaccatgaagatccggtagcgaacaagtgcatctttgaattgatggccgcttgcgatagctatattccaattccgaaacgtgccgttgaccaaccattccttatgccagtggaagacgtcttctcgattacgggtcgtggcacagtagcaactggtcgtatcgaacgcggtattgtcaaagttggtgataccttagaattaatcggacttggcgctcacaaggatacggtttgtaccggtgtcgaaatgttccgcaaactgcttgatcaaggtgaagcgggcgacaactgcggtctgttacttcgtggtgtggataagaacgaaatcgaacgtggtatggttttggcgaagccgaagagcatcactccccatacgaagttcgttggtgaagtgtacgttctatcgaaagaagaaggtggtcgtcataccccattcttcaatggttaccgtccgcaattctatttccgcacgactgatgttaccggtgcagtgaagttaccggaaggtatggagatggtgttaccgggtgacaacgtgcgggtggaagtggaattgattactccaatagcgatggaagagaaactgaaattcgcaattcgtgaaggtggccgtacggtcggtgccggtgtcgtcacaaagattttggaataaataagtaagtagcacagaaattcaatctgtgctacttcttaacataggctagtagctcaattggctagagcaccggtctccaaaaccgggggttgggggttcgagtccctcctggcctgcagaaagcccatcgagctctaatgtttagcaacgacgggttcagaggtcgaacgatgaaagaaccgttgaaagaaaccatcaagaactacatcgcggatgtccgtcaagagatggataaagtctcatggccgacatggacggaagtaagatccagcacatggattgttatcctcatgtcaatcatccttgctctgttttgtttcggaatcgaccagattttatctcgaatcgtgaaatcgattctttaggagattggattgaacgaaaatctggacagacgtttctactctcttcatgtgtttacaaaacacgaagagaaagtgaagcactatctcgagacggaagcaaaacgtctcggaatcgatggcgacttgtttcagatattgattccgtgcgaagaagtcgtagaaatgaaagcgggaaaaaagaaggtcaagaaacgcctgctttatcccggttacattttcgtcgaaatggcgcttacccgacagatgttcaatttgatttcggaagcaccgacaacgatggggttaatcggtcaaggtggagaaccgacaccgctatcaccgggcgacgtggaacgcattcatggccgggtcgaagaacggcgtggaaaagcagttctggagattccgtttgaaatcgacgaacaagtaaaaattattgacggaccgtttaaagatttcatcggtacggtaaaagaaattcatgccgagcgacataaactgaaggtgatggttacagtgtttggacgtccgactccggttgaagtcgacttcttgcaagtgacgaacgaattttcaaacgaataggtaatgtatcgaaggtgcattgaacaccttcttcgagagagagaagtacacaatggcaaagaaaataacaggatacgcaagactccaattaacgggtggttcagcaactccagcaccaccggtgggaaccgcactgggtcccaaaggcgtaaacctgatggaattctgcaagcaattcaatgcccgtacgcaggataaagccggacaagtcattccggtagtgataacgatttatgccgataagacatttactttcatcacgaaagttccaccggtcagttatctgattaaaaaagccgccggtatcgataaaggaagtaaaattccgaatcgtgataaagttggtaagttgaaaaaagatcaggtaaaacaaattgccgagcagaagatgcccgatttgaactgcgagtccattgaatcggcaatgcgactggtcgaaggaacggcacgctcgatgggcgtaaccgtagaataattaaaaaatgcgtgcgggagacggcagtcgattaccgcgcgggaggttacatgcgaaacaaacgatatcgtgctgcgttcgccgccgtagagcatgataaagagtatgagttacttgatgcggtaaaattggtgaaggcgaatgccaaagccaagtttgatgaaacggtagaacttgcggtgaatttgggagttgatccccgaaaagccgaccagatggtgcggggaacagttatccttcctcatggtgtgggaaaaacagttcgagttttggtattggcaaaagggccgaaagccgatgaggcaaaagccgctggtgccgaccatgccggatttgaagaatacctcgagaaaatcaaagggggttgggcagatatcgacacgattatcgcaacacctgatgtaatgggtgatgtcggtaagcttggtaagatacttggcccgcgtggtttgatgccgaacccgaaaacgggtacggtgacgatggatgttacgaaagccgttaccgaagccaaagccggtaaagtggaattccgcgttgagaaagcgggaattcttcacgttggttgcggtaaagcaagctttagtgaagatgcgctgtatcagaatatcgacgctgtacttaaaacgattatccggttgcgccccactacggcaaaaggcagttatatcaagaaaatttcgctctcgtccacgatgggccccggtgttaccatagcccgtaccgcggcgactttggcataagagtggagaaaggaaataataatatgaatcgtcccgatccgcatccaaatgctgcaaagcggaaaaccgttgaagaactacgtgaacggtttggcaaagcaaagtcgattgttttagcggactataccggcttaacagttgccgatgcaaacgaatttcgcaaattgtgccgtaaagaaggtatcgacgttctcgtcgcaaagaatacactggcgaaattggcgctaaaagaccaggaaaaagccggcgcatttaaactgctcaagggtcaaacccttttcgcggtcgcgagtggcgacccggcggcaccgattcgggtgttgttagcgttcgcaaagaaacataacgataaaccgttacttcgcggattactgatggataattcagtattcgatgcgaagcaagcggaacagatgaaggatttaccaagccgcgaacaactcatctctcaaatcctcggtttactcgagtcaccgatgagccagttggtcggcgtgttgcaagaaatcctgcgaggcgtaccggcagtcgtggatgcagttgcgcaaaagcaaggttaatccaataaaataagtttaatcgcaagttgcggattccaataggaaatccgcttccgaaaaagagtatcacgaaaagttcgtgatggttgaaaggagccagaaggtggaaaaggtccagcaaatcgtatcgcaaatcgaaacattgacggtacttgaattggtcgaattgaaaaaagcacttgaagataaattcggtgtaacggcggcagcgccgatgatgtcgatggcggctatgcccggcgcagcagcagcagaagcagccccggcagcagaagaacaaaccgaattcaacgtcgtgttagtagcggcgggtgagaaaaaaatcaatgtaattaaggaagtccgcgcagtaaccggacttggacttaaagaagcgaaagacctcgtagaaggtgcaccaaatgcagtcaagaccggtgtctcaaaagaagaggcattgtctatcaagactaagttagaagaagcaggcgcatcagtcgaaatcaagtagtatcggggcggagaccggctgagtgtattccatctcgtaacttgcatatttgatacacgggtccggaaccggcacagtcggttccggtctcgcgtcttgtaaggtctatctggagcggaggcgtcttgaacaaaaatcattacgaacatcgcgtaacgtttgcacgaattccagaattattagagcttcccgacttgttggaagcccaactgaatagttttgaagaatttttgcaggctgatgtcacgcccgcaaatcgcaaacaattgggattgcaaaaaatatttctttcgatctttccgattatggacaaccgggaagagtcgattcttgaatttgtcgaatattacatcgaaccgccgaaattcagcatcgatgagtgtaaagaacgcgcagcgacttattcatcgacgttaaaagtaaaattacggttgtcgacccgggatgaatcgacggacggatacagcgaaacgattgaatccgacgtttatctcggttccatcccattgatgacaccggcgggcacgtttatcattaacggcgcggaacgcgtcgtagttagccaattacatcgaagtccgggcgtgagtttcagtgaaaccccgcacccgaacggcaccatcatttattccggtcgcatcattcccttccgcggaagctggattgaatttgcgacggatatcaacgactgtttgtatgcgtatgtcgataagcggaaaaaattcccggtaacaactctgttacgcgctatcggttatcctgaaaaaatcgacgcatacaaaattttcgatctcgtggaagatttgtatgtcgagcgcgaacttgaataccggaaagcacacaagcaaatcgcggaacggcatcttgccatcgacgtagctaacccgacgaccggtgagctgattgcgcatgagaacgatccgttgtcgttggaaatgctccacctgttcgaagaaaaaggggtgaagaaaattcacctgtttaagtcggcacgtgatgcacggcgtaaccttgccctcgaaattattcaaaatacttttaagaaggataaatcacacgaccgtaagacggcgttggaagtgatttacaaggaattgcgcggcagcgatccgcaggatgaagcgagtgcggagaaaaacctgcaccgtttcttcttcgacgaaaaacgatacgatttgggcagtgtaggacgttaccgtttaaacaaacaactcgatttaacggtaccgcttaagaccacagtattaacaccggacgatatggttaagattatcggcaaggtgttgcaactgcgattaggccaagaaaataccgacgatatcgaccaccttggcaaccgccgtgtccgtacggtcggtgaacaattatcgaatcaattcgtcgttgccctttcgcgaatggcccgtaccgtaaaagaacgcatgaatatccgcgatacggataaattgcaaccgcaggacctcgttaatgttcgtacagtgagttcggtgattaacacgttcttcggtaccaaccaattatcgcaattcatggatcaagtcaatccgctgacggagttgactcacaagcgacgtctttccgcactcggacccggtggtttgacgcgggagcgtgcaggttttgaagtccgcgacgttcactactcgcattatggacgactttgcccgattgaaacaccggaaggtccgaatatcggtttaatttcgtcactctgtacttttgcgcgaatcaacgaactcggatttatcgaaacaccgtaccgcaaagttgacgcgggccatgtaacgacccacatcgattatttgagcgcggatgaagaagaccggtacatgattgcgcaagcaaacacaccgatggataaaaagggcatgataaccgctgagcgggttcaagcccgattccgcggtgacttcccggtagtaaaaccatcggaagttcattatatggacgttgcgccgcaccaaatggtatcgattgcggcagcactgattccattccttgaacacgacgacgccaaccgcgcgttgatgggttcgaacatgcaacgccaagcggtaccattgttacaaccagcggttccgattgtcggtaccggcttggaagaacgagctgcccgcgacagccgcgcgcttgttttggcggagcaagatggtgttgtcatcgacgtagatgcgaatggaattacgctggaaacaacataccaaacccgcaagggaacgcaaacaaagcatgtcagttatcacctgaaaaaattccggcgaacgaatcaagacacttgcatcaatcaacggccacgggtagaaacaggccaaatcgtgaagaaaggcgacgtccttgctgacggcccttccactgatttcggtgaattagcgctcgggcgtaacgttctttgcgcattcatgccctggaacggttacaactttgaagactctatcatcatctcggagcggatgcttgcggatgacgtcttcacatcgattcatatcgtagaaaaagaactgactgttcgcgaaacaaaacgtggacaggaagaattgactgcggaaattccaaacgtatcggaagagtccacaaagaatttggatgagaatggtatcattcgcatcggcgctcaagtattgccgaacgatatcatgatcggtaaggtcacaccaaaaggtgaaatggatttgacgccggaagacaaattgcttaaagcaattttcggcgacaaagccggtgacgtaaaagacgcgtcccttaaagcggaagcgggattgtacggagtcattatcggctccgacctattcagccgccggaaaaaggatgccgccgcaaaacgtgacgataaacgccgcgtagatgatatcgacgagaagaagaaccacgaacaatccctcctgaaacggggagcggaagaacgtttatacgaagcgcttaacggcaaagtattgaagagtgtgcgtgcgatttccggtgaaataaaaattaccgccggaaccaagtttagccgcgagattttgaatcaaatcaatatcgacgaactcgacgtggacttgccgtggagcgaggacgaagatttacacgacatcgttcaaagcatcatcggcgactaccgggacgatttactcaatcttgaagtcgatgcaaagaatgaaattcatcgcatcaaacttggcgacgaattacctacgggtattttacaacttgccaaagttcgaatcgcccagcgcagaaaaatcagcgttggcgataagatggctggacggcacggtaacaaaggtgtcgtgggtaaaatcgttccggtcgaagatatgccgttcctcgatgacggtacgcccatcgatattattctgaacccgcttggcgttccctcccgtatgaacctcggtcaaatttacgagaccgcgttaggttgggtaggcatgaaaaccaagacccagtataagactccggtttttgatggtgcgacgattgaacaagttgaggatttgttggagaaaacattcggtcaacggacatcgaaagtacaattacgcgatggtcgtaccggtgacttcttcgaccagaaaacgatggtcggcgtcatttacatgatgaagttatcgcaccttgtggacgataagattcacgcccgctcgattggaccgtacagcttgattacccaacaaccattgggtggtaaggcgcagttcggtggacagcgcttcggtgaaatggaagtgtgggcgttggaagcttatggcgcggctcacatccttcaggaaatcatgacggtaaaatcggacgatgtaaccggcagatcaaagatgtacgaagcgattgttaagggtgtggaaacgccgaaaccgggtattccggaatcgtttgaagtattagtaaatgaattgaacggtctatgtcttgacgtggagttgtccaatgaatgaaatcgccaacaaacctccgttaccaacaaccgatgcacctatgaagccgtggcggcccgtggagaaggataagaaagaggcaccggtagatttcaagagtatcaccatttcgttgctttcaccggaagcgatacttgaacggtcgcacggcgaagtaacgaaaccggagacgattaattaccgctcttacaagccggaaaaagaaggattgttttccgaaaagatttttggtccgaccaaggactgggaatgctcgtgcggtaagtatcgcggtatgcgctacaacggcatcacttgcgaccgttgcggtgttttagtcacgaaaaaagatgtgcgccgtaaatggagcggccatatcgaattggcagttccggtagtgcacatttggttcttcaaatcaggaccttccaaaatcggccacttgctgggaatgaccgtccgtgatttagagcgggtgatttattacgagcagtacatcgttgtccaaccgggtcgttccggtttgcgcgatcgtgagctactcaacgagaaccgctattaccaaattcttgcggaactcggcgacgaccacgaaaaattagaagacagcgatcagaataagttcgtggctctgaccggtggtgcagcaataaagttgcttctcgcgcgggtacaactcgagcacgaaggcgacgaattgcgcaaaacgatgcagactgaaacaaatgcgcaacgtaagaatgacaccattaaacgactcaaaattgtcgatgccttccgccgtaatctcgaacaaatgaagaataaaccggaatggatggtgcttgaccgtattccgattattcccccggatttgcgaccattagttccactcgaaggcgggcggttcgcaacgtcggatttgaacgacttgtatcgtcgcgtaattatacgcaacaaccgtttgcgccgccttattgcgatcaaagcgccggatgttattctccgcaacgaaaaacgtatgttgcaggaagcggtcgatagtttattcgataacggccgtaaaaacgtcgaagtgcgcggtgacagcaatcgtccgcttaagtcactgtcggataacttacgcggtaagtccggtcggttccgtcaaaacctgttgggtaaacgtgtcgattattccggtcggtcggtgattgtagtcgggcctgaattgaagatgcaccagtgcggtttgccgaaagaacttgccatcgaattattcacgccgtttgtcatacgtaagttgattgaacgtgaatatgtgaaaacggtaaagacggcgaaacgcatggtacaacgccgtgaagaagccgtgtgggctattctagaagaaattattcaggaccatcccattttgttaaatcgcgcaccaaccttgcaccggctcggtattcaggcatttcaaccgatcctcatcgaaggtaaagcgattcgtctccatccgttggtatgtgcggcattcaacgccgactttgacggcgaccaaatggcggttcacgttccactcagctacgaagcacaattagaagcacgcttcctgatgcttgcgagcggaaacttactgcacccggcaaatggacggccaattaccgtaccttcccaagacatgattttgggttgctactacctgactaaaaagcggccgggagtacttggtgaaggaagattctttgcggatgacgatgatgtggtgatggcgttcgataataatattgtcgctctacatgcacaaatttatttgcgcaggggcggcgaatttattgacacaacaacaggtcgcgtaatttttaaccggattcttcccgaagagattcatgaagtaaaatattacaattcacttctgacgaaatcggaaattcaggacattattcaggattgccacaaccgggtcggaaccgcgaaaaccgcgcagttccttgatcggctgaaggagcttggattccaatattcgacacgcggtggtctttcggtctcgatttgggacgtcgaaattcccgatgaaaaacatcgcattatcgccgaagcatacgaagaagttgccaagttgacagaaactttcgaagaaggtttaatcggcgataccgaacgctacaacaatatcatcgacacgtggacgcacgctaccaacgaagtcgccaagaagatgatggatcacttggcgatgagcgatcaagggttcaacccgatttatatgatggcgcattcgggcgcaagaggttcgcgtgaccaaatccgccaactcgctggtatgcgcggtttgatgcagaaaccgatgaaaacggtgaccggtggtaaaggtgaaattatcgagaacccgattgtttcaaacttccgcgaagggttatcggttctcgagtactttatttccacgcacggtgcccgtaaaggtcttgccgatacggcaatgaaaacagcggacgcgggttatttgacccgccgtttggtagacgtcgcacaagatgtaattatccgattggatgattgcggaaccgcgaatggtatcatcgtggaagcattggaagaaggtcaggaagtcagcgcacaactttatgataagattgtgggacgctcacttgccgataacgtgtacgacccgaatacgcatgaaattctggtacccgcacgaacgctaattacgagccgggaagctgaaataatcgctcgttccggtgtcgaacgagtaatgattcgcagtgtattgacttgtgaagcggaaagtggtgtatgccgtctctgttatggcaccaacctgacgacgagtcgtctcgtggatgtcggtgaagcagtcggcgtcattgctgcacagtcgattggcgaaccgggaacgcaacttacgctgcgtaccttccacaccggtggaacggtctctcgtcagtcggcacaatcggaagtttacgcaaaatctgccggtacaattatgctcgaaagcgtcgattttgttcgacaagtatcgggtagaatgattgtggttcgacgaaacggattattgattttggtcgatgaaaacaaccgccagatttcgaagcacaacgtcccgtacggtgcggaattaaaggttgtccacgagcaggatgtccaagcgaacgagttgttattcgtgtgggatccatactcgaaaccaattcttgcaacgagcgacggctacgttcactacatcgacttgaaggaagacattacctacaaggaaatgacggaagagacgacgaaaaaacgttatcgtgttatcatcgaaccgcgcgataaaaagttgtctcctcatatcgttttactcggaacgaaagccgatccgcagacccgaaagcaaggccagtacgtgcttccggtcggtgcacggctcatgcgcgaagagggcgattatgtagaagccggtacggaaatcgcacgtgttacccgtgagggcgtcaaggcgaaagacatcaccggtggtcttccccgggttcaggaactctttgaagcccgcaagccgcgcgacccgtccatcattgcggaaatcgacggtatcattcgtttcggccaaatacggcgcggtgtgcgcgaagtaatcatcgcatcgcttgcaacgagtgaagagaaaaaatatatgcttccggtgactcgcgacttactcgtattcgatggcgatttcgtacgagccggcgatccgttaaccgaaggtccgcgctcgcccagcgatatcctgaaagtgttgggacacgcgaaagcacgcgaatttttagtgaacgaaattctcgcagtctatgcggaacaaggtgtaaaaattaatccgaaacacgtcgaagtaatcgttcgtcagatgatgcaaaaagttcgcattctcgatccgggcgatactgaattcctcgaaggggattcggtgaaccgacagcgcttcgagcggattaacaagggtctcacggacatgatgctcgtggaagagccgggcgacaccacttattcagtgggttcgttggttacttcccgcgatttacggcgggaaaattcccgcgtgaagaaagcgggcggttcggatggaaaggcacggcttgcgcaccctgcacagtgggaaccagttttgctgggtattacgcaagcggcgttgacgactgagtcattcctttccgcagcatcgttccaagaaacgactcgcgttttaaccgatgcagcgattgaacggaaacgtgataatctgaccgggttaaaagaaaatattattatgggacatatcattccggcaggaactggattggcgaaattccgcacaattcaagtaaaaaaccgggaaaacgaatggatgccccctgtccgggaagcggaagaattagatgaagttgtcaccggttctgaagaggttgaagccgcgtagcagagaagttttcaaactttttctacacgggaatacctcgatgagttgctttcttgactcatactggttccggtagtatattgattggctttgaatttggaggttttgtgccgacgataaaccagctcgtgcgagcgggtcgtgagcggattctgaaaaaaactactgctccggcattgaagaactgcccgcagaagcgcggtgtttgcactcgtgtctatacaactacaccgaagaaaccgaattccgcgttacgtaaagttgcgcgtgtaagattatctacgggaatggaagtcacggcttatataccgggcgaaggacacaatcttcaggaacacagcattgtgatgattcgcggcggtcgtgtcaaagatttacccggtgttcgttaccacatcattcgcggtaaacttgattcatccggtgtcgagaaacgtcgtcaaggacgttcgaaatacggtgctaaacgaccgaaggcgggagcttccgccacggcgaaaaagaagtaagaccagcgggaagacgtagcaaatggctcggcgaaaaaaaatagcaaagcgcgaaatcctgcccgatcccaagttcggcagcgtattgatttcgaagtttatcaacaacctgatgcaacgcggtaaaaaagcggttgcagaaaaaatattctacgatgccgtcgatttgattcgcgaaaaggcaaagtcagacggtatcgaagtatttgaaaaagcactgaagaatgtcggcccgttgttggaagtaaaatcccggcgcgtaggtggtgcgacatatcaagtgccaatcgaagtgaacatggagcggcgtgaagcattggcgatgcgatggttgattacttcttcccgctcacgcagcgaaaaaacgatggctgaaagactctccggtgaattcatggcggcatcccgcggtgaaggcaacgcgatcaagaaacgggacgatactcacaagatggctgaagcgaaccgcgcgttcgcacacttccgttggtaagtatccgcagatagtctagtacaccaaacgtttatcggatatataaaagcttcttaccgaagcggtgtaagaagctaatctatttttatcgcttaacttgccgaaatcggcaaatctcatagaggaaaaccgggcagttcatgacacaattggaacgtctttcgagcatccgaaatatcggcatcatggcacatatcgacgccggtaaaacaactaccaccgagcggatactcttctatacgggaaagacgcataaaatgggtgaggtgcatgaaggcgccgccgtcatggattggatggagcaggaaaaagaacgcggcatcaccattacatccgctgcgactacctgctattggcgcgaacatcgcatcaatatcatcgacaccccgggccatgtcgattttacggttgaagtagaacgttctttgagagttttggatggcgcagtcgccgtgttctgtgcggtcggcggggtagaaccacagtcggaaacggtgtggcgacaagcgaataaatacggcgtaccgcgcatcgcatatgtgaacaaaatggatcgcgtaggggccgatttttacaatgtcgtcgcgatgattaaagaccgtcttggcgccgtaccaattcccattcaattaccggtcggacaaggcgaattgtttacatcaatgatcgacctggtaaagatgaaatcgatggtctttaatgaaaactcgctgggcaagggttgggaatatatggaaattcccgaaagccggagacagatggcacatgacgcccgcgagaaaatgattgaagcgattagcgattacgacgatcatctgatggaaaaatttcttgctgaagaagaaattcccgaagatgttttactgaaagcgcttcgtaaagcgactatagattgcaaaattacaccggttctttgcggctcgagttttaaaaataaaggggttcaacccttattagactcgatcgttgatttactaccttcaccggaagaattaccaccggttgtcggacatgaaccgttcgacgaggaagtgcacgttgcgagaaaagccgattacgatgaaccgttcagcgcattggcatttaaaattcagacggatccttatgtcggtaaactgacatacgttcgggtctattccggtaaattggcagccggttcttatgtgtacaatcccgtttcacggcgcaaagagcgcgtaagccggttattacacatgttcgcgaacaaacgcgaagacatcgacgagatagcggcaggaaatatttgcgcattcgtcggtttgaaagagactcgtaccggtgacactctttgtgaagagaaccaccaaattattttggaacgaatgacgttcccgattccggtagtgcagctcgcaatcgagccgcgcacaaaagcggatcaggacaaattgtcggaagctttgagcaagttgtcagaagaagacccgacgtttcaggtcaggttcaacgacgaaacggctcagacaactatcgcaggcatgggtgaattgcaccttgaaattttggttgatcggatgaagcgcgagttcggcgtcgatgcgaatgtcggcaagccaatggtcgcatatcaggaatcaatcacaaagaaagctcttgtcaatcacaagtatgtgaaacaaacgggcggtcgtggtcagtacgcacacgttgaaatgaccatcgaaccgggtgaacgtggtaaaggataccacttcgagtcgaagattatcggcggtgtgattccgaaagaatatatcccggcgattaatcagggttgtaaggatgcgatgaagaccggcgtacttgccgggtacccgatggatgatgtgattgtaactttgcttgacggtagttaccacgaagtcgactcgaatgaaatggcttttcgtatttgcgggtctatggcatttaaagaagcggcacataaagcgggaccgcagattatggaaccggtgatgtcgttggaagtgattacaccggaagaatatctgggtgatgtaatggggaacatgaatcaacgccgggcgcgaattcatggtatcaatccccgctccgatgcacagacgattaaagcgacagtaccattggctgaaatgttcggttatgctactgcactacggtcgatgtcgcagggacgcgcgatattttcaatgcaattcgatcattacgagccggcaccgaaatcagttgccgaaaaaatcattaaagaattgaacggctaattaagtcgatagaacaaggaagacaccatgtctaaagcaaaatttgaacgtaacaagccccacgtgaacatcggtacgattggtcacgttgatcacggcaagacgactttaacggcagc

SEQ ID NO: 509 - DNA, 146619 bp, Artificial Sequence
  Synthetic Oligonucleotide
atactccagttgcccgccaaagatgttctgcagcggcggttcacccccacatgcgtggggaatacatcttccacccagccgtggatgagcgagatctcggttcacccccacatgcgtggggaatacgtaacgtggctcatgatggaggcgcggagcttcggttcacccccacatgcgtggggaatacacttgatcaatagagagctaacaggtcattgagctccttcaagccttagttcaaggatgtttggtcattagtttgataccctcccattccgtaacgactcttgatgcggcaccccagaattcgatatcaaaaccctgttcggcctggctactccagatcatcaggcaagtcccaccgctgcaattgcttctaaccttatcccacagtttgtccctaaccattgctgagactttacccacaaacacccccgcctttacttccagcagccaacgtgtgatctgaccccgcaaggagtttggcacgttttccaaaaccaaaaccaccatcaatcttcctttggcagatcatcctgcccgtaagatatgccgcctggggaaacttctccatctggagaccagagtcctccaggcaaggctggttcttcggcaaaacagtcatccgggctatcctctggcataatatcaccgaagagagaactaatgtcagcgacaatgcgtttgagtagattctgcctgtggaattcatcacggcaggcaagcctgactctgcggtcgagttcgccgatcccttcagcggtcgcccggaatgcggcgggagcagccatctccattttgtatagatccgcgatatcatagacaaatgacagttgcttgccagtgtggacaaagcccaatccgggagagaatcctgcagcaacgatggcagcgtgcgatatgccgtagaggcatgagtttgccacagataaagcccggtttatggggtctgctttattccagttgtctctttgatagtttctgccctgcatgggcacaccatacttttgggagagttggaaatatgtatcgcgcacccgggcaccttccttgcccctgatctggttcaaagttaaatctggagaaagctcatcctgaaaccttaactggtacatggcgcgtacaacccgtagatgcaaaaccgggtctgcccagtactttgcctgtttcataagattgacagcgctgcgggttgtacctgtgcctgcggcatagaacctgacgccatgttctcccacccaggctacgagacagccacaggcagccagtgaaagtattgccgcatgtgtgatggttatgcccggtcccagcatcagcatagccaagccggcacaaggaaccggggtttcacccagagcgtcgtgaatggcgatggcttgcccgttctggtcaattttggcatgctccacatagagatagctaagccggtctctgatccggggaatagagtgcaggtctttatccatcattcctgattggcagaactgacagcaggccaaagccgaaacttttcgcttttccaatgccgctgctaagcgtttccaggaacagtttcgggtcatccacctcgagaactccctccaggagagccgcacggaagcgcagaggattgtatgtgtgttcacgccagtagccctgcccctgttcctttactttgacattttttggttctggcttggagccataaacccaacccagttgaagaagctcacagcgctgaagggtgaagcccagctttgggcttttggcagccagccagtcggcaagggcctgatccggggtggaagaagcatcccaggtaagagaaacccttttgtgcaggattttgccagtttctatggtttgaccgtcctgttgcaccatttcaggaatatgacggcgtacgctggcgtttacccgcagcctgaaccgcagcagttgtcccgctttaaactctggattatactcctttgtttccggcggcgcggccaggaaatcaagcgcgttttggaagcaataatcccaatccggctcaagaacggactggacgataataatcgcccttttatcgtttccgtcgatgttgttatcgacccggaaaaggaagggagttttttggaagtcgtttggcgaaaagggcttcaggaaatgcggatcctgctcccggcgtaaacctgaaggaaacgccatggagaggcggcggtggacgttatagacattgtccagccactttctgccggggcgggggcggtctggattgcctccagtatcgatcaatagcctggacaagtagatcatccgtcttcctcctctggtttcattttgcggaaacgctgcccgcgcgaacggaactcgactatttctttgcgctttgacaaaatacgctcccgccagatggggtcgcaggggtcgatgcgatcggtggtcatgccggaaccgtattccagcatggtgcaggcgtcgtggcagaggcggcacagcgcccgcagatcttccggtacttccttgcctcccgccctgcggtaatccacgtgttgaactgtcgtggcaggagctttgcacaccatgcacgcggcatgatccatcacaagccgctccgccctgaccttcttatactcggaattgctataatccgcccgggttcctttgggcctccaaacgttggttccggtttccctgctcacttgcacatcctctcccacaaacagctcacgcctgatcacgaagcgcggcaaatgtctgggcggctgaaaagaaaccggcagatcgtaatgaatctctgcgtcatcaggtgcatgttctccgtcacggctgggaatccagtccatgacgcaaggcagtgtttgcggcaggggttcattgtgccagcgcttttgcaggggaaccgcggacagcgcctcctccaaagtgttgtaaaagcccggaggatgctcgcctacgggacgtgaagggggacaggatttgcgccccagataaatagcccagaccggcttggccagagcggtggagagcttttccacaagttccggctcaccttgcaaggcgaccagaaaactggcgtcggcaagatattcgcggcgtgagagcaaagtctctgccctggtttgtattttgtttggtgtcaaggtctcagccagggccgctccaaccatggaaggtttcttgggtgccttcagctctgccatgcgcattctttgtcccgcgcccacagtgtggaaatcccaccagcgtatgccggggcggtctatccgcacgcccatgcgcaggttggcaagttttgggagccatgaatcagcagcctccgcgcgcccaattcccattgccgcgcagagcagtcccaggacaccagattttgtcggagcgtcggcagtcctgcgcaaagcaaacttagcctcgttgctgccccaggactgcaaagccccctccaagcgcaagaataaggtattgggtggagcactcatgtcacccgccaacataagccttgcttttccgaacttcttcccactcgaagctgccaatataatccaacacggcgcttacaagctcattgaggttgccaatgctcctggaggccagtttgggatgctctttgccaagggaatagcgattgtttggagaaaaccagaagctgataactggggattgctcatcataatagccaagcctgatgtcgttcacgtagttggaaagctggccgatgctttgctccaccaggtccgaatccttgaccagggaaactggcctgacgaatgcgttggcgtagctaataggggaatttttgaactcgacaagtatgccatctggcaagttatgagcggcgaagctgttctgtttgccactggggttggttttggcagcggcgaggagaaaggcacccacggtgtgggctgccagatgagtgtctcctttcaggttcttgaccaattgctcccaatcaatggagaagtatttgtagaaacaggctgaggcaaacatggattcgccaatatgacccgctccggcgtcttcaccaggaacatcatcggccgctacaaagtagtcgatctccggcctggcaatgtgggtggaaagcgcatgtgcaacctgcaaagcgcattccacgccagtgtttttaagctctttggtctccaacatcctgccgcaaagtgctatatcaggagaatggacgcagtttgtaagtagttccttaaacccaagcagtttttcactttcaccgagattggagttggaaagcaggacggccatttggcgtagggcatcataggtggtaaaaatcagcatatccgacgtatcagccgcctgctgctcttcctgagcttcatcggtttccgcgggtatctgttcggacttttttccagctttcttggaagatttggttttaactccacaggcttccaggaactttgcaaccagcttcttatctttgttttccagcatttcctcaagtttctctgccagacgccttgttcggatacctcctctaaggtctgcgaactccggggcaaaacggatgctgcgcttgatgcactggctggagatgcgcgaacgtaatactccaccgaaataacaggtcttgggggcgcccaagtcgtcccggttaagatttgccgggctgtgattctgaatcatatgaatttcaatcaacatctgaatcctccttgttgatcttgtatgctttagtaaatgaatccgaccattctcttttgacagtctcctgctcccaaaatgacagaacatctgtcagatctacccagtcaaagtagacctgctggtgctttcgcaaaatacccatgatgaccaacagcggttcttccatatgcataatgtcaagcgatgcaagttgatcaaaacgtgccagtacacggggtaattccttttttggtccaagtttccggcaaatgcttcccataagtatgggcaaagtggcttcctcgcgctgttcaaagcggaattcagcaaaaagtttggcgatcaaccaagccacttcacgcttgggggcgcgttgattcttttgccgcaaaggccaccagagggctgtaaaaaggtcaaatccgggaagctcttcatcaagccgggctcccctgagttttctaagaatgcccaaatcgccttctttgaggttctccaggcttgtaatgaagtcaactgttcctctattcattttggtccccctctgcgggttttgttttggattctggtataattggccagggcttgcgggaaatgaatttacctctcttgagcctggcgtccactgtttgagccggctccaaagagcacgcaacctttgtgagcagttctctgtattcagcatcggcatcctgccaggaatagcccctgttctcagtcattttacccgcattgatggcaattctgctttcggcgtgggggataatgtcagcaatctggggtgtgcccactgactttttgaaatcacctctgagagatatcttgcgcatgatattaagggcagtagccctgtttgccaattgagccagcaactcatcatttgtatcagttccctcaaactcgatgatcttgtcccagatgtctatgctttttgctttatcactggcaaatccaaccaaccagagttttccttttctggagtttccttccgcgcgcaaatagctgaacagcggactataccaatcccggtccgcgaaagtgtatctatcattggacatcagtttgattttggactggaggctttttttcagatcggtgtaaacaccatgagggtctttccactcaaggccttccggtactggctccacttctatgctgcaggaatagacgagagcttcggagggtaagccgcaggaactacatgctgcctgacctgggacgggatcatgcagatgcaccttgcgcggcagccaggtcattccggcaagtaagcccacttccttgctttctttttgaaaagaacccaaccatgccggaatccccatattatcccagggttgccaattatgagccagcatgccagcgaggtcatttgcatgccagagcaggtaaaatggaggagtgttgttgattcccgcacctatccctctgccaccgacagtggtaaagacaggtaatctcagcagtcccttgatgcagcaagcttcgcagagcccatcgatatagtcggtgacatgattgaaatggcatagattatgagctgttggtatctcatgaataaggtcggtaatggctctgatcctggaacttggattgtcttggtaaaaccgggggccatccccaaagagctcgaaatactccttgttttcctccagccagggtatccaggagaccggaagcggcttatcaggttcaggggcctcgttggtgttagcgaaacaccagtagccaagagcaagcaggaatctgaagacagcaaacctgtccatggggttgctgtatgccagttgcagattgtgtgcatctttaagagtctgcactaaagatattctatctggtttgcccgaaagatagatcacatttacccaattatcacaaagaagattgtacataatatgctccatttgctcaatggaaaccttctattatgaataaagatcattgtcaagatatttgctttgagtgattattagggcgggaataatcaaattagggaggtctccctatataaacccgccaccgaaaacctcaaaccccgtcactctgtcgatttgcccggacattaacaatgaatcattcagcatggacggcattatgcctgacaaaatgacctggaagcattgttgtctcgacaagaccctgagtcaatcgtgacgggctcaacaattctcttgacgtaattaaacagcctgtctatgaaagccaaccaaaggagtttattatgaaaaacgctttagcagtattgtttttactttctttactgggccagatcatggccctgaccgtctattcttcagatgccggcggctattggagcgaccccgcggcctgggctggcggaagggtgcccaactccggggatgatgtagttatcaacagcaccgtttacgcggacaccacgggttctccccatcagtgcgccaacctgacggtcagtggtaccggatggttgttgaacccggggggtaactcccaaaccgaggtcatagtcaatggcagcctgacaaatcacggcacaaccaccagctatcgttggggctactatccgggaacccttacggtcacggtggcgaacgccattaccaattctggctccctgacaccctggcatctgaacctgagcgggacgaacgcacagcatctgagcaattcagggactttctgcccgaaattcttagaggatctttatcccggcagccccttggtattggatacggatctggtggtctcgtcaggcaccagcatcaggatgaacaacgcctcccttgtgctgaacggcagttccgtccaccatataatctgctatggatatggtggcatgacgtttctgcaggacgcccagatcgtgggcggcaacggagccagcatcacttgccacgacggtttcttcctgaagaattcagcggcggacgagatcgtattgcagggtatggtggaaatcgcaggcaacctgaatgtcggacacctgatcaacaacggcgaggtctataataaaatagaccaaataggatacctgagcgtcatggagcggctggacaaccatggcacgatccggaaccatacccatggagcacgtttagaacttaccctttacggcggcatctacaattacgggacgctcaacaaccacctgacccacctggcaggatcgcaaatccaccacctctggcagagcacggacgctccggcgatcacctgcaccaactttacttccagttccacagggcccgcccgattgatttccaacctcaggttcagcggcaccaccatcgatttcagcggcaaccagatcaatctctacaatgccgcggatgaatgtttcacgctcaaccagtccggcggaagcatccggaacgcggccatctcgggcggagcaagcggcgccctgaatctgaacagtgtctacctggaaaacgtcagtgccgaccatataatcacttacggcgagttcgcactgatagggaccgtcacggtgggaacactcatcaataacgccaccctgttcaattatatgaactattacccgaccttcagcgttacccagaagttggaaaactatggcacgatccggagccatacccacggaggatatcttgaaacccagatccgcggcgacctctataattacgggacgatcggcgttcgccggctactggtgaacggcacaaccgatcaatatgtgcgcaacgcgggaaccatcaacaccgaacagggctgccaactggtctccgaactgggcccggcgcaatggtatttcaatggcagcctcgccaacgccaatctggtgaccaaccaaactgtcaacccataccaaatcggcatctggcggccatatctggacggtgtctggggcaggcagatcatctttggcgagggttcggctttgacctcgccggtaatagtttccttcacaaagggagtttcagccctgaacctgacgtggacagaagtgcccaacgccgtattttaccgcgtttattcggctccggctcccaccgggccctttaccgtgctgacatccgccgtccacgaccccaccgccggcgacggcctggtcagttgtgaaatccaggcgggcaactcgttcaggttctatcgggtaagcgctctgaactgaggcggaaacgccttttgaacccatttgcgggaaagaaccgccgtgtgtaatgcgcggcggttctttagttatcggacttggaagggcggctgcccgttcatttatctatatcattgtaatccgttgtttctgaaagactggatcacgggtcaagtcaccccaccaaaccgctgcgcgctttggcggggaccccgacagcccgtgatgacacgctttttggtctgatagtggtttgttgcggggctgggtggttgcttctaaaaggctggatcacggctcataccaattcgctttcatcaagctgttttatgctatttgtgatctgacattctcttgtgaaatccgtgtaaaggtgaaatggtggaaaggagccccagatagactctcgtggtgccgtgttgattgtggacgcagcccaaaacaagccccaccaaaccccaaaaccgtgtcatcacgggcaagcgcatgcttgacccgtgatccagtcttttaaaataaccagccagtctggaaacaaccggcatcaattccttgacaaccgcataaataaacctgtaccttccgcaatatccttcatagcgccatccttcactgccacaggaggttaagccatcttccttaggtcatccttataaattataaggatgacctaaggaagactcacgccaaaacgacggatgcaaatgagagccacccgcgcgcgaggggaaatggaggacagccagctcatggccgcgcaattatgggcaagtatatttatatacttgccctgggttccgcttcccgcctggcattaaggggtcgtagcacctatatatatggggggattgttggtggaaaggtgttttgaggtggaaaggtggaaaggtgaaatggtggctgtttttttataaccttacgcggatgttccttaaaagactggatcacgggtcaagcccgtgatgacacggtttttgggtctgtcgtggtctgttttggggtttggtggttgttccgaaaagactggatcacgggtcaagcccgtgatgacacgcttgttggtctggtatgttttgtttcggggttgggtggttgttccgaaaagactggatcccgggtcgctgcccgggatgacacggtttttttgtctgcgatggtctgtttcggggttgggtggttgtttctaaaagactggatcacgggtaagccaccccagagggggccccgacttcccgtgatgacacggtgtatagcttggtgggacttgttacgggggaaccttttcaccattccacctttccacttctgataattcgtgttaatttgtgtaatttgtggatattttaaaagactggatcacggctcgcaggccgtgatgacacgttttttggtcagttgtgctttgtttctgggctgccgaagtctgttcggcagaggcaacggagttgcctgtttggaagagacctccggtctctgtggcaaacggactttgccacccctgggcactggctaccgtctgccagaattctctttgcttgacagatttacgcttttcacatatattattttacatgggctggtatccagcccgacaaggaaagaaacatgaaagaactgataataaaagctattagcggccgcgagccgcaagactttttgggagaagatagatgagcacaccccgcggtgaacgcgtcaacatcaccctgttgggtaaccgcaacgccggaaaatcgtccttgatcaacgccctggcaggacaggagatcgccatcgtttccagcaccccgggcaccaccacagacccggtggacaaacgctatgaactgctgcccctgggcccggtgaccttctttgacaccgccggactggacgacagcggcgaactgggcgaaaaacgggtgctcgccacctataagatactttaccgcacggacatagccgtgtttgtgaacgatggccgccccttcgcggagagcgagctgtcctccctgaagcgcatccgcgagatgaagataccgcttttaatggtctttaaccacagggatctgcgcgagcctgcccccgccaatatcgcctggtgcgaggaacggggcctgccctgggtctccgtctccgccctcaagggggaaaacatcgacgccgccaaggaactgctgatcaagctggcgcccgcccatctgctggaggaacgccccctggcgggtgacctggtgaaggccggggacagggtgctgctggtgactcccatcgacctcgccgcgcccaagggacgcctgatcctgccgcaggtgcaggtgattcgcgaactgctggatcacgacgcggtggtgacggtggtgaaagagcgggaactggcctatgccctgcaaaccctgaaggaaccgcctgatctggtgatcacggattcgcaggtggtgctgaaggtggtgaatgacctgccccccgaggtgaagatgaccaccttttccatcctctttgcccgctacaagggcgatctggacgtcctggcggaaggggtgaggcagatcgacaagctgcgcgacggcgacaagatcctgatcgccgaagcctgttcccaccacgtgcaggcggacgacatcgggcgggtgaagattccgcgctggctgagccagttcacgggcaaggaactggagtatgaagtgtacgcgggacacgacttcccgcccaatctggaggacttcgcgctggtgatccactgcggggcttgcatgctcaaccagatggagatgagccgccgcatcgtggaagcccagcggcgcggagtgccgatcaccaattacgggctggctatttccaaggttcagggagtgtttgagcgggcggtcgcgcctctgtatccgcaaggatagggtgccgttcgagccgagtccacttttttccattctgccagtggaggcggccacgattccggcttgacaaatccgccgccatctggcatagtatcaaaacaaagcttagttcagggaggttaccatgtttcaacaacaaacgcccaaacctgtcgtgattcagtttcccaagctcaggatcaaagccctgcctgccatagtgctggccattctgctgctgggttttatgctttactttgtgcttccggtgttgcatatccgttttttggactggatcgtccccctgatgatctgcctggctccgctgctggcaatccggcgcctgcgcaagatactctatgtggtctatccccttctggcgctgtggctgatcctggcgcccttcttctcttccggcatcttcaattccggcagctaccgccgcatgatcggcgaggtggaaaagaccgagttttccgaccttgtggcgccggtcaatctggatcaggtgccgatcctggattccgctttcgccaaggatttggccgccaagaagctgggcgaggactttgccctcggcagccgggtggtgctcggcaaccccaccatccagatggtggatggcaagctcttctgggtctgccccctgctgcacagcggcttctggaagtggatcaccaacacaagcaaaggcaccccgggctacatcaaggtctcggccaccaatccgcaggatatcacctttgtgcgcgagctgaaaggcaaacccatccaaatccgctatcagagcaatgccttcttcgggcaagacctctaccgccatctctggtggaacggcttcgcgggcatcggcctggcaggcgatacctttgaactggacgacaatggcgaaccctactggacgataaccacctacacccacaagatcggcgtgaacgccccggaagccaccggactcgccatcgtgcatgccggcacgggtgagatcaaatactttcccctcaaaaaaagcggcggcatctatgacgacagcaagattcccgcctgggttgaccgcatccagccttcctactttgtgcttccccagctttcctggtggggcaaatatgtccacggcttctggaacagcgtgttcggcaagcgcgacctgctgcgggtgacgcccggctacaacgtgatctatggccgcgatcagcgcagctatttctactccggcctcaccagcgtgggctcggacgaggggacggtgggctttgcgctcacggacacccgcaacaaaagcagccacctctatctggtctccggcgccaccgagactgccgccatgcgttccgccgaaggcaaggtgcaaaactttaaatactatgccaccttccccatcctggtgaacatgaacggcaagccgacctattttatgaccctcaaggacagcgccggactgatcaagatgttcagcttcgtttcagtgcgtgacttctccctggtgggagtgggtgaaagcgtgcgcagcgcgcgcgacagctatcagatggccctggccggcagccggacggggatatcgccggaggcagcggacaagcaggccaccctcacaggctccatcgcccgctttggctctgataccacggacgggcgcacctactactatctcaccctggcggaagcgccggataaaatctttattgcctccagcaacctgagcagccgtctgcccatcacccgcgcgggcgaccaggcgcgcgtcagctatctggaaagcgcggacgcggagatcaccctcaccgccttcgccaatctgagcctgggggataagtaagcagaaaggagcttagtcaagccaggaaaagcaggtagccagatatgaaccgcatggtgcccagctacatcctgcagcagtatgagcaaaacatcctgcaagggcagatcaccggctatattctgcgcttttgcaccattgccacttacaatatcaaaggaataaggctcaagcagcggcggcaggtgattgacagtatggaagccaccgccaccgaagcctatgaaaggatgctgagcatgatcaggcactcaggcggactgctcttccagtatgagggaaactgcatccacgccctgttgccggaaagcactccggtgcagatcgcggcgctgctggcacgcatcaatcacaccatcagcgcgatcaacagctacgccagcccccatcatggaatgccggatgtaatccgcctggctgtgggtttcggcacactgtcctggcgaatctttgagaacccactgcaatttgaatatgtgttctggtctccccaactggatgtcctgcgtgaaaaccccggccggcccaaccaaccctattactctccccaagccctgagcagactgggctgggggtctgatgtccggcctggaaagcacgcagtgcatccgccctttccccagttgccggatacgccggaaaggaagcgcctgggcaagcaacacggccaccacttcattcattcccgctttcacagactcaatcccgcacctgatgtccggcacagcgtttgctgctgcctcagcctggacgagcctccggacggccccctggagccaaccatccaggcattggaactgctggcggtgatctacgacgcctttttagcagccatctatgtgcggaataaacgcctgtatgccatcctgctcttcgattttccccacaacaaggtcaataaaatgcagcgcgcctgccgcctggctttggaagccgtcacgcgccacaaagcccgcgccgcctgctgcaccggctatatcttctccatggtagctggcaaagacctgtggaaggcaaccttcttcccgggcgaagccatcacccgcgcccagaagctcctggagctcgcccgtcccggcgaagccctcgccgaccacaacctgcgcaaccaacagcacaactccttcatcttcacccctctcaaaagggagcaagccgcctcaagagctactccccgagcctaccgccttggcatgctgccgggacaattgattacctgccaaccgctttgcatgatcggcagggagaaggagaccgctctgctgcataggaagatacgcgaaggtttggcagcctcctcgcctcaggcaatggtggtgcatggagcggcgggagtgggcaagagcagattggcacgcgaagctttgcgcgcctttgaaaccccgcggcagcaggtgtatctgctggcttgcaggcaggattcccccctccctctggacatcgtaacccagttgctgcgtgccagtctggggcttttggaggacgaggctcccgctcaggcggtgcagcgtttccgcgaagcgtggaacaagcgcaccagaggctccaggctggggcaggaatgcgaagccgcccttgcctcgctgctgaacctttcctgggatggctcgccctggcgcgggatcgcccccgaagccaggctgccccgtcagcagcaggcgtggctggactatctgcgctggctgtgctccaaatccccgctgcttatctttatcgacgatatccaatggctcgataccctgagccaccaattcctggaactgctttggcagcacggcgtgcgcccgttctttctgctggctaccgcgcggactgaaaacaacattctgcccgcggagcttagcctcggaaaagagggactggaaagcctccccctgggttccctcaactccagcgccagccgcaagctctacctcaatctgctgtgccttccccgcctgccccgcgaggctttttccgccttccacgcctgcgcgggcggcaatcctttcaatgccgaacaactcgccgcctatctgctggaaaacaagctgctcagcccccacggcgaaatagcgcaagaaggcttggaagcggcggcgggaggcatcgacgaggtgatttcccggcgcattgcacggctctccaaaaaggttcaggaaagcgtccgcggcgccagtgtgctgggcttccgcttcaatgttgtcctcctctcccacatgctcgaaggcaaccccatccagcaactgggcaaggcggggggacggaaaatctggcaggatgccgacgaactcttttacatcttttcccacagcctgttacagaaggcggtctatgccagcatccgcgaaaaggagcttaaaaagctgcacctggcggccgccgaagcaatggaaaccgtctttgaacaggctctcaaagagcattccgcggagatcgcccgccactacaaggctgcaggggaactcaaaaaagccgccaattactatgaaatggcgtccgattacttctgggaccgtatgctgatggtaaagattgaggaatgtatgctgctggcggcggagttgtcctgccaggcatggggcggggacagcccggaacacatcgaacgactcttccatctggccctgctctatcactatatgcaccgcatggacgatgccgagccgctctatctgaaggtggtggacgccagaacccggcagctcgggccacgcagcccccgcctctccccctatctgaataacctgggacgtttttacaaagacaccggccgctacccgcaggctgaaaaactgctgcgccgctcgctgaatatcgaaaaacgccccggacccaattccaatgtggcagaccgcatgaacaacctggcttcgctttacagtctgatggacaggccggacaaggctgaggagatgctccgtgccgcgctggaaatgatggaaagcctcttcccggagggacactggttcacggcggtctgcgccggaaatctgggcagcgtgctgctgcgccagggacgcctggaagaagcggaacccctgctcaaacaggcaatagacggccataccttccactttggcgataaccattcccagacagccaattacctcttttcgctgggcaggctgcgcgccaggcagggcgacgcaaaaaccgcccgggaactgctgacccgggtgctgagcatctgggaaaacaccttcggcaaagactatccccgctgccaaaacgtccgcgaggaactggacaagctttcatgacacgactgctgtctgcccgctgaacaggcaggaaacaagggtggctcctttgggttggatttacacggagtggtctataaatggtcgtggaaaggtggaaaggtggaaaggtggaaaggtggaaaggtggaatggtggaatggtggaaaggttccccaaaaaacaagtccaccaagttatattctgtgtcatcccgggcaagcgcacgcttgacccgggatccagtcttttagaaacacccgtggaaaggtggaaatggcggttcagcgaccgccagtacaaagtagcggcgcttgccatagcgccgtctgggattgccttccatggggggggtggcaaagtccgtttgccacagagaccggaggtctcttccaaacaggcaactccgttgcctctgccgaacagacttcggcagcccaatcccgtgtcaatctgcgtgaacctcttgacacgtgatccagtcttttcaaggctcaaacaagcacacagtcctgaaacaacgccatccaagctacatgccgcgccatcccggcctgcgacccgtgatccagtcttttaaagccatatcataacacacagtcctgaaacaacgccatccaagctacatgccgcgtcatcccggcctgtcggggtccccgccaaagcgcgtagcggtttggtggggtgacttgagccgggatccagtcttttggaaacaatcacccgaccccgaaacaaactaccacaaagccctaaagctgcgtcatcacgggcttgacccgtgatccagtcttttgaagaccgtttgaagtctaagccagcctctggtttggcgaaatccatacaaccttccttgccggcttaaactccaaactcagccagcatggagttcaaggagccttgacaggcttcaaatctccaccagacgctttggctctcttggacttcatgcggaagaagacaggcgattgtgataatgcaaaccaaaataagtctttacgagctcgtagcacctatataatatgggggcctcatttgcatccggcactctggagtgggtattccttaggtcaaccttataatttataaggatgacctaaggatgatggcacaaaatccagtcgcagcaaaggagggcggtatgaatggtattgcggaatgtattgatactttatgcggttagcaaggaattgatatctgtattttttgtattgggtgcttgattgggctttaaaagactggatcacgggtcaagcccgtgatgacgcagtatattgtctggtatggtttgttttgtggctgagtgcttgtttccaaaagactggatcccgggtcagacaccccagaggggcccccgtttgcccgggatgacgcggagggtagtctgttggattttttgcttcctttccaccatttcacctttccactgccttttcaaaaagactggatcacgggtcaagcccgtgatgacgcagtatattgtctggcatggtttgttttgtggctgagtgcttgtttccaaaagactggatcctgggtcaggtcaccccaccaaaccgctacgcgctttggcggggaccccgacaggccgtgatgacgcagctttagggctttgtggtagtttgtttcggggtcgggtgggacttgttacgggggaaccttaccacctttccacctttccacctttccacctcaaaacacctttccacggctctttcagatgagcagaaaaaaccccggagccttgcggtcccggggcttggttttataggttagatcccgatgaattacttcatcatgatcatctttttggtgctgctatatttgccagcgctcatcttgaagaagtagacgccgctggacacagcgttaccggcattgtcacggccgttccacacaatgttgtgcttaccggcgttcatgttgccgttcacgagggttttcaccagttggcctttcacgttgtagatatcgatcttcacgagacctttgtctttgacgctgaagctgatggtggtttccgggttgaaggggttcgggtagtttccgtgcagctctgtggccacgacaggaacgcccggatcatcgatcgcggtcctacccgacacggtgacgtcgtccacaaggaagatgaaggcatcgcttgacacacaatggataccaatgcgggtcacgccagcgggaatctggtaggtgaattcggtccaatcaacaggggcctggatgtagttggtgccgctgatgatggtgaagtcgctgggatttgtgctacccgtggaggttcccactttgaagcgctcgaggccatactcggaggtataggagcgtgcccagaacttgatctcgtcaggattggtgagttcgggtgtgatcatccagtcgttgttcggcccgtttcctccattggacggcatgaccgccgcaaaactggcagccatcttgattccgccatgggcggtaagctcggtaagcggtggagtggtggcactgggcacgaagatcatataagccatgggcgagtaggcgtttggccaagatgtcgtgttcataccgtaggtgctgctctgatccacgtcaaccagagtccagggcgcaaattccagcgcgaagttttcataggtttcaaaaccgtcttcgaatatgatcaggctttgagccagctggaagttcaaggtggtggtctggccggttaccacgataattccgggctgagtgcttggagaatagccgggggcggacgcggtcacgttgtgggtgcccgcggaaacctgcatgctgtaggctccgctggcgttggtggtggcagatgcatcttcgcaagagacggtggctcccatgatgggggcgttggccatatcgcggacgataccggcgactgttccgatctcggtacgtttctgaacagcattggagaaggccggcagggattgcgcgtcgccggtgtagatggctttcacagcccatttgtaccagccgtcaggcacgctgccccatccgttatcctgccaggcagtcgcgctgatgttaccggtggtgagctgtgtccaggcagattcgttgctttcctgcccttgcagcaagcgccatactctgtagccgaggaagacgcggtcatcgcgggtctcagttatttcgctggcagcttttttggctgaggtcaggccggatgaatacatcatgtcgcggctgaccgggagttttgatgtcacgttgacaggcgcgcggtgctcgtttccggacgcgctcacgcgggtcagggtgctggcggggaagcgcagggtttttgtggggttgccaacggctacatcatcgaggaaccagacataccagaggccctgtccgtcgccgtccacagcctgccaggcaatcttgatttcctggccggcatagctgttcagatcgaccacgatgggggtgtcgtagtagttccagccgcctgtgaggttggtggcgtcccagatgctggtccaactgcttccgttgttcgtggagacctttacatggtagtggtcaccgttggtgcttcccagatagacgtagctccagaaggtgagggaagcggcgggagggcagatgaactgaggggtcatgagccattcatcctgatggccataatcccaccagagcgcggcttggtaagaaccggaatgaggcggtacctcaggagagagggcgatagttccaacctggcaccaggtgggaagcacgccggttgttccgccagcaccggtattggtgatggtttgggtccagtcagtgggcgggaaggtgtcaccttcgaatccttcggagatgtcggcgccactaccgggctccatccaggtgatgttgaccaggttgttgtttacttgctcggccaccacaccgcccggaggcagggtgatctctgtgagcacgaagttctgggtggtggtttgcagtcctgtgatgctcacaccggtctgggaagcagcctgatagccggttttcacgcaggtgacggtgtaaactccctgatagacgccgaaggaatagtgtccattggcgtcggaggtgccgctgtattcgccggcggtgatggtggctcccgcgatcgggacgttggtgccgaattcggtcacggtaccggccagggtgcccatcatgcctttgtggatttcaccggagaaggcggcgggggacagcacgttgttggtgtaaatagccttgactgcatatttgtaaacgccggaaggctgcggagcccaggtgttgtcagtgtagttggtggtggttgaggagttgatggtggtcaggttagtccagagggactcgttgtcctggttcgccgccagtaagcggtaaaccttgtatccaccgagtacgcggtcgtttccgttggcttcgctcttcatggccagcggggtgagttcgggagccctggtgggggcggagaagcccacgtagccgcggatgttccagttgtagttaagggacggggccaggtcataaagggttgaccaggcgccggagttgtagatcatgttgccgaagccgttggtggcagggccggcgtcacagccagcgggatacgtgcccgcggtatgggaaacgttgtagccaaaccagagttcctcggtgcctgaaataagcacggggttgtccaggacaacggtctggaacacgtcaacggtcggcactgtgaagggctggtcaacaacctgggtcgcgggagcggtggcggtgccgccggtccagacgcgcagggagtaggttcccatatcgccggggaagagggatatggcgtggaggctcctgccggcatagtcggtaagagcggagggcgggaaacgaatggcgacactgaattcaccgccggaggtgaggccgatgctgtcttcgttttcgccgctgtcgtagtaaatccattcgccaactgcgttgggatccggggccatccaggtgagggctacgttggaatagtccgcagcttcagtggcaaccacctgatagggcgggaaggccagttcgttcacgatgatgtcgcccatgttcaggttggtagtgccaaccacggcttggccggtggcagcctggtaaccgacggcttgggcggtgtaatcgtaagtttggctggcatatacgccggtgatggtgaattgtccgttggcgttggtggtagcctggtagggctcgtaaccggtgagggtgatggtggcgtcagccaggccaactgtgggttggtcgctgcccacgatgcggccggtcacggtgacctgaggcagttgggtgagcacgaagtcctgggtgacggtctcatcttcgatgatggtaacgttgtgggaaacgacgttgtagccgtgtttggtggccgtgactgtctgcggccccatcgccacgtaggggaagttgtaaacgccgttggcgtcggtgagggtggtgaggggggttccggtgatggaaaccgtcgcgccgggcatgacaacgttgtttgcgtcacgcactgtaccggtgagcgcgcccatgtcgtccacgatcaggaagaaagtggtcatggggaacatcgctgttggagaggttccggtaggcggagcggcaggatcgtagtcattgctatccgactggaccttcagagaacgggctgcaagggtcccagtctgggtgcggaagttatcgctcgaactgtgccagtcggtatccatggggcgttccaccagcaacaccaggttaccgcccgcataggtatagggggtggtaaaggtgatgttgatgttgttcggaccgttgggataatcgacgttgccggcgaacaccgcgttaagctgggttgaaggtatccagccacccgacagatcgggttgtgtggtctcgcccatccaaatattggtaggcatgccgggcaggttggtgacgaagttattgtagaactggatgccagttatcaggccgccaatgttgagctcggagcccagataaatagcctcgaacagggagttcttccagtacatgtccacgggcatgcggccggtctggttaccttcgccgatggtaatggccacgactcccgctggctgcacggctatgctcataggtgcagtttggttgttagtggcgatggcgtcgtcagcaagcaccacttcagcccaaatctgcatcgcgccggtttcggccggagtccaggtgaggccgatgtcgatggtctgctgaggagcgatggtggtgccgggaactgaggcgagttccacgtttccggtgcccatcaacttcacagtgtaggtgttttcggtgtttgatccgttgtttttcacagccaccgtgtaggtggagggatcgcccacggagggagtgctgttaccggagatgctcagcaagccaaggtcgtgctggaggttcgccgcggtcactgctgccgcccatccgctgcgtgggacagaggcgtcggaagtgaagacgaaggtcacggagttggagccaatgatctcttcaggcagagtagtgccggtgtagccggcggcgggtccgatctgcggggcggaggtatccggcccgttgtagatcttcaggaaatcccagccgttttccgtattgaattctgtgaacaacacgtggatgatcgaggtggggttggcggccgtgaaagtgaaggtgtagttctctgagttttgataattgccgtcggggccgccggaatcgtagaaggaataggttgtcccatccgtcaccgactgtgtgccgttggtcatggtgatcaccgggccacctgtcgtgaagctccaaaccgggcagtttgtcgcgtcaccaatggcgttaaagggtactatctgccaatagtaggtggtggtgaggcccagggtgggagcgtagctgttttcagtggtgttttggacgaaggggggtgggttggttgtgccaaaatgcaccttgtaacctgcgggcgcgccgcctccggaagcccagttaagggtggcggcggtcatcacgttcacggctccgtcaagcggagagacaatctgcgccgggttgggcggattggtcacttccagggcgttcatgttgaacctgatgttggagcggttggtgctgacggtgccggtggttgcggaactggcatcgctactgtcgctttgatagcgcagggaactattgaaagctgtggtggagtaataaaccgaggcattctctgtgtaagttccaggaatgattgatgtgtagatatcgacaagaatgttcgaagtcccatcccagacgaagggggttgtgaaggtgtgtgtgttccagcctaccacgggcatgaattcagcctgtgtgtacacggtctggtagtccccagcctcaaatgtggtgctgagggtggtctgggaggtgtgtttaagccggatagtgtagttcggcatcggggaacaggtattcaggttttccacattaaaggcaattgaattaatgttacccggtccgccgccggcatcctcgatttccaaggccagtaccaggaactgctggcggaaatttttgtaccaagttccatagggggctggtggaccggttgtagtattggttgtggtcccactgcctatggtaacgttaacctgggcatagacattgctgatcacactgaagcccaggatcagcaacagcgcgaaaagaagggtttttttcataggatatctccttttcccattttttattttgggtttttccaattattgaccttagtttcgggagtccttaccggtggatattgcgtccaacccgagataggcacttatcccctaagtcgttatgtaatcactctatctatggactatcactactatgttacaccagtatattttggctctaaaatctaatgtccacattctataaatctgtcaagcataatgtttggataagttggtttaattctttttttcctgccttaccctgtcctgttttacgtatatattctcgcagcagcaaacggcatgccgtccatttcttcggttccaaggaaacaaggacgtttaccccaaagccagtggcagcaaaggacggggctcatccgcctggttaggggtcagtcgttttcgaacggttccaccaggatgcggccgcagctttcgcaaaagtttatctttttgcgcaactgcagttcgatacggatttgggggcggatcacgaaaccgcagcctccgcaggcgcccttgcggcaatagaccaccgccaggttgcctttgtttttgatcatgttgccatagagtttcacgatctgcaggggcagggtgcgggccatggtgttgcgttgggcgcgcagatcctcgatctgtccttccagcgagtcgatctggcggcgcagatcgccttcctgatcgcttttggctttttccgccttatccagttcctgtttggcttcgttcacccgcgccgtggcctggttttcggcatccatcatttccagttgcaggctttcctgttccgaaatcttgtccttgagataggctatctcgctgttgagtgccttgtattctttgttggtcttgatttcggagagttggttgccgtatttcttgatctgttcctgatgttgtttgatgtcgccttccagtgagcgttgttttttggccagttcggcgcgttcagtttcgcaggcaagcaaattcgcggttgcctggtccacatgctcgatgatctcgttaagctgctggggcagttcctgttgcaggacccgcagagcaccgatgcggtcatccagttgctgcatctgaaccagggtgcgcagttgttcttccatatttttactccttatcaaaaagcaggcttatatccaaagatttatatgagtgggtgagggctccgctggaaatatactgcactccggtgcgggcaagggagcggatgttggcagcggtgacgcctccggagatttccagttccactttggagccgaattttttcacgcagtctttgatctgggcgagccccatgttgtccagcatgacgcggtcaacgccggctttcacggcttcttccagctcttcaaggctggtgacttccacctcgatcttgtagctggtattgtggcgtttgacgcgtttgacggcctcggtgatgccgcggcaggcacggatgtggttttccttgagcatgaccatgtcgtagaggccgaagcggtggttgaaaccgccgcccacgcgcacggcgtatttttccagcccgcgcagcaggggtgtggtcttgcgggtgtccagcagtttggccttggtgcctttgaggtgttggacataagagtcggtgagggtggcgatgccgctcaggcgttgcaaaaagttgagcgcggtgcgttcgccctgcaggatgctggcggcttttccttccaggcgcatgatctcgttgccgggaaccacgcggtctccgtccttgcggtagagggtgaccttgaggccgcggtccacctgcagaaacacggctttcgccacttccaccccagccagcacgccttccgctttggcgatcatgtaggcgtgggtgttgaggggctccagttccaggtattgggtgctgatgtcgccgctgccgatatcctcggccagggcaagttttatgattttgtccagatccatgctatcctccggggtaaaaaaaaagcatctgcggatgtgcaaatgcttttatactgttcagggtattatgtttatcacttatcttcttgctttgtagacacatataattcattccttaccttattgaacaattatctggacagcacatatttgtcaattggaaatttgggtttggcgacccgcgttctctttcatttttccatgcccttttgggcatagcacctatatattatggggggatgtgcctcatttgcatcccactctccggcgtgggtcatcctggggtcaaccttataatttataaggatgacctaaggatgatggtctaagagactgtcgcagcgaaggatggcaaagttgcggctcacgcacgccccacagattctcatcgcccgttgatgactaattgaacgctgaccgattgccgggctgtctatcgcccggacatcaataggttgacgatgggacatcaagctatgaggcggtttcgcctgccttatcacgcatggccttcctttttcaaaaagactggatcccgggtcacgcggataattttagggctgccgaagtccgttcggcagaggcaacgtagttgcctgttaggaagagacctccggtctctgtggcaagcggactttgccacccctgggaactggatccctgttcacgcccgtgatgacacagtatatagactggaggacttgtttcaggggaacctttccaccattccacctttccacctttccactaatttttaccagatcggattttgttgacgaaaagcggggctaccgcagcttggtctcatgatgaagaattacagtatcctactcattctgtccctgctggcgttgggcacgaacgcctttgccgcagcggttggtaacgtttacccccttcccaatggatatcagacttgggaaagtttgcaaaaagagatgcaggcgctttccagcaagcaccccgatctggtgaccctgcgggtgatcggcttcagcggcacggaaaagctgcccatccacgccctctgcatcggcacgccggacgcccggcgcaaagtcctgatcatcgggcagcaccacggaagcgaggttttgggtgtggaaaccgccctggcatgggcaagagaactggcggtgaattacaagcactcgggcaagatcaagaaaatcctggcggagttcgagttcaccatcatccccaccctcaatccggaaggctaccgggtggtgaccagcgggcaatatcagttcaaacgcaagaacaatcaggaaacagacggcaggacaggtctggactggcggacggacggggttgacctcaaccgcaactatccggtgttttgggagcagggcgcggtggtgccgggctcgcacgagaatttcaaaggcagcgcgccgatgtccgaagcagaggtgaaggcgagcgtattattggcccaggaaaacaattatgagctggcaatcttcttccacagttccgccaccggagcctattccgaaaagatatttttgcccgccatcgacagctccgtccccagccagaaagagcgttacgactcgctgctgcgctttgcccaggcctatgccaaaaggacgcgcaaggcctttggcggcgggcactatgaggttgccacggggcccagttcaaaggaaggcaacgcgcgcaactactttttccacatccactacacgggcgcattcctggtggagatcggcggcatcaacccggacggaatctcggtgatccatcctccggacaagatgcgcaaatctatcacgggaatgcacgtgaaggcgctgcgcaaccagttttaccgcttcagccgcggcaagctgtaaagaccgtttagcggggcagcttttcccagatgccctgatggtattgccaaacgccgtccttgcgcagcagggtcaggctgcgcactgaattgatctgatctgccaccaccagggcctgccaggcggggctgacccggtaattggcgggtgcggcggcagcttcctcatagcccagccagaggaattccactccctccgcgttcagcttctccgccaggcgcaggctgttttcgcggtcaaagttgccgatcagcaggcagtcgcaatctcccgcttcagcaagtagggggcgcaattcggagtcttccggcagttcttcccatttgcggggaaactcgcgcagcaccaggtcaaggctaagctcgccctccactgtgagatgctgcaactggtaagctgtcctggcgtcggagacgcggtagcccgcctgaagatagtactctccccggggcaggtttgccgtggcggttccgcctccagtggcggtgaatttgtggttgagcgggtagagcagcccgttctgccagcgcgccagggcaaggttttgggggtcgatgtccagaggggcgccctgttcatccagagtgcgcacccgcagggtgaagctggaggcggaatccttcttcccgccgtcctcaaattcgcagagccggaggttgtaatagcgccactggtcgttcaccagcacatagatcaggtcggggatgcgggtgaattcggcggggatgccgttggcgcgcgccaggctgacagccaggatgcagtattggtagttgctcaggtatttgccgcggtgcgcctcttccaggggcaggaggccgcgcagggctttggcgggatcgatccggtgctttttcttcagccagcgcatggcgttgtgcagccgctccagatcgtttttccccgctttaacaaaggaagcgggatagaggctggggctggatggcttgccaaagggacggggcagctcttcataaaaaactgagggcgagagcagcgaagactgttcttccggattaagctgcccggcatcgaagcgctggaagttctgatagagcgccgcgaactgcgccgcgtctgcctgccagaggaacttgggatcgccctccagcagatggttcaaaaagtccgggccgggctggggatgcgtcttcagaaagccttcccaggcggcatggttgccgcggcaggcgctcagcaccttgccctgcagggtgtccgcgcaggcggctccccgctcggagaaggagcgatcctgcccgtcccacaaagctttggcttccttcacgcccagatcccactccggaggagcctgtttccaggtgaaggggttggagggatactccaaaaagatatcctggcggggcagggggccttcgttcaaaaccagatcgacatcaagctcgttttgttcggtggaagggacgggaaccagcgcctgacggccatccaggctggcgcagagatagaaggccccgcgaccggtgctgagcgtgaaagagccgtcctccgcggtgataaactccgccagcatgcgcagggaataccagttgtaaaccatcacgcgcaccggcaccttgcccaggggattgccctgcgcgtccagggttctgatcctgatggtgcgggcgcgttccccggcatagttgcgcaccgagttgataacgcagtcatagcggccgcggctcaggacttcgtcctgctctgaaggaagggagccgtcggcgaggatcagcaccgtcttgtcaatcatgccgctgaaccaggtctgatcgggatagtaggcggcatccatgtctccggtgtagtgccaggcgttgtccagccacacctccgcccaggcgtggttgttgtccgtatgtgcccaccagggggtgctggcagggcgggaaggcaggccaacggtgcgggcggctgccacgaagaggatttgcatttcctcgcagcgtcccaggatgctcctgcgggtgatgtccaggggcgattggtcacgcccggaggtctgttgaaacttgagtttgctcacgcaccattgggagaccttgcggtagagctcgagctcatcggcggagtcgcgcatgatctggcgcaggccgtcatccagcagcgcggcgcggtaagcctcgatgcgttcatcggaaaccgtctgatccgccacataggaaagaaagaattccgggctatgttcgcagccttgcccggcaagcagtttgactatctgccggtagttgctttccacatccgcgggagcggcgcattgcaggtttgcgtccgattcataggccagcagatatgccatcaccacatccgggtaccggttcagcaggcggcggtaggctttgccctgcccgtttcgcaggcgtttcaggttctctttggcaaggctatgcagttccttgtacagggatggattgccggctttggtgaaggcggcgggaagtccggcggcgctgaggctcaggacggcaaagatcaaggcgaagagcagagagattcgtttgcaacaagacatatcgcacctatccatatagtattggggagtcgcggggcaggtcagtcggccagtttgagcagtttcccctgacgcagggtgtcacccgctttcaaacgccagaaatagattccgggagcgagacagtttccggagttgtcgcgtccgtcccagttgagttcgtgcctgccggcgttcaggtcgagcgtggccagggagcgcaccttctgtccccgcaggttgtagatgttcaagtccaccctggctttggcgggcagttccaggcgcagactggtctggctgcggaagggattgggatagccgcggagggaggtttgcgccatcggtatctgtggctcgtccacttgggtgttgccatattccaatactccaaagcgatccaggatgaggcccagcatgtctttcagttcccactcgccgttttgcagggctgccaaagcaaaggaggaggcgatggtgctatgctccggcaccgcgtgcaggattccgatgctggcatccgcggaggcgatgctgtgggtgctgaagatggtctcggcggcgggaagggcgggcagcaaggcctgcgcggtggggttggactgggagttgtagtcccagatccagagttcgccgtcatgatagccctttacggcttcaatattggtgaacatattcagcggggcgttggcgccgaacttgctccagaaaggatcctggctattccaggccacatccccttccagatagagcttgccgccaccgttcagatagccaagcagcaacgagtaatccagggaatcgggatgcgggatatgggcggcattgccccagccgaagaggcaaaacacggcttcaaagcggttgatatagtcataatccgggatcagcttgtctgtatagaccacgttcagcccgccgatctggttcagcgcatccaccactctcaggccgccatgacgggagggttcatagaccaggatttcgcccaggggctggatctggctgccgctgtggccgatggcgggatcgccgtagtggaggtaggcgtaaacgttttgcaattcagggtagatgattcccccgccgtccaccgggtcgccaaagaggtaatattgggtgtggaggaggttggcccatgccagcgaggctcccgaggacagcccgttgcgggcgaagttttccaggtagtgcaggttataggagcttagccctccccagccgggattgcgccagccgatcttgtaccagccggtgcgggtggcggccaccgctgccacagccttcttttgcaacgcgtattccgctatgcactgctggttgctgtcgatcatgccgttgtagcaggatgccatgaagatgaccgtgccgtcgctgttgttcaggttgtcaaagctctgcctgtcaaccatacccatccactccatttcccaactgtccggcaagccgttggagttgtcgtcgttcatccacaccttgcgggaagaggagccggaagagccgtgcgcgctccagttcaccaacccgtagctttgggtgtcgagcaggtttcgcagtacatagtagtccaggggatgatcgcagggatgggagggcagccagccggtttgctcgtacagggtggtattctgaaaatctgccagggcggtggctttggcgtattccataaagtccgcgccatccgtctgcagatagatagtttccggttcgccgccgtagttaaggtaggcagcgggcagcagggcgctgcgcttccagggggcgtcactctgctcgtagaacacggtgcggttggcaacgtcatacacgtggacgggattattggatgagatgcgtcccacaaacagttccggggtatagtcgcaaaggtagtcatccacgccttcaaccggggaatactcgcccaggcggttgtctccgtccgtgtccacgatactgctgaggtcaccataatagaagtcggaagccactgtatcgccaccatccggctccggcgtcagatacatcaccggcacggtgtcgtgatcacccaccagcagcagataggtgaagggatggctgttatattgattgcaaaggtagttgcgcagcttgtccgccccgttggcgcccggggtggaggcgaggatcacggaaatatccgcgaaggaggtgaccaggccctggctctggcgaaagctgaccaacggggacagcacgtcatagagcgcgggagtggtgacgatcaggtagtcgtagtttttacctgccgggggctggtaccatttgtccagatcacggggattggcaaagaagtttgccttcaggttcgcgttggatttgcccagttctgccaggacaggcgggatgcggttgggcgcggaggcggattcgctccagttcagatcgagttccaacctgctgtaaccctcccaggagcttccattccagaccgcgggcagcacgcggaagcgggcgtagctcacgtcgccccagcgtcccttgcccagatagtgcagctgtcctgcctgggcgtcacgggcggggctgtccagcaggcggtctccacccaaaaaggccccgttgcgttccggggcgggcaggtctggggtctgcgctccgctccagttgtagctgaagctcagttcctttgccgcgggtggcagtatcacgtttatagtcttgtatggaagttgcggatatcccggggcgctgaggctgccccaaccctgcagttccatatccctggaggaggcgggcaggccgagatcgacgctcagggaaaggtttccgccccacagcagcaggggcagggccagtaacaagatggtgcaaagcttattcatcggattcctccgtgtgcctgatcctgaagggcatgccggcatcgtccgcggaacggcgccgggatttgaactcctgtttgttttggtatttgccgcggtttttcaggtttcgtttgtccccaaaggtctttttgccctggcggtcttgtgagtgttcgcgcgccgtggtcttgcggaagcgtttcttcttgtccttgctcatcttttccgtggcatactggatgatcaggcgcggcgcgctgtccttgtgttcaaagaggaactcctccacctcggtgggaaacagcctccaaagttccctcagaaaccagcccacgccctgatgcaccacgcgttccgaatcggacatcagggggcgcatatagtccagcagctctgccggaggcagttttccccgctgccagagcatggtcaccgcggacacccggcggctccatttgctggtcgaactccgccactccgcgaaatcctccatgttggctatctccagctccaaaaacacgggggtgatcttggtcgagatcaggtctgcgtgggcccagttggcaagggactcctcggtgaagcgtttgacgctctcatagacctcgcggtcgaagcgggggcggtgtttcttgagcagcatgatggcgagcgagccaaactcatattttcccgtggcaaagaagtgcctgcccagttccgcaagttcctgcacgctgggctcccattttgacaggacttcgtcgcgcagctgtttcaactcttcttcgctaatgccaaaggcgtcatagccttcggtgaaataatgggcatatttgttgaccagcgcgggtttttcgtggtcgaagaaaaacttttcgcagtggcaaaagatttccaactggcgttcattcatttccgtgacggcggtgagtgctatcatctcttgtttccttgtaggcataacttgcggggcatctgaatcgccccgcgcaatctattgatcctggccgtagccctttcccttgccggttaccagcacatgccagcggttaaacatctgccgcaggcgccagaccatcatcttgccggggttgagctgcgccagcatcttgtccaggaaaagctcccagttcgtggtctcgtggctgcggaagaaaccgcagtcgcgcattacatcaagcatatagttgcggattctgtcaagttcatttccatccaccgcccttaactgccgcggttttgctccctgcagggggaggctgtggatctgccacagggcgatggtgaccgcctgggcgaggttgatggaggggaaggctggattggcggggatgtggcaacgcagggggcagaggtcggcctcttcatcggtgaggccaaatgtttcacggccaaacaccagaccgatctccagtttggggattttggcgcagtaatccgccatctggggcgggttcatatccaccggtttatagcgtcccacgcggcgggaaaaggcgatcagcctgtccaggtcggcgctggcatctttgaggctgtcaaagacctgcgcctcctccaggatatgttcggagtgcatggccaggtaaaagtcgttctttttgggcacgctgcccacgatgcgcaggctggtgaaaccaaagttgttcatgatgcgggcgactgcgcccacattgccctcatagatgggttccaccaggattacgtggatcattgtttacgcagcagttgtcccaggcggttgctcatctgcgccacgttggggtcgggatcgtttttccattcctggatcacccgcctggtgacgttcatgaagtcgaatcccttgtcgcgctggttcttttggctgaatatgctgcccaatttgcgcagggtctgccagatggcgtccacccgttcttcactggcccccaccagccagcgccggatattggcataagtctgcagcgggcgttgccgtcccacctgggtgaggatgtggccgatctttttctgcacctcttcgctttcgtcgtccagcagcctgccgatgaaggtgaggatgtattgcgggtttttatccgcaatgttttccatgccgtgcatggacatggaacgcttgttttcgctgggagacatcgcccaatggggcatctcttccttcatggcctcgggatagttcttccacagctcgaaacagatggtctcgctttcccagggaaccgtctccactgtcttttccagggtcttcacgatcacccgcgggtcgtcctgcctcttgtaatagaaatagaacagcgccgtggcgcggataccgtagatgaaatcatccagcatttcggcgcaaatctcgtccaagggccccttgccctgataggtggccagcctcttgcccatttcttcgcgcacgaaatagttcgccgtgttgcccatttcctctatcagcttgatggcttggtcccgtttgcctttgtccaggcttttgaaaatcttttccacctgggcgtccattattttgtagtcgtccaggttcagacgtcccatttctttgatcattagctatgctccaaatctcggtgtaagaaaaaatatattattcacaacagcagcataccgcgtaaatgcctgtgttccgcatataatgttggattttgcctattctctcgtttgctcgtgattaacatgaacagtggatatctccgcaagctttctgtcaagatttttctctgaccaggttgctttgcggggaagggtggtgggtgatactggattcgaaccagtgacctctacgatgtgaacgtagcgctctaaccagctgagctaatcacccaacaatcagggtggtgggtgatactggactcgaaccagtgacctctacgatgtcaacgtagcgctctaaccaagctgagctaatcacccaggacaggatgcaatagcaaattgcagcccttttttgtcaacaaaaaacctcgctctgccctccaagcctttaccgatggcgatgttggcatcgccgtggaaaggtgacataatcacgtggtgacgtgttgaagtggtgacgtggtgctgccggaaaagagatagaacgcggataacaggatcgacaggatctttgagagtggaaaggtgaaaaggtggaatggtggaaaggttcccccgaaacaagtccaccaggctatatactgtgtcatcacgggcaagcgcatgcttgacccgggacccagtcttttagaaaccatccacccgactacgaaacaaagcatgccaagctataaaaccgtgtcatcacggcctgcgagccgtgatccagtcttttggaaatatccaccaaaccccaaaacaaaccagaacagagcaacaagcgtgtcatcacggcctgcgagccgtgatccagtcttttggaaacattcaccaaaccccaaaacaaaccagaacagagcaacaagcgtgtcatcccggcctgagagccgggatccagtcttttagaaactacgaccaaaacccgaaacaaatcagaccagaccaataagcgtgtcatcccggcatgcgagccatgatccagtgtccaggggtggcaaagtccgtttgccacagagaccggaggtctctcccaaacaggcaactccgttgcctctgccgaacagacttcggcagcccttaaatcacacaaattccacctttccacctcaaaaacacctttccaccaattcaaaaattctccccccacatatataggtgctacgacccctttatcccaggcaggaagaggattcaagggcaagtatataaatatacttgcccgtaattgcgcggacatgtgccggccacttcccgtttccctcgcgcgggcggctctcatttgcatccggcgctcagaccctggtcttccttaggtcaaccttataatttataaggatgacctaaggatgattagctaatcagttgatggtgcgaatgatagcgatacgggataaagaaaagtgtatcctggaatatgcctgttcgtttttgcctccgcatgaagtccagaagagcctagaaagttggtggtaattatgctgtctggaaaggctctttgaactccatgctggctggtcgtttggagttcaagccggcaaggaaagctgtatagattcccccaatcccaaagccggcttggacttcaaacattccttaaaagactggatcacggctcgcaggccgtgatgacgcgctttttagtctggggtggtttgtttcgtagtcgggtggatggtttctaaaagactggatcacgggtcaagcgagcttgcccgtgatgacgcgctttttagtctggggtggtttgtttcgtagtcgggtggttgtttctaaaagactggatcacgggtcaagcgtagcttgcccgtgatgacgcggttttatggtctggtatggtttgtttcgtagtcgggtggatggtttctaaaagactggatcacggctcgcaggccgtgatgacacgttttttggtcttgggtgcttcgtttcagggtctggtggttgtttctaaaagactggatcacgggtcaagcgtagcttgcccgtgatgacgcgctttttagtctggggtggtttgtttcgtagtcgggtggatggtttctaaaagactggatcacgggtcaagaccgtgatgacgcggttttttagcctactggtgttcgtttcgggggaacctttccaccattccacctaaaaaacccctttccacctcacttcatcagcaccagcttcctggtttcccggtagtccccgcattgcaaactgtagagatagacacccgcgggaagcccttccccgctgaatgacacctgctgcgaaccggggttcagattatggcggcctacgacctgtccgcgcaggttgaagatgctcagagtgccggtagagcgttccgggatgtcagctttgatcagcgcgcttccatctctgtttaggggatttggataggcgttatgcagcctggcaagcgcttgcggagcaagttcatcttccacgggggttccgcttcccagcttggcgacaaagatatcagattctccacttgcagtcagggtatggatgccgaaagtagcggtttcgtaaaaatatccggtcacacaggtgttacccgcgccatccacagcgataccagatccagcgttatttatatattcatttcctcccacattgaccgcccagagccagttaccggagaagtcaagcttggcaacaaagatatctatccatccgactgcagacaagggatggctgccaaaagtggcggtttcgcaaaaagaaccgcacacataagcgttacccgcgctatccagagcgatgccatagccattatcatattctattcctccagccttgaccgcccaaagccagttgcctgaggggtcaagcctggcaacaacgatgtccttctctccgtttgccgtcaaggtatggctgccgaaagtggcggtgtcataaaaagaaccgttcacccaggcgttacccgagccatccacaacgaagccaaatacatctatatcgttattccctccccccattacagccgatagccagttacctgacgggtcaagcttggcaatgaatatatccgattctccgtttgccgtcagggtatggctgccgaaagagactgtgccttgaaataatccggtcacataagcgttacccgttccatccaaggcaattctaattccaaagtcattgcctgaccctcctgcctttaccgcccagagccagttgccggaggggtcaagcttggcggcaaaaatatcagcgcctccgcttgttgtcagggtatggctgccgaaagtggcggtgtagcaaaagtatcctgtcacataagcgttacccgcttcatccacgtcgatgccacctcctatatcccagtcaacaccccctgctttgaccgcccatagccagttgccggaggcatccagcttggcggcaaagatatcatgctctccatttgtcgtcagggtatggctgccgaaggtagctgtgttctggaaatacccggtcacataagcgttgtcggctccatccacggtgatgaacaatccccagtcattctctgttcctcctgccctgaccgcccagagccaattaccggaggcatctagcttggcaacaaagatatcacagccaccgcttgtcatcagggtatggctgccgaatgtagcgatttcatcaaacataccagtgatgtactggttgccctggctgtcggtagctatggacatgctttcttcatagtcagttccccccgccttgaccgcccattgccactggggcgcctgcgctcccaaaaccatcgctccgcagagcaggaaaagacacaaaaatgaactttgcaatgctttcatttttcctccctatgatggatttttcagttgaaattatactggatgggtttaagtagatttgtcaagaaaaatatcgccaggttgaatctttattttttggaaggcgtttttcaaagacaggatcacgggtcaagcggttcacgcagatatacgcggataatataagggctgccgaagtctgttcggcagaggcaacggagttgcctgtttgggagagacctccggtctctgtggcaaacggactttgccacccccctgggactggatcccgggtcaagcatgcgcttgcccgggatgacacggtaatgtagtctgggttggtttgtttcgaggccgggtgttggtttggagttcaagccggcaaggaaagctgtatagattcccccaatcccaaagccggcttggacttcaaacattccttaaaagactggatcccggctcaaaccaccccaccaaaccgctacgcgctttggcggggaccccggtaggccgggatgacacgggttttagtctgggggtgtttgtttcggggctggctggttgtttccaaaagactggatcccggctcgcaggccgtgatgacacgttttttggtcttgggtgcttcgtttcagggtcgggtggttgtttctaaaagactggatcccgggtcaagcatgcgcttgcccgtgatgacacagtatatagcctgatggttcttgtttcgggggaacctttccaccattccacctttacacctaaaaaacccctttccacctcaaaacacctttccacgtataataattgccataatatagcttgatgaaagcgaattggtattagctttgtgcagagccgaaaagcggcaggatattcaaaagaggaaagcaaacgcttccctcttgtaataaggtttttatggaatggctaccagcgcaggatcttggcggtgcggctctctttgccgctactgaggcgcagcagatacactccggagccaacctggctgccttgttcgtcattcccgtcccagttgagggtatgttctcccggctgcaacagcggatagcggaagcgtttcaccacctgcccgcggatgttgcagatcagcaattccgccggctgggcgtctttggttgaccagttcacctgcacgctggcgcggaaggggttggggtggcatctgcccaaggccagcccggcagagggggtgtccggttcctggggcagggaactgggcaggtaagacagcttttgggcatagacgcccgtctgaagatgcccgacagcgggaattcccgtccgctcgtcgctccagcagacaatagcctcgttgccgaaggcgctgatcctgggatagtccgcgtcaccctgatgggagccgaagctcgattgggaggcgcccaccggttcgccatcgggattgatgaagcggtaatacaggtcgcggtcttcgttctgatagttgctttgttcgctccacacacccagcaggatgccgctttccagtcttgccaggctcacgttgccaagcccatgcggggtggatgtattgatctgtatgccagggtattgaaaggccagattccctccgtttaaaaacaccttttgcaggcgtatgctgcgcactcccgatccttcagtgtggtcgtagatcaggttcagggcgttgtcatcgatggcgcagccgacggtgaggtggtgcggttcgtggatcaggacacccgcttcggtccaggggaaggccgcctggggtgagacccgttgggcgaagaagggagcgctgggatagcccgcgatcaggcagaccaggtcttcttccaccaagcttgagaagatcggccaaacctggggagtggcagccgcttcgaagattttggtgccctgagggttccaaccgggcaacaggtcgccattggcgtccaccagcaggcagtaggtgcaaaagttgttgctgccagacctgcgttggaaccaggcaaagtagcgtcccggggtgttgaccatcctgacattggggttcgggagcccttcgagcagtagcctgcctgattctccccacatcttttggaggttgctgatccgctggccataaagttgtgacgttcctgttccataatcgatcagccagcccagatagatgtcaccctcatgctcgcagagcttggcatagccggagtaggcggctccgggggagaccagcagtccgttgccagcccattggggattacccgccaggtcaaagacctgcaggtaggtgttggtatcggagtaaagcacggcaaagcggtcactgccatagttgatagcgcccagcaaacgaatgtttggcccatagctgccgatgggaacgcccccggcgggcagcagcagctctccgttggcgctgagtatctgaaagtacatccagtttccgccttgatggcgggagtcgttatagatcagcacattgtgcccgttcactgccaggctggcaatgggaatggctgaaccagcaagcgcttcggacagcggatcggcagccggcagcagcggattgcctcctaaatcccgcatcaaaaagcgcaggctcttgcctccggatcccttttccaccagcagatacatgggattggtgttccagccgaagacccggggcttgcagccggaatcccagttttcactgatcaccagtccatccgcaggccatgccggttggccgatggaattgtcaatcatctggccgcgcaggatcagcggcgcgtaaggaccggaattgtcgctccagacgattatctttttcatggtgtcgtcataacaccagtccagatagctcacctcgcttgttccagaccagatttggaaatgggaatacaagtgatgaagccagatataagtatgtaaatgtacctgcgttacgccatcgatgggtgtgctgctcagtacgcggtaataaagcgaagcggccttatccagcttaaagtgtgttgaaagcggcatgggctggggattgagtaccagatcctcgggctgctcaatataaggttccaggtccaatccaaacaacctgaaacgcagccgggtatccgtttgggcaatcataaccgcatcgaagaaataagaatagctctctaagaacaattcgtgcggacccacttctcccggctccagagggaagcttctgtggtaacggatggagccgttcaaatagttgaaagttgtaaggttgtagttggtttcagcctggctggtggcgtaataactcaccagcaaaccatctgaatctcctaagggtacaaggcagtcattaagcgtcaattgctgttcagcctggatcaaaggttggatcaggctccaggtgtcgttgccgcttccattcaatttgtaggcgtaggcggcggggaggttggggtccggctgtaccaatatgtaggctccaccggagttgttggcgcgggtcaggtaatgggtgacggtagcgccatgccagaagtagcaatcgttgttgaccaggactccgccatcagtccagagcaggtttccctgcaggtcgatcttgtttgccatcagcctcgcgtggctggatccctgtacttccagccagcagaccagataattgtcatcggagcaggtcaccatctgctctccgccgatgcccaggccgtagcccgcgatacgcagtggggaatcccacatctcctcgcccagcgcgctgatccggtttgccatcaggcagttttctccatccagtatctgcgtccagagcgtaatcaggctgccgtcatctgcttgctgcgtgcagccagtgtagctcagatcctgcgcttcccgcaccacgacgtcctcagtccagacagggttggcaaaagccaggctggtggctagcagcagtagtagtagcatagccgtgtgtttcatgaaaaaggctccttttcaaatagattggaaaagataacaagtcccgcgggcaggcgctgcccttacataaagacgcaaaacaaacagattacagaatgatagtataaacaagtccgccacattcgcaaactctttttattaaattgtatcaggctcccgatatacagcgtgaggcgcccattgcgggctgatattgccaggacagcaataatccaaggattggttcgtattccttgtcttacacaggtattcacaaatcacaaacgcagcccagacgcctgttttctttgccctcaaaaaactacttgactgaatctgccatttctcacacaagaatttttcgactacatttcgataaaccaagatggaatacagattatgaaaaaacttaccgccctgatcggcctgacgctgctctgcggaatcagcctggcgctcaccctcgatgtaagcgttgacccctccgcctgggatggcagcctgcgcggccagcccacggcacccctgctggagcccggcgttcccgcgctcaactattaccccgtgcgggtgctgatcccctttggggaaaaggtgctcaacgtgagtgtgcaaagctccccttacctgttgcagcgcgatggcgtgtatctggactacgcgcgccagcagcagcccacttcgcagccccgtcctgacgccactcaacccgatccagcgatctggcagagcgacgcgccgttcccggccgtcaatcaccgctatctgggcacccagttgcagcgtggcctccaatatgccgtgctggacctcttcccctggaaatacaatccggtttcccgccagattcacgcggctaccgaattcagcatcgagatcgaaaccggatgggatgacgccctggccacccaacaggccaatttctacacccccgccctggctgcccgctctgtggaaggatttgccctcaattcccaggccctgtccagttaccagcaggcttcccgctatcgaaaccacgctccccaaagccgcctgatcgacctttccactccgcgccaaatggtcatcatcaccaactccaccgcctcctcctggctgcaaggctatgccaactggcgtgacggcaacgacataagcaccggcgtattccagaccgcggatatctatgccagctatcccggaaccgacaacgccgccagggtgcgcgccttcatcagcgacgcctatcaagcctgggcaagcagcccccagcctctgcaatacgtgatcctgggcggcgatgacgagatcgtgcccctgcgtggctgctacggccaggtgggcgacactgttgatctcagaatgcccaccgacctctatttcagcaatctggatggagactggaacgccaatggaaacgacatctggggcgaaccgcaagaccaggtggacatgctgccggaagtgcatatcggacgctttcccgccgagacccagcccgagtttgaaaacatcatccgcaaaatccaatactacaccggcaattccacattcagcaacaacaccgccatcatgttcggagaaaacctgaacaactaccccctcacctggggcggagattacaaggacgaagtggccaccagcatcccggaactgtaccacctgcgcaccatgtatcagcgtgacggcacctacagcgagcagggcgtctggcacgccatcaacaacggcgcccacgtgatgaaccacatgggccacgccaacgaagtcttcctgatgggacagagcaacaccagcatcgagcagctccagaacaccgaatatggctttctttacacccagggctgctatcccgccgccttcgaccaggccaccagcggcgatggcgaaagcatcgcggaacatataatcaccaccgcgggcggagtatttgccttcctcggcaacacccgctatggctggtattccccgggcgacaccaatggcgcctcccagttctatgaccgagaatacttcactggcctcttccagactcccaacacccaattcggctccgcgctcagctattcccgcgagcagaacctcaatgccgccatcaactatgacgtgatgcgctggtgctactttgagatggttctcttcggcgatccttccatcgaggtcaaacttcctgatcccgccctgcccctgctcagcctggaaaactacacaatcgacgatgtggagggcgatggcgacggcaccctcaatcccggcgagatcatccgcatccatcccgtgatcggcaaccatcaggattgggccgctgcccacaacgtgaccgccaccctcagcggcctgcccgccggagcgcagcttttgagcggcccgctggtgataccccagttgttgccgggccagaccagcgatcccggcctctatttccgtgtgctgcttccgtccggcagcggttacggcagctatcagatcaccctggagctgcaatcgctgcatcccgtcaccaacctgagcaccggaacccgcagattcagcctcggctatgatatcaccctcatagacggcgacttcccctgggattgccccgtgggcagcaaatccgccccgatcgtcttcgattttgacggtgacggcagcctcgacatactttacaccgatgttttcggcaacagccatctgctggataacgatgggcagcagaccagctccattcccgcgcccctccagcaggatgtgatgcgcagcgccgcctacggccagttgattgacgggcaggaaccggctctggtgctcaccagccgcaccggcaaagtgctggctctggcaggcgatgaagtgcttttcgattatgacggcggcagccagttcctcttcacccccgtgatcgcccagatcgacgggcagggcggggcggaagtggtggcgcactccctggatggcaggatccacgttctggattcctccgggaacctgttgccgggcttcccgcttgacctcggctccgccttccacagcgaactggctgtggcggatatcgacggcgacggcggcaatgagttcatcgccggctgctttgacggcaagttgcacgtggtcaaatccgatggcacccccctggcgggctttcccctccaggtctccggccccatcaacggcgcgcccaccgtccttgccaaccgcaggatcgccttcggcacctctacccacctgcatctggcaacacccgaaggcagcctggtcttcagcaagccaatctgctcctccatgggaggaagccccgccctggcggacatcaacggcgatggcgcgctggatatcgtgttcggcaccgccaacggctcactctacgcggtcagccagagcgggatagaccttcccggcttcccggtgcggaccggcgccttgttgcagaccccgcccatcattgctgacctcgatgacgatccccagcttgaaatcctgatttccagctatgtgaactcggtttacggcttcaaccacgatggcagcgtattggacggatttcccttccagaccagcttcaacggctgcactcccgccacgctttgcgatctggacggcgacggctggctcaagctggtgagcggctattccaccggagtgctggtgctgaacctgcgccgcgcggaaaaggacaaccggccctggaccgtttaccgcggctcactcaccagacagggcagctacgcctccaccggaaacgtctccaatcccgcggatgacgctcccgccttgcgcaccgccctgctgcaaaactttcccaatcccttcaatcccagcaccagcatccgcttccaactggcttccgaaggctccgcccggctggcggtttacaacctcaaaggccagttggtgcgcgtcctgagcgacggcccgcgttcccgcggttcacacaccgtcacctgggatggcatcgacgcctccggcgacccggtctccagcggagtctacctctaccgcctgcaggcgggcggaaaggtgcagtcgcggcgcatgctgctgctcaaatgacagagatttgcattgacataaaacgcaccggaataaagtcttgtaaccagaaataaaatatacatagggaggctaatatgccaaaagtactgatcgccacagagaagcccttcgccgcggaagccgtgcagaagatcaaggctgaactggacaaggccggctatccccatagctggctggaaaactacaccgatgtgaaagacttccatgccgccgtggcggatgccgaagccctcatcatccgcagcgacaaagtggatgccgccgtcctcgacgccgccaaacaacttaaaatagtggtgcgcgccggagcgggctatgacaacatcgacctcgccgctgccaccgcccacggtgtggtggcaatgaacacccccggccaaaactccaatgccgtcgccgagctggcgctggccatgatgatctacatggcgcgcggcaagttcaacggcaagagcggctccgagctggctggcaaaaaactggtgctctatggctatggcaatgtgccccgctttctcgccaaaatggcgaaaggcgttggcatggacgtctatgcctacgatccctacatcagcgcggacgtcatggccaaagaaggcgtcaaacacctggacaaggtggaagacatcttcagcaccggagactacatctccctgcacatccccgccaccgccgagaccaagaaatccatcaactggaacctgctcagcctggtgaaacccgactgcatcctggtcaacaccgcccgcaaagaggtgattgacgaggaagccctgctcaaagcatttgaggaaaagaagaagttccgctacgtgagcgacgtggaaccggaatgcgcacccaaactgatggaactctatgccgaccgctactacgccacacccaaaaagatgggcgcccagaccggggaagccaacgtcaacgccggagtggcggctgccaaacagatcatcgccttctttgaaaaaggcgacactaccttcaaagtcaactgatcagaccctgtctgagattgcaacccccggcactgcccgggggtttttcttgcttgggcaatccgcaccacgcaccaatcgtgtatctccatcgcgatcatttgcgccccacctctgctattgataacctttatacatttaatgggcgttgattgatcacctttttgccctcatttgccagggtgggctaagtctatattttccgtaggtcatccttatactttataaggataacctaaggatggtggcagcaaatgcaggagcagcaagggacggcgctatgaaggaatatgcatattattgccgttgttattggtgaatgtcatactatattgtttgcgttttatttccatcatagtgaaaagttggaaaggtggaaaggtggaaggttccctgaaacaagtcctccagtctatataccgtgtcatcacgggcaagctatgcttgacccgggatccagtcttttgaggccacatcacatcacacagccctgaaacaaagccaaccaaactacatactgtgtcatcacggcctgcgagccgtgatccagtcttttagaaacaaacacccagccccaaaacaaagcacaccagacccaaaatccgcgtcatcacggcctgcgagccgtgatccagtcttttagaaacaaacacccagccccaaaacaaagcacaccagacccaaaatccgcgtcatcacggcctgcgagccgtgatccagtcttttagaaacaaccagccagctccgaaacaaagcaccccagactatacaccgtgtcatcacggttcaaaccaccccaccggatcgtaaccgatccgtcgaagaccccggcttgcccgtgatgacgcagtaacctttgttgtcttcatccactaaaaattttacttgccttgttatcgcactgccaattagtgtgaccccaagggcggcgcggctgagatcactcccgcggctgcccctgaatccgataaacctgtaaggaggattatataatccatggggactataattaagcgttgggggctgtttttgacggtcaacatcctggtgttggctgtcttgggttttattatgcagatcgtgggcgtgagaagctcggactggatcggtctgctggtttactgcgccatattcggctttgccggggcggtcatttcactgctttccagcaaagcgatggcgaaggcatcctacaagatcaccccgctcacccgggaaacggcccgcggcaaagagctatacctctttgatacgatagagaaaatggcagcccacaaaggtatcaggatgccggagtttggcatctaccaggcggcggacaacaacgcctttgccaccggcgcgtccaaaaacagatccctgatcgccttttccagtggaatcatgcaaaacctggatgaggaggaactggctgccgtggcggggcatgaaatgacgcatatcactgaaggcgacatggtcaccaccaccctgctgatgggcaccatgaacacctttgtgctctttctggccaatatcatcgccgccctcctgagcggcagaagaggcagaaacgatgatgacggcgcttcggccggagtgatgcattccgccagccaggccgccatcgcgatgatcatccagaacgtgctgatgatccttgccaacatcgtgctggcagcccactcgcgccaccgggaatacaaggcggacgccggttctgccgccctgaccacccccggccacatgatcaccgccttggaaaagatcagcaaagctttcgttccttcgcggcgcaaagacgcctatgccattgccaagatcaacaacttcagccccctctccctgttcgcgacgcatccgccggtggagaagaggattgaagccctgcgcaagatgatggtgtgaacaagagattcatcctccggatagaaaagctggctctgggcggttttggcctgggctttcacgagggcaaggcgatctttgcccagcggatggcggtcggcgacctggcggaagtggagctggtcaaagaacgcaaggacacagcctttgccaggcccctgcgttggctggagcggggcaagggagtgcaggaagcggactgcgcttcctttgacctggacgacccctgcggaggctgcgattggctgatgctggactacccggcgcagttggctgccaagaccgaactggtgagggaattgttgcagcccctggccccggatttgaagatcggcgccacccccgcttccccaaaccccgtaaactaccgcaacaaagcctttctgcccgtgggttccggcgccgatggcctctattatggcatctacgcgcgctggtcgcacaggatcgtcccccatcagcgttgcgttctgcatccccaactctttgacaccatcgcccagcgttgcctggaaatctgccggaaagcgggggtgcaggcctactctgaagccagccacaccggcactttgcgccacatcggcctccgctgcaacaaggatcaaagctcggtgctgctgatcctggtgaccaggggagccaagctgcctttttccaacctctttgtgaagcagatcaccgcggagttcccctgcatcagcggcatcgtgcaaaacatcaaccgggagcggggaaacgtgatcctgggcccggaagacaaactgctctatggcaatccctggctctttgacgaactggcgggcaaacgcttccgcatccattaccgcagcttttggcagatcaaccgcggcacagcggaacagatcatcgcccgcctgcagaaactgatgggcaaagtgggactggtcttcgacgcctacagcggaatcggggcgctgggactgaacctcgccgcgcaggctgaacgcgtgctctgcgtggaagaatgccgggaagcggcactggatggggaactgaactccgaactgaacgacctggcgaatgtggattatctctgcgccagagtggaggacgccctgcccgcgctgctttcagaccagcaaagcagcccctgcaaaacaccggatgtggtcattttggaccctccccgttccggagtgaagccagccgccctgcaagccataatcgacacgggtatcgagcggatattctatctgagctgcgcgcccatgacactgcacagggatctcaagatcctgcttggcagcgggcgttacaaactggatggcatccagacctttgacatgtttccccagacctggcacatcgagaccctggcctggttgagccgcgcatgaagcagcttggcatcctgtcgctctgtttgttcctgctgtcctgcaatctcgccagcagtcccgaagatatggacaaaatccgcatcgaggatatcctgaaaggcatcgcccgcgatttcagctggaaagacattgagggcatcatggagcaggtgcatccggactattaccacaaagggatgtatggctttcagctgcgcgaactgtgggaagaccgtatggcacgcttcgacctgctggatgtggaggtgcaggatgttgacctggctggctcccgggcaaccgtgagcatgaagctgaccttcacgacggccgacagcactctcagctatctggatccagacaccgggggcgacgcctcctatttttaccgggaggatggagtctggtatctttacggcgatcaacagaatatgaaacaggaaggcgggcttgttccgcccaagccgcggaactgagacagggctgccaaaccccggtaatccatcattctatttcgttccaccatttcacatttccacctttccaccaaataatccccccacatatataggtgctacgaccccttcatgccaggcaggaagcggactccaaggcaagtatattaatatacttgcccgtaattgcacggccatgtgtcggccacttcccttttccctcgcgcgcgggtggctctcatttgcatccggcgctcagaccctggtcttccttaggtcaaccttataatttataaggatgacctaaggatgatggcacaaaatcaagtagcagcaaaggagggcgctatgaaggattatgcggaatgtagtggtttatttatgcggttgtcaagtaaagggctgccgaagtctgttcggcagaggcaacggagttgcctgtttggaagagacctccggtctctgtggcaaacggactttgccacccctgggcactggatcccgtgtcaagcccgtgatgacacggtaatgtggtctggtgtggtttgtttcggggctggcgtggtagtctctaaaagactggatcacggctcaaaccaccccaccaaaccgctacgcgcttcggcggggaccccggtagcccgggatgacacgctaatgtggtctggtgtggtttgtttcggggctgacgtggtagtctctaaaagactggatcacggctcaaaccaccccaccaaaccgctacgcgcttcggcggggaccccggtagcccgggatgacacggttttagtctggggggtggtttgtttcggggtcgggtggttgtttcaaaagactggatcacggctcgcaggccgtgatgacacggttttagtctggggggtggtttgtttcggggtcgggtggttgttttttggttggacgtttgtccttattctgttcttttaatccgtgtaatttgtgtaatttgtggatatatttaaaagactggatcacggctcaaaccaccccaccaaaccgctacgcgcttcggcggggaccccggtaggccgtgatgacgcagttttatagcttggtatgctttgttttgaggtctggtagacttattatgggggaacctttccaccatttcacctttccacctttccacctcaaaaaacacctttccacggatatcacaagagaatgccagattacaaatagcataaaatagcctggtgaaagcaaattggtatcaggcaaggaaaaaaggatttgacaatattgcgcagttttaaggtgatgcaatttaatggaagatactaaattgaaaaagcataggagtaagcgtatgaaattgtacatacgtgttttcggactgatgcttgtcctcgctctggctctggccggatgcaaggtctcaacaggcaaggatcagaacgggcaatccctggatacggttcagggtctctttgtgcgggatattcccaacgatggaggcgatggcctgatcataggctggaagcccctgccccgcgaaaagagaatccaggaataccgcatctacaggggactcacccccgattccctgttctatcttgcatccgtggcggtgaacgtgaaaaccggcgttgcctcggacagcatgtattactacgacagtggctccagcgattttgtggacatcaactcgcctggaaagctcaagcacgaaaagcagaagaagggcagcatcctgtatcgcaacattccccgcgatatggaactggcagccaggttgagcgaaggctacagcctttactcgatgatggaatccaaagattattatcgccggacaaagaaagctttttccgccgacccggaagataagacagtctattccggcgtgaaattcaaccagcagaccatctatgcttccctgaagtcctcaaatcctgccagcgaagaaggcaggattttgtattactataccgtggttccggtgaatgaacgcaaccagtatctgggcatagccgaacccaagtgcggattccccgtggacgacgcgccagaggcttctcccaatctccattgcacagctttgcaagacagcatgacgctgcgctttgagtgggagtatccggtcaacaaatccgacctcgccttctaccagatcatggcggtgccagagatgcctgattcgctttggaacaggatcaagggcacgccccaggccatggccaacgcgctgcctgttgcccagggtccaatcggcggaggcgcgctcaaaaactatgtggcggtcaccaaagagaaattgccggatggtttgagttgggaacgggcttccaccggccgttacgcgatccagttttatgattacagcaacaatccctctcccttgtcccgccaggccagtgtagtcctttcggacagcggcaagcttccccaggcagcccagtttgtggtggaagacaaacccaacgacaagggcgacaggctcacggttgtctggaacgaaccgatagtgttcatcaccaagacctccgctctcagacgcgagaacggcaataaaggcctgttcgcgaagctcggtctggcaggaaaaggcggcaccaggctaaagatcaattaccagcttaacaagaccgacgtgcaaaaggtcaacaacatctactttgaactgctggttcccggttcggacaagccctttgccagggtgaacgagttttaccaggacaacatcatcaaggttaccctgccgagcggatatgatctgaaaaatggcctcaaggtgcgcatcacgatgaacaccagcccttacaagatcaaccccaaaaacgggcggatcacctatcagaaaggccgtctggtgcctgaatatgtgctggagcaaaaccttgtctgggacaaccagatgatggcgctgatgccttccagcgaactcctcaggaatggagtggatgtttccgccgtgcaaaatacggtgttccgcaaaacgttcagcggcccgcagtttaccctggtgaaaaagaatacttcctacgataacagcctggatgtcaccatcccctacgttgccaacgtgggcaagcctgtgctgggcttcaactttgtgaagggcggcacgctttacacctatatgggcggcgaacgccacacccgcaagctgaaggctggcgaaaaggttcaaaacctggctttggtggaatcgcagatcgacctgaaatatgccaagcaggacgatcccaaggaatcccgcaccatccgcaccagcgtattcaaggatgaagccgccggtgaactggataagatgcggcaggacatcaaggacaacgaggccgaaatagccaccaagcaagcggaaatgaaagcccttcccggcggcgaagccaatccccaggcgcaggctttgcaacagcagattgccagcctgaccgccaaaaacgaagacctggccaagaccatcaagatctgcgagaatgacccggactacaagaaatccctcactttccgcggcaaccgcggcagaatgaacttcgtggcctccatccgcgaaccgctcagccgcctgcaatcctacatgatcgtcaagaccaacggccgcggcctcttcaccgaagcctatcccgaaaaagatgccaaaggcgactatatctataacctggctgtatccaactggttcgactggaacaaactggtcaccctcgtcacctgcatcatcttcggcgtgggggtggtggtcttcgtgcgcctcgccaagcagggcaaggatctctatatccgtcccatcgctggcttgcaggagatcgacaatgccatcggccgcgccactgagatgggacgcccgatgctgtattgtatgggtaacggcggcctttccgatgtggccaccctggcttccctgggaatcctgggcctggtggccagaaaagccgcggaatacgacaccaagctgatcgtcccctgctacgactacatcgtcatgcccatcgcccaggagatagtgagggaggctcactatgccgtggggcgtccggacagctacgataaaaacaacatattctatctcacctcggtgcaatttgcctatgtggctggcgtgaacggcatcatgatccgcgaacgcatggccaccaacttcttcctgggctatttcgccgcggaagccctgctgatgacagagaccggaaataccgtgggagccgtgcagatcgccggctcggacgccatcacgcagatacctttctttatcaccacctgcgactacaccctgatcggagaagagctctacgccgcctcggcctacctcaaccgcgagccgatgctgctggggactctgaaagcccaggactatttcaagttcctgattctggtcttcgtgattctgggtgccgttttggcgagcttccaggtcacaggtttaatgcaaatgttccctattaaatagaagaggtcgtaaatgaagaagacaataccattaatgatagtgatcctgggaggaatcgtctgggtgctgtgggtctttgtgccgcacaggctgctgcaggatgtattctactacgatttctatgtgccctggattcgtgccatgtctcccttcgggatgctcttgggcgtgatcagcctttgcatgatgcacacagccaagattcgccgcaaagctcccaaatggcaatacagtttcttctttttcgccggtttcatcatcacggctttggccggattcatcggcggaacccaaaagggcggcctctatatgtggctgttcgaaaatatgcagatgccgatgagcgccacgatgttcgctctgctggctttctatatggcttccgccgcctacaaggctttccgcgcccgttccgcggaagcaaccgtgttgctggtggcggcgatagttgtgatgctggcccaggtgccgctgggcgtcaagatcagcagatacctgcctgatatctcccaatggatcctggacgtgccgaacctggcgtccaagcgcggaatcctgctgggtgtgggtctgggcagcgttgccaccaccctcaagatcctgttgggaattgaacgctcgtatctgggcggagattaaaggcggaggtgaaaatgaatctatttgaaagactgcaaaagctcgaccgccggtggatctacatcgtggtcgccctggcgatcgtcattcccctgatgatcccctataactcagataacatcacctctccccccacggagaacacctatcagttgatagactcctatgccggcagggaagaccgtgccgtcctgctcagcttctggcacgatgcttccaccatgccggaactgtatccgatggaagtggcgatcatccgccattgcttcgagcgcaacgtgaagctcttcctgctttccttcatgccaaccggcgctcccatcatcgactatgccgtgaactccgtaaaagaagaatacccggacatcaagtctggggtggactactgcaactttggctacatcccttccgccctgatcatgccaaccatcatcggcatgggtgacgacatagccacggcggtgcccaccgacgccgaagggcgcaaggtggaaaacctgcccattatgaaagggattaacaactacagcgagatgaacctggtggtggaattctccggctccgtggcgggtggctactggctcacctatgccaggcccaaattcggcaccaacatcgccgtcggcgtcacggccgttatggcggcggacgaatatccctacctgcaaaccggacagttcatcggcatgctgtcgggcttgaaaggcgctgccgaatatgagaagctggtggatgtctttgccgcataccgcgctcccggcgaccccatgggcgtcacctacgacgaggaaggcaacaagatagtccccggccgctccttcagcagcgacgttctggaggacgactccatccagaaactgctcaagataaccacccagaccaaagctgttttctcgcagcaagagtttgacaagttcctggccaactatcctccggaagtccaggctttgatgagcagctacaagtccgaggaggacaacaacgtggtcatcgacgtcaccaaggtgaaagaggacgaccagaagaagcttggctacacagcctggaacgacctcaaccgcatgacccacaacaccatctataaattcaaaactgcccgcatcggcatgaacgcccagtcggtggcccacattatgataattctctttatcatcatcggaaacatcggctacttcatcagccgggccaaagcgcaaaagaagtaagggaggataaaatgtcttttgaactattcagcaacctggttggagccttcttcaccctctgcatcttctccttcctttacaaggacaatccgttctatcagatgtccgaacaactgctggtggggatatccctgggctactccgtggtgctcacctacgagcgcgccttcatccccttcttcgtccagcccatcttcctcaagcaccaatggatactgatcatacccagtatcattggtattttctatctgttccgcttttcccgcaaattcagctggctttcgcgctatccaatcgccttttccatgatgggcgtgggcgcatccgttcccctggccatgcacaacagcattctggtgcagatgcgccaggccatggtgccaatcgaaagcataaacctgctgctgatcttcatcggaactatcgccgtgttgctctatttcttcttttccaaagctcacagcggcggatacgggaaatttgtaaacatcggcaaatggtacatgatggttggctttggcgcgtcattcggactcaccgttatggcgcgtatctcactgctgatcggacgtatccagttcctggtcaacgacgtcatcaaggcgatattcaactaatttaacacagatcatgaggggggaagcgcgatatcttccccccgggtcgtgttcaggcgtcggtgcctaaaccagcaatgccccaagggataaagcaatgaaaagatattatttgttctgcctcttagttttgatgtcactcctgctggccatgggcggctgcgtccgcggccgttcagcaaatgccggggtggaggtctttgaagctctcgacatgccccacgacgatggcagcggagtgctcctgagatggaagcctctggataaaagccaccggatcatccaatacaacctctatcgcggccattcgccggacagcctcttcctgctgggtaacattgaagtggatcccaaacagggtgtgatgggtgaatacctctttttctacgacagggattacctccccctgttccagtttgagactgctccctccaaactgaaaaaggaaaaacaccaaagcccggacagccccctctaccaggcagttcccagggacgcgaacgtcgtgagcaccatgcttccccattacagcgtgctgggcaacatcaccgcccgcggtttctacaacggctcccgccgggtggaaaaggatggcgaagagggcaaggaagtctttgccggttacaagcttaaccagtttgaaagcatctatgccaaccccctgcccggaaacacctactattacagcgtggtggcggtgaccgagacaggcaggcgcactccagccgcccgggtctgcagcgttatccccgttgacaaccggccggattccagcgcggtgtttgccaccacctacatccaggacaccaggcagttcaagtttgaatggagccctcccacgggaaccaccgatatcggcctctggcagggctggctgatgcccaaaaacctgctcccgctttaccggcaggaacagcagaagaacgcctccgccccggacagcgtgttttacgccgcctggcaaaacggttccataaagctctttgaacacacccctccctattggagccagaccttttaccaccaggtggacgcggctgcggaaggcatcaagctgcctgccagcctgcaggactacattccggtgctcagctttatggactatagcggtttccaggcagccaccctgggcaaaagcgcgcatgtcagaaactccccggaactgcccatcgtgccggctttccaggtgattgacaaggtcaacgacaagggcgacaacctcatcgtttccttcggcaaaccctttgccttcatcacgcaggcttcctataccagctcccggaaaaacaagctgagggtgaactacgatctctccaaaaacgagcattacgagatagacaggctgcgctttaccttccaggatgccgccaaaaacaccctgggcacggtcacggaatactatctggacaacgtgataaagttcaagctgcccgccagcctcgccaaaaaccagagcttcatggtgcgcatcgagttccgcctgcggggagagaaggatttcgatccccaggttgtctggcaggatgtggcttatgacgcaaaggccatgcgcttcaacggcagcggggtcaccctcaacggccagtttctcaacaagtatttcttcgatgtctttgccaaaagcaaactggattcggattacagccccgtcatgcgtatcggcggcatttcccgcgcctttgaccacaccatcccctttgaagacaccgtcacgccccagatcgtaggctttgaccagaagaccggcaggctgctgcttgaacccaatttcaaagtggcaatggaccccgtcagcggagcggttttgtgggctcccctttacaagcaggattttgccctctatttgaccgacctggagaaagaactggcagccctcaaagccgggctggcgcccggagacagcctctccgaagcagcccaggaattgcgggacaaacaggccgagctggatttcgcgcgcaaccatcccgcctacgcccaggccagggacgcaaagtcggacaaagcctggcgcaaggtcttccggactgaaaaggacagaaacagccgcagctatgcctatcaactgctgatgaccgatggcaagggcttctggaacatcgccgaaccagcctccggcgaaggtggagagctttggaactatcccgtgggaaactggttcgacagcaccaaatgggccaccctgatcgcttcgtttgtgatgctcgcgctggtggtttacaccgtatcaatatcccgccgcagggagttgtatatccgccccatcgcgggattggcggagcttgacaacgccgtgggccgcgccacagagatggggcgtccggtcatgttcgttcccggttggggcacccttggcgatgtgtgcaccatctctgccatgatgattctcaaccagatcgccaaaaagaccgccgaatacgacatccggctcatctccccccatgtggactactttgtggttcctttggcgcaggagatggtccaaaccgcctacagcgaaatgggcaggcctgacgcctacaaccagaacgacatcttcttcgtttccgacacccagttcgcgttctgcgcggcggtaaacggcatcaccgtgcgcgaaagggtcgccaccatcttctatatgggatacttctacgccgaagccctgctcatgaccgaaaccggaaaccagtccggagcaatccagatcgccgccaccgatgccatcacccagattcccttctttatcaccacctgcgactataccctcatcggtgaagagttctacgccgcttccgcctacctgtcccgcgatcagagcctggtgagcatgctcaaggcccaggactattttaagctgattatcgttatctgcgtgacaattggagtgatcttatccacagcccacatcaacgcattccttaacttcctgcccttcgagtgatcctgcccctgcggcggggtcgctcccggtcgggttaaacacccaataaaagggaggtcgaacgatgcgagtcctgctcgtttcaccccgcgcgcgcaccagcggcctggaaagcctgcgcaaggggcatcaaatcatacaaggcctggtctacgtggctgccgcggcgagggatgccgggcacaaggccacggtggtgattgccgaccgcgagaccctgccccgctatatcaggcgttatcagcctgacctagtgggcgtttcctgcgtgaccgccacctatcccgtcgcccgcgaaatcctcatcgatctggcgcaaaaccatcccggcctgcccaccatcatcggcgggcaccacgccaccttcatgtaccgcgaagtattggcggagaccggcgtcagctatgtttgccggggcgagggggaggaggtttttcccgcccttctggcggctttggagaagggcgaacgctatcctgacatccccggtatcgtcttcctcaaggacggccattaccacaacgacgggcacatcgcgctattggacgatctcagccgcctgccgcgcatctccatggatttggtggccccggagttcagcttcacacccaagctggtttccagccgcggctgccccttccgctgttccttctgctccatctcttccttttatggcggcagataccgccagcgtcctgtggagaacgtcatttccgagctggaggaattcgtttcctgggggtacagggagttctggtttcacgacgacaacctcaccgcagatatcagatgggtgaacgaattctgccgccagcttgaagagcgccgcctcaagatccgctggaactgcatgagccgcgtggacgtgatctacaagcatcccgagctttttgccaggatggcggcctgcggctgttcgctgatcaccatcggcttggaaagcggcgttcccgaagtgctggaaaagatgcacaagcagatcgacagcacccaggtgaaaaaggcggtggacacgctcaaccggctcaggatcagccatgtatggtatatgatcctgggcagcggcgatgaatttgaccatccccgctatatccgccagaacatccgctatttccgttccctgcccctgggaatcgtggtgatctccctgctcacgcccttccccggcacggaggtctttgacaggctgcggcaggaaggaaggctgcttcattatgactgggaaaagtatgacctgacccactgcgtttaccagcctcaggggatgaccccgcaggagatggaacgcttccagtccaaagcctacctcagcatctatctggggaagaattggcggctgatccccatgctctacagaggatttcgctccgggacattaaagttccgctcggtgagtacaagtttcaaggccctgctcaggacagccctgctcaaggcaaagttttcggacgcgatcgtcaagcgccgctgaaagaatcggccacccgaccccgaaacaaacaccaccagactatacactgcgtcatcccgggcaagcgcatgcttgacccgggatccagtcttttagaaacaaccagccagccccgaaacaaaccacaaccagaccccaaaaccgtgtcatcacggcctgcgaggtatgatccagtgccttggggtggcaaagtccgtttgccacagagaccggaggtctcttccaaacaggcaactccgttgcctctgccgaacggacttcggcagcccttaaattatccgcgtgagccgttatccagtcttttgaagaccgtttgaagtccaagccagctcagggcttggcgaaagtattgaagcctgtattgccggcttgaactccaaactcagccagcatggataacaaagagccctgcctggcttcaaatctccaccagggcagggctctctgaactttatgcggaaagggctatttgcggtaaacgccgttacagcatcagtccgcgacaaccgccgttacatagtaaaagcctggcgatagcgatgctgcgccgctatgtgtccactgcgattgtgagatcgaaccatcctctccaaagaccgtgaatggcccttctggacgggtggcgcaataatagaccagatagtggtccacgctcaccggattgcctgcctgatctaatgtaacatcaccccaatccagctccacattctggccgcttataatgatgctcaggtttcccggagctatggggattccggcaccggggtgaatgccaagcctggcgataaagatatcactggttccacttgccgtcaggctatcgttgccgaaggtggcagtgcctccaaaatatccagtcacgcaggcgttatccgcaccatccagggcgatgcctttgcctccattggaagtaattccacttatcgcccacagccagttgccggaagggtccagcttggcgacaaagatattttcatatgtgccatatccaaatccgcttgaggtcagggtatggctgccgaaagtggttgtgccagtaaaatctcctgtcacccaggcgttgccctcgctatccataacgatgctgcgtcctgtctcaccacctgttcctcccgcctggacaatcctgagccagttgccggaggggtcaagcttggcgacgaagatatcgtttcctccaattgttgtcagggtctggctgccgaaggtggctgtgccgttaaaatacccggttacatgggcgttacccgctccatcaacggcgatgccgtatccatggtcatcgttcgttcctcccgcctgggccgcccagagccagttgccgttggggcccagcttggcgacgaagatatctgcatatccgtttgaggtcaggggctggctgccgaaagtaactgtaccattaaatttcccagttacataagagttacccgcgccatccacggcgatgccatacccatacgcatcgtcacgatctggcccccccgctccggcagcccagagccagttgccggaggcattcagcttggcaacgtagacagcatatccggttgtcgacacggtatggccgccgaaattggctgcacccgcaaaaaccccggttacataagcattgcccgcgccatccaaggcgatgccaaacccttcgtcaggaccgcttcctccagccctgacggcccagagccagttgccgttggtgtccagcttggcgacaaagatatcaccatgtgcgcttgtcagggtatggctgccgaaagtaactggagtattatatgtagcatgaaactgcccggtcacatacgcgttacccgcgccatctacggcaatgccacgtccccaacaacctccattcccgtttgcccctccggcttggaccacccagagccagttgccattgggatccagcttggctacgaagagatcagtgcttccgcctgcagtcagggtctggctgccgaaagtggaggtgcccataaaatacccggtgacatactggttgccctggctgtcggtggctatggaagtcccatcatcataattaccccatcctcctgttggccctcccgcctgaaccgcccacagccattgtggcgtctgcgcacttaaaaccgccgctccgcagagcagcaaacaacacaatacaaagatttgtaatgctctcatttttgcctccataaggcctttttttagtcgggacacattattgcactattaagaaacgtgtcaaggaaaatagtttccttacgaatgatttatgttattggtaagtatttaacacagactggatcgggtgtttctgcatggaaggatgcggttttggggtctggtggcttgcctgcggttcacgtggataatataagggctgccgaagtctgatcggcagaggcaacggagttgcctgcttggaagagacctccggtctctgtggcaaacggactttgccaccctaaaggagcccggctcgcaggcctggatgacacggtatgtagcctggtggacttgtgctgggctgcgtccaccatcaacacgtcaccacgacaccacctcaccacgaaggtctcctttccaccttttcactatggagagagtaaaacgcaaacaatatagtattacattcaccaataacaccagcaacattctgcaaattccttcatagcgccctcccgcgctgctcctgcatttgctgccaccatccttaggtcatccttataaattataaggttgacctacggaaaatatagacttagcccaccccgtcaaatgggagcggcagttgtttcaggcgggcgcaataattggcaagggtctggctgtcagattctaactgcatggggcagacggcattagaaaaacagcatattttcacaccgctgtcaggctgtggcgacaggggaagcatgaataatggcaaaacaaagagacgggacgaattgatcatcccgtctccagttatgtggtttatgtttagcccataaagggatagcggtagtcgtcggcaggaacgaaggtttctttgatcgaccttgccgaaacccagcggtagaggttgatggccgatcccgccttgtcgttggtgccggaagacctggctccgccaaaaggttgctggccgaccacggcgccggtgggtttgtcgttgatgtagaagttgcccgcgctatgcttcagcagttcggaggcgacggagatcgcggttctgtcctgcgcgaaaatggagccggtgaggccatagggagaggttttgtcgcagaggtcgagggtctcggtgaactccttttcggggtaggcatagaccgtcagcaccggcccgaagatctcttcctgcatggtgacaaacttgggattggtggtcttgatgatggtcggctcgatgaagtagcccttgctgtcatcgcactttccgccccaaacgatctcggcgtcagacgcgttgcgggctttgtcgatgtattcctttatctttgtgaagctgcttttgtcgatcacggcgttgacgaaattcgagaagtcctggacttcgcccatcttgaccgtcgcgagcatggcgctgatttcctcgaaccatttgccgtagaggctgtcgggaatgtagaggcgggacgcggcgctgcacttctgcccctggaactcgaaggctccgcgcagggatgccaccgccagggtcttgatgtccgcggaagcgtgcgcgaagatgaagtccttgcctccggtctcgcccacgattctgggataggatttgtagaggtggatgttgttggcggtgcgcttccagatatggttgaacacctgggtgcttcccgtgaaatggatgccggcgaggtagggggaatcggtgaccaggtctcccatctgcgctcccgagccggggacaaagttgatgacgccagcgggcaggcctgcttccatcaatatcttcatgatgaagtagccgctgtaaaccgcggttccggaaggtttccagaccaccgtgttgcccatcagcgccggggctgtgggaaggttaccggcgatggaggtgaaattgaagggcgtgatggcgaacacaaagccttccaaagcgcggtattccgagaagttccattctcccttgggggagatgaggggctgctgttcgtaaatcttttgtgcgtaataggggttgaaacgccagaagtcaatcagttcgcaggcggagtcgatttcggcctgataggcgtttttgctttgccccagcatggtggcggcgttcaacagatagcggtatttagtggaaagcagttcggcggctctcaggaaaatggccgagcgatggtagaaagacatctgctcccaatccctgcttgccttcacagccgcctggatggcgaggtcgatctccttttctccgcatttgtggtatttgccgatggcgtgcttgtggttgtggggttcgatgcagtcggcggtgttgccgctgaacacttccttgccgccgataatcgcgggtatctcgatgaactggctgccgagttcatccagcttcgccttcaaagcgtctctttccttggttccgggtgcgtaagatttgatcggttcattttcaggtgtggcaacagtgaaaaacatcttcaactcctttattcatttttggttttttcagcttggaaaaggagacacactgcgccagtcgcaggaaaaatgaaggtttgcttgcgtgtcaccttttcacactggaaggcatatctgtttccggatataccctgacggcgagcaatcctgccaaaggtttagatttggtcgctcgatgacgctgccagacttaaaatggcgcatttttatgtcaaggacaaaatcccgggcggcagccggacaagcgcgggtgcaggcaaaaagacctgcctcggcaagcgggattcccatttgcccaagcgagagaaacttgcgattgtggggatgggttcacgggcggaaatcccgtccggcgggaaagaaaatccttgacacatatacctcgtttgcaggcttttggttactccaaaggtaaattttacggaatgaaaaaactcaaaggaataccgaccacgatacataagcaccgactgccccgaatcacgctcctgacgctgttgctggccttgctgctgagcgccgggttgcgggctgagattctgatccccatggatctgacgcagagcaaccacctcaaggcctatggagtcgcttttgaagcgctcaaagagcagcatgtgataaaatggctgctcaactaccggggcggcagcttcctgatcccggacgcgccggagatttccgcgctgtgcaacatccggggggtgcgcttcgagcaggtgtcgtcctcccaggtggccgccatcatgctggagatccaggacgccaatatggaagctgtggtgctggagaaagagcccaaaatcggcatctatatcccgcccaactccctgccctgggatgacgccgtgaccctcgccctggaatatgcccaggtggattacgaccgcctctgggatgacgaggtgctggaaggcaaactgggagattatgactggctgcatctgcatcatgaggatttcaccgggcagtatggcaagttttacggctcctacaggcacatgccctggtatcagaacgatgtgcgcaccaacgaggcgatggccgccagacacggctatgccaaggtgtggcagctcaagcatgccgtggcgcagaagatcgaggaatttgtgatgaacggcggcttcctctttgccatgtgcgccggcacggacaccttcgacatcgccctggcggcgcggggggtggatatcgtggactccctcatcgacggtgacggcattgatccccaatataaaagcaagctcaactatgagcgctgcttcgcattcgagaacttcaccctcaagaccaatccctacgaatacgagttttccgatatcgacgccagcgactactcccgcctgaggggagcggaggcggactactttcagctcttcgacttttccgccaaatacgaccccgtgcccactatgctcacccagtgccatacgaatgtgatcaacggctttttggggcagacgacatcgttctttaaggacaaggtgaaaaagagcgtgatcatcctggcggaagtgccggggcaaaacgaggtcaagtatatccacggcaacatcggcaagggcactttcaccttttacggaggccacgatcccgaggattaccagcacaaggttggcgacccggaaaccatcctggaactccataagaattctcccggctacaggctgatcctgaacaacatcctctttcccgccgcggagaagaaacagctaaagacctgaggacgcgcgatggcaaagttttatcccaagctctatcagacccagctcaaggttgggctgttcacggttgtcatgctgatcatagccgtgtttggctatctgtggctgagcaagcgcatctcgatccgttcgcagcaagacctgcaggtgggcttcaccgacgtcatggggctggaagtgggcgacaaggcgatgttccggggcatggaagtggggcgcatcaagagcatcgcggcccgcggggacgacatcctggtgacggcgcgcgtcaaccgggggctcggcctcaaagagggcgcggtcttttacatctcggacagcagcctgatgggcggaacggtgctcaacatcgcccagggagaggggccggggctgctcgatctgggcaaggcccaacggggcgaagaccccagcggagtgatggccctgctgggcaaggcgaacgccactctgggagagttcaacgcggtgctcgaggagctgaggcgggaaaatggattgattgcgaagtcctccggcctgctggacgatgccggcagcgctgccaggtcagtggaggagctttcccaggatgccaaggcgcggctggcggccaccctgcaaaagatagattcgctctcggagcggataaaccgcgtcgccaaagccaacgaggagcagatcaacacggtgctgcaacgctctccccaggcactggaaaacgtgagcggcaccctggacagcctcaaagcgctttccgccaacctttcccaaaccgtcaaggcgctgaatagcggaaagggcagcgcgggactgctgctgaacgatgaagccctgtaccacaagctgtcgcgctcggttgccaatctcgactcgctggtgctggatatccgcgcccatcccaagaaatatgtgaagttcagtctcttttaaggatgccgatgaaactaagactcgccttgcttttcctgctgatttccgctttgtgccatgcttacaactttggccagaacaaggtcaacaccacacccgaggcgtggtctaccctccagaccatgcactttgatgtttactttccccggggcgagaacgacttcggccgcctggcggcgctgctcgcggaagagacctactataacctgcgggcagacctcaagtatcccatctcctcccgcatcccgatcatcttttaccgcagcaagagccagtttcagagcaccaatatcatctatccccttctcacggaaggcgtgggagggttcaccgagagcctgcgcaacagggtggtgatccccttcgacggcagctaccgcaacctggaagacctgatcgcccacgagctaacccatgcctacgccaacgctttggacaaaggcatgatcaactcctacctgtccctccggcctgtgtcctttcccttctggttttcggaagggctgccggagttcctctccattggcggagaaaacgactataacaacatgttcatcctggatatggtggtcaacgactacctcgtgccgctgggcaattcggacggctattttgcctaccggctgggggagagcttcctggcctacatcgccaagacctatggcagggaaaaggtgtcggactactactttaccatccactcatcaaacaatctggacgcggcaaccaagaaagtctttggcatcgatttcgagagcctggaatcccgctggcgctttcagctaaagagggacttctatccccgcgtcaacgaccatggagtgccccaggaagccatggagcaacgcacccgctccgacaaggatggctcctatttcaactttatgccccgcttttcgcccaagggtgaccgctacgtctatttttccaccgccggggcgcgctacagcgtgtggatggctggaatccacgaaatggacagggcaaagaagatattcaccggggaggccaccggcaaagccgaggagttctattacttccgctccaacttgagctggtttcccgatggcaaacgggtggctttttccgccaagacctcctggggcgaccaaatccacatcctggacgtggacaggggaaagatcgtgcagacggtcaaactgccggagtttgacgcgatatatgaactggatgtggctcccgatgggcaaaaactggtctttgccggacagcgggaaatgcgctgcgacatctatctccacgacctggacaccgggcagaccaggcagttgacggatgactatttcaacgacgcccagcccaggttttcccccgatgggcagacgatcgtcttttcctcggagcgcagcctcaaccccgaatcccaccgcaagggcttctttgccaatgtggtcgccaatatctacagcctgggtctggacggcggggtgccacggcaactgactttcgggatcagggactgtagctggcccatgtttgacggcactggtggcaagctgctctacctcacctatgaggacaaggtcagtaacctccacgccctggatctgcaaagctccgcccgggcgaaggtgaccgatgtgctggcgggtgtctttgccgcggatatctcccatgacaaccgctatttgctggtttccaactatttcaacaaggcgtggaacatctactttgcccacgatcccctgaaaaacctggcctggagcgacagcaccgcgcaacagctttccaccccctctccagacctcatggcaggggtggattttgggcaactggactactttggcaagcgcaaactcactccgctgcgcaggataaaccccgcccgccagtatgacgaacgcttccccatcagcggggaataccgcccctttgagctcacccgcgaggattccctgtttctcacccgggactatagctatgacgaccgtcccaccggcaaagacaatcctcccagaataggcggatacaggccccgcttctctttggacagcatctggggtggcctggcatattcctccgccgtgggaaccatcggctatgtggagcttggcctcagcgacatcatgggcaaccacggcatcggcgtcaacgtcggcgtggcgggtaagctggaggaatcgaacctgttgctcacctatctgtatttgaagcacaggatggactatgggatcggtatctacaacctcgtggacgacgcctactatctggaggagggtggccttaccgacactttgttgcgttaccgggaacgcaagagcggcctctacatgctgctgcgctatcccttcacccgcttcacccggctggagtctgaccacatgctctaccagcgcggtcaatacctgtcctgggcgccctatgtggagggctacgaactgtgcgatgaggtgagcctcagccagaatcttgtttacaccccggggctttcgctggtgcacgacaacgccctctatggctccaccgggccgcttgtgggctggcggggcatgtataacgtgagcgccaccctcgccgacggaaaggtggaatacttcaccaactacatcgatctgcgcagctacaccctgttcagccggcgctacgccatcgctttgcgtgccatagccggagtgagcacgggaaaagacccccagcgcttcaacctcagcggctactatggggtgagggcctacagggacaacctcagcggctacaaaaaggcggtgctgagcgcggaactccgctttcccttttttgaatatatcaatctggcattcccgatcccgctcaacatccccaacatccgcggcagcctgtttgccgacctgggaacggtgttcgacagtttctcagacttcaacgccaccacgggggatggcaggctggatgacctcaaactgggctatggcttcgggccgcgcctcaacctgggctatgtggttttgcgtttcgacatcgcctggcagaccgatctttccaagacctcaaagcccacttattacctgagcttgagcgaagatttttagataatttaagatatatacgaggagacaacgatgaaaatcgacttgttacgcaggcttaccgaaaacatggaaagcgtgatcgttatgatggacgaaaaaggcgatctggacagtgtcgaatacctgcccgaaagtgtcagacaggcgatccagctctatctgaaacaaaacgaattcaaatttgagttcaacggaatccgcagcttccccatcgtgctacccaagcactgcagcaacgtggtgctctgcggcgtgggcaacgtgaaggaattgaacggcgcgaaactgagaaccctgtttgccaatgccctgcgcgcggtgatgaagctggacggcaaggaagtctatctctttcccgcctttgccaaccccctgggagatgtgcagtttggccacatcctggcggaatccgccctgctggcagagtataaattcaacaaataccaggcggacgccaaagcctgcagcctggaagcggtgcatctggcgatggaactcaagaccacccgccacatcaaccgcggcatcctggaaggccgcatctttgccgacgccaccaatctggcacgcgatctggtgaacgaacctgccaacgtggtcaatcccgacacactggcggagactgcccgcaagcttgcgctcaaatacggattttccatcgatatctttggtccggacaagctgaaacgcatcaaaatggacgccttccttgccgttgccaggggttccgccgccgaaccgcgcctgatcctgatgtcctacaacggcaatcccgattcccgcggcaaaatcggcctgatcggcaaggggcttacctacgacagcggcggatactgcctcaaaaccccccagggcatggtgaacatgaaaagcgacatggcgggagcggccgccgtgctgggcacctttgtggcgatttccaccctcaaactgaaagtaaacgtctttggcgtgatcgccgcctgtgaaaacatggtctccggccacgcctaccataccggcgacgtgatccgcagcatggctggaaagaccatcgaggtcaacaacaccgacgccgaaggccgcctgaccctggtggacgccatccattacgcgatcagcaaggaacatgtttccaaggtcatcgacatcgccaccctcaccggagccgccgtgggagccttgggcaaccagatttcgatggtgatgagcaacagcgactccttcctgaacaaggcgaaacacgcgtccgacttcaccggcgaacttatctggcaactgcccgcccatgaagaatatctggatctgatcaagagcgacatcgccgaccttaaaaacagcggcgggcctctggctggagcgatcacagccggcctgttcatccgcgagtttgtggacaagaaaccctggctgcacatcgatatcgcaggaaccgcgctcaaggacagggaaagcggcatcaacgcccacggggccaccggggttggagtgcgtttgctgacccaactgctgcgtgagatggagtaggcacatgcgcagaatcctgcccctgctgttgggatcactggcgctgctggctctcctggcctgttccggctcgccccgggaccagcgggagaccgtggtggtgtcgatctatccctatgaattactggtgaggcaactggcaggcgacagcctgaatgtggtcaccctcattccgcccaacagctcgccccataccttcagcccaaagcctgccgggctgcgtgccttgaacggggctgccctcgccatatccaatggctttggcctggaaactaatctggggcaagcttttgacgccttgggcgacaggcatgtgaagatcggggatcagctccggcagcagcacgccattcctgaagatgagaccaatccgcatgtctggctctcgccccggctgctgacccacatcaccctgatcctttccgatcagttgcagacgcgttttccccacttgaaaaccaccatcagcgaaaacacgggacgcctgatctccgacctcgccgccctgcatctgcgcatgcagagcgaacggagcacctttacccgcaccccggtggtcacctggcacgacagtttccattatctgctcaaggattacaacatcgaggatctgggcaccgtgcaaagctcccctggcaaggaacccactccccgggagctggctcgcatcggctcgctggtcaaaagccaccgtctcaaagccgtttacaccgaagtccagatgagcgacaaagcggcgcgcgccctggccagtgagttcgacctcaccatcgttcagttggatccgctggggcacagcttcaagcccaagagcatcatggacgttatcctcaacaactgggaggggttaaagctgggttgggaatgatgtttccgcctttttccgcctgccttcccatccggccctcctttgaacccttaaccccggggggagacatccttaggtattccttataaattataaggttgacctaaggttgtcctaagccaaaggtaaggattggaatgagggggatacgatgatcgaggtgcgggggctcagccatcgcttcggcaacagcctgattctggaagacatagacttgcagatcacgcggggggagtttgtggccatcatcggccccaacggggcgggaaagtccaccctgatcaggctgatcctgggtttgctgcccgttcagagcggcagcatccgcatcgatggtgaggtgcacctggattggctgcggcacaatccgatgggctatctgccccaaaaggaagagtttgaccgcggtttcccggcttccgcgctggacatcgtgctgatgggcttggcggcggaactgcccctgggaggcagattcacaaaatcccatcgggaacgcgccctggctgccctggaaaccaccggcacggcagaactggcgtccaaacgcctgggaagcctttccggagggcagttgcagagggtgctgctggcgcggacgctggtctcgcgcagcaattatctgatcctggacgagcctgaagcctcggttgaccgtccgggggtgcagagcttctttgccttgctgaacgatctgaacaaggcaggcaagaccatcatcaccatttcccacgatctgcatacgctttccgaacactgcagctcgctgatctgcctcaaccgcaaactgcactgccacagcaagaccgaactggtgaacgccgagatcatccgtaaaaccttcggcgaagcggtgaaactgatcgacaaggactactgatgctggaatattcctttctgatccgcgctctggcggctgcttcgctctcctcgctctcgctggcgctattttcgccctttgtgaccctgcggcggatttcctacatgggcgaagcgctttcccacattgcctttgcgggcatcgcgctggcgatcctggcaggctggaatatgcagttcaccgccatgctggttgtggtgggggtgagcctggcaatcagttggctctcgcgccgccagaggctggaggaggccaacgccatcaccatcttcctgagcgtgtccatggccatcggcatcatcctgatctcgctcaacaaaggctacaccttcgatctggccagctatctgtttggcaatgtgctgcttgccaattccaccgatctgtggctgctgggagcggcggccgtgctgaacctggcctttatcctggggctttacaaagaactcttttactatgcctacaatccagaactggcaaggttttaccgtctgcacgccggcctggtcaaccgcctgttcatgatcctgctggcggtgaacatcgtgatcaacgtgcgggcggcgggcatcatcctggtgagcgcccaactgatcctgcccgcggcggcggcgttcaatctggttgaccgcctggacagggctttggtgttctgcgttgccttttcgctgctggcatcctttggcggcttcgccctttcctggtggctgaacctgcccacgggggcgagcgttgtggtgctggaatttgccatgtttttgctgagcctgcttccgagggctttccggagggatggatgctgagcgatccgcgcctctggtctgtcgtcgcccacgctctcatctggcaggctgccgagcctaaaatgcaggtttggggggagagagcggtcgcgctgctgaccggcaagcccctcaatcagacccgcagattcgatgagcggggcatccccgtccagctttaccgtgatctgggcttgcaatacaatcccctcttcgtggcgtggcaagccaaccgggactattggcgcaggactgatccagccaggcatgaaagctttctgaggctcaccgattggctgctggagcactccgagacggaagagggaaggctgtggattccctatcgcttcgatctgcccaggctggggctgcgcgctccctggtacagcgctttggcgcaggccagaagcatgctcgcctttgccctgcgttatgaactgaccggcgaggacaactggctgcgctacagcgtcatggcaatgcgcaccctcgcgcccggatgcagcctgacaaagcgcttgccggatggctccctctggtttcaagaatatcctggcgaggggcaaccctttgtgctcaacgggatgatggcgatcctgctttgcctttgggacacatacaaaatcaccgggcaggaagaggcttgcgggctgtttgaagcgggatacgggggcttgcttgccaagctggatgggttcgattaccgcggtttcagttattacgatctgaatggcaacattgccagccgtaattaccatcagctacacatctcctatctcaggaagctaaaccggatcaaaccccatccgaagcttagaaaatacgccttccgctggcaggctcacgacctgttgccggtgggtttgcagcttttttacaatccgcgccccaggcggatagccgccttcctgctttccctggcgggatgcgtgggaatcgggtggctgcttaccttggcgttcccgcgaggaacttgaccataaagtccggcgtatagctggtcttggcttgcctcaaaccctcgaggccgatgtcctgctcgcggttaatccatttgtagcgggattgcaggtagcgggctgtttcccagttgattagctgcgcgctgccctttttgtcggggtcgaacttctcgaagtgcaccgtcaccatgtcctgcgtctgcgggctgaagatggaataggcggcgattctttgctccaggcagacgatgatcccctccacgggcagttcgtcccacatctcgagggtgttttggatggctttcatttcggtgtccagatagctgccttcaacgtgcctctcgcggcgccatttctcggtgaagcgctcgatcacctcgtgtttttccctgcttatcggcagcacatgatagttcggataggcacgcctgaactgggaaatcaggtttttcttcttggttagcttcttacctctcagattcaccattttttccgttgaatagacatagtcgtcccagtccctatcgccgcggatctcaaagtgcctgtccaggcccgggcagctttcctgccagtcttccggtatgatcagcagtttcgcctccggggcgtcctcgcggtagaggtcaaaaagttccctcgtcttgtccgcgcccaatcccggccccaaggggtagagcagataggagtattggggattgaccagcaccagatggccttcccagagcgcgaactggttcttgtagattctgccccagctcaggaggttgcagatgttatagtcgcaggactggcgcgggtagcggatgaggaactcgcgcaggaggggaatctgggctgtggtgagagcttcgagttttagcatactgtgacgcgcttagtcctgtttcagcaggaacggcgtgtatccctccatccgggcaaagcccagcccttcgtaaaacctgtcgtagcccggttcgctgatcaggcctatccactgcattccgtccccgcgcaggcgttcgagcagtttgcgcacgatggccttgccaatgccccggccgcggtagtcgctgtgtaccgtcacatcctggatgtaggcgtcgctaaccctgtcgctgatagccctgcccatgccgatgatcctggagccgtgggtggcaatcgcgaagcagtgggagttcgcgattatcttttccacagtcctcagatactcaggattgtcatcggtctgccaccatcccgcgtggcgatacagggcaaggatcgcctccgggtctgcctgggtgactattgaaagttctatgtctggcatgttttagctccattctgtaactgattgtgtcaggtttcttttgggaaaaaacctgtaagcacggtcgcatttataaataaatgtccatttctgtcaagtaacttgccgggtggggaatcggatttctcttgacagattgccttgaaaacgcgagagataaccaatccgttcattcaaggagccaaaatgcccagattagtcattttcagcttactggcagccctgttactggcaggctgcaactcggtttccacgcttcccgagcagacgggtgagctgccgatccgcatggacctcagcccggcagcccagctcaatttcaacgtctcgagggtggcagtcaccatcgtcaaaggttcttacagccagagcatggaccttgtaatcaccggcaatatggcagaggggactttgcaggacttggagccgggcgtttacgccatcgatgtgcaggtatttgacggcctcaccctgatagccaccggccagggcagcgggctggtctcaccctctcagaccaccacggttcacatcaccctgcagttcgttcccggagggctggaagtggttgtgggatgggggcttccctatgaatccagccgccgcgtcctgctggtgggaaacagccacacctacttcaatgacggggtggacactcatctgcaggccctgatcgacatggcgcaccccgaatggaacgtggtggtgaacgccagaaccagcggcggatacaccctggaaaaccactttcacgatccaaacaccctcaccgccatcgccacgggagattgggacctggtgatcctccaggaacagagcagccgccccatgctgaatccggaactcttttacagctatgcagattcgctgaacaccctgatccaccaggcgggcgccctcaccggtttctacatgacctgggcgtggcgcaacaacccggaaatgtatgtgccgatcagagatgcctaccgttatatcggagcctggctggatgcccctgtggttccggcaggtgtggcgtggtacaacgccagttccctccccggcatgccaaatctctacgaagtggacaattaccatcccagcatctacggcacctatttggtggcctgcctgatgctggcccgcatctggaatgtcaacccggtgggcaacaggtattttcccccacagatcgacgccgccacggcttacctcctccagcagcttgcctgggacaccatccaaaacgaataccggggcctggatttgcactccaggcggtgggagcagcctctcgcgacagcggcataagatggcggcttgcaggccatgcgatcgagtagggtgtgagtcagtcctgggaaggatttggatagagaagagttgattggattcaatgcaaatgcccggttttcaggccgggcatttacttagtgatcaggatggatggagaaatctatttaatcatcaccactttctgggtgaagctggccttgcctgcagtcatgcgcaccaaatacattccggtgccgcagtcgcgtccttgcaaatccttgccgtcccacacgtagtctttgtagctgccggggtttttgatgcccaggtcatcgctatacactatctgcccgcgggcgttgtagatctggatgctcaccggtgtggggccggcgtccttgcctatgctgaaggggatgaaggcataggggttgaaggggttgggataaatcttgttgagggccgtctgcagaggaatggtagccggcgtcgtggaggtggacgaaaacgcgatcgacacagggccgtggaagctgctggtaccggtttcgcgggcttccagccaataataatagacgccgtcttcatagacctcggagtcggtgaactcataggtctgcatgttggaggtattggtggcggggatcagcgggctcaccatctgggcgctgttcaggtcatcagaagtgccgcgcaggatgtaatagccggtcatgttggtctcggactgggtgacccaggtgagcttgacataggattccgcggacagcgaagccgtgaaggaggagagcaccaccggcgtgggagtttggtaatagaggcattcgctcactgtgactggctcataatatgtataatggtcgctgtaaaaagatgtgtagggcatttcatcgatccaatagcagacccagggttgctttttggtattcaggattttaaatttaagatgcatgagttgggttggggttgcgggcaggagatttgcatactcttcatcttctggggggaaattgtatatgtaggttatggcaagcaagtacaaagctggcgtttggtggatgtcagctgtgtcattgagacgaatacgatagaaagatactggtgctcctgcaagaagttctccacgtgtaacagtaacattgtcgttggtataaaggtcctcgccgaaagcttccgtatttaagtaaagccagatgttgccatccccgatcctggtcagattgtcttgcgcaggtggagtggcctgggccatgaggtcaaactcaaagtaggagatgccgccctcttgggtgatttgtgggttggcgaacgagtagaggattcccgcatcccctggttctccaaactgagcagccaggagaactgggatcaggaggaccagtaaacataatagccttttcatttatactccttataattattaatcatggtatttgcgagatcttgccagtggtagtataccagaacccattcaggtcaatggtgttgactacgccgttcaggtcaaagtcggaagtgaagtaaccatatagcaatccagcctgagtgaaccagatatttgcatccgggcttgcaataaccccattttgatccgcttcgccggagcaggtcgccagcactcctgcctcgacctcacttactccgtggacgtttcctccaaagatagagttcaacagggtcatatcggcaggggagtaattctgcggatagggggtgaaggtgatgggcgctgccgacatcacttccaggtgattgcgatggcgcacaatgaggtagtattccaaactgccgctgtagtcgaaagccagggcggggtttccggtcaggtcaactacggtgccgtcgtccagcaggaagcagttttgcagttgttcttcggcgccggtgaggctgggccgcagttgcactgtgatccagtccacgatatggcgggggctcacatcggggaaggcgtccagggtgaggttggcgtcatagggcgaggtgagcggcaggtaaccgttgtcgctcaggatgtgggtcatgctgccgccggtcacgtaagggccttgcagaaacaccttgaggccggtgtagatatagggcggggggttgatcacgatgttgccgtcctgtgagatgtaattgaccttgtgattgagcggttcgcgcaggacgatgtcggagagggtgacgtcggtgccttgcgggccggtggattggtccctggcctgcagcgtcacgtaaaacagcgttccagagccgaaagcgccgggtgtgtagcccatgatagagcagctgattatatagccttcatccgcctcgagcacataccattgggtggagccaacggaactgaggaaaggcccttcctgaaaggcggagatacccgctatttccagataggtgtcgtcaaaatccagatggatttggtacccgcgcagggagacatcctgagagccctcgatgttgacggccagggtcacctgatcgtagtaatagatgtattcctgggcgggctccacatagatcatcacgccggggttgatcacgatgttgcagtcggcggagctgaagagcaggttctggttgagcggattgcgcagaatgatgtccgaaagcgtcacatcggttccggttgttccggtggattggttttttgctttcaggtccactgtgaacagagtgccggagccggtcgcgccgggagtgtagcccatgatggaacaggttatgatgtagccttggtccgcctcgagcgcataccattgggtagggccgaaggaactgaggaaaggcccttcctgaaaggcggagatatccgctatttccagataggtttcgtcaaaatccagatggactttgaagccgcgcagggcttcttgcgcggtcagcccttccaccttcaccgccagagtgacgggctcaaagtaggacaggttatagctgggttcatcgatataaactctgatctcagcggaaacggtgtgcacaatcaggattccgaataatactaacaaaatcgctttaactgtcatgcgtcgcagcacttatttcctccttcatttggtatcgggatagccagaggcggtgacccggaaaaacatgcggttggtttggatggggatgctccagaaggggtctgtgagtccggatgccaccatctgccagtctcccgcgttggggtcttgcgcggaataaacagagtaggtgcaaccgctggcttcttgccagttcagttgcaggttgttgccctgcaggctcagacacagtccggtgggctgcgatgggacgagggtgttgtctgtgtccgtggccagcacttgagcgaaccgggtgtggttgtcatccagatactgctggttgaccatcaggttttgctggaagctgaagccgcaggggaagctggtgtccagcagcctgagcctcacattcagcagttgttggggcgtggaggtgagcattccgcccagtccggcaggcatcagatactcgaaggtgatggccagcctgctgggggagttgtcgttcatgatgagattgtaatagggaaagggaaccgcgttgatcaggctcccgtacgtgactgccgcgttgccgttgctcttcacattttgcccgaagagggtgggattgtagttcaattgcaccatcccggagccgatcctctgattcgggtcggggctgctggccaaaatatccagggaaagaaagctttcgccattcacccttaccacttcgggagacagggtgaactcgatagtgccctggaaaccagaacgccgcggcggggcagcctgggctgtcagaggcgcaaggcataacagggcaaggattgtgcatgacaggagcatcctgccgaaaccgccagccttcatcatgggttaacctccgcgggcgggacagtgctcactaaaccggaattgagacgccaaaattcattgaggtcaaccgtggaaacataggcgtccaggttgaaatccgcggaaagatagccgttcaagccggtttgctctctccagtgggcatttcggtctaccgcgccgatattgccgttggcatcggcgtctcccgcagccatcgcgtggataccatcctccacctctaccatcccgccattgccatagatatttgcaatatcggtcaggtcaaacacggcggggcttccgctgctgctcagagtctgggctgtggtgctcataatggccatgtggttacggtgcctcagcaccagatagtatggtccaggagagctgttcatcaagatcagatatggctttccaggcgtgcgcaggtagccgccgctgtccaaaaacaacgaataactgcccacgggctggccgttgtggacggagcgcagttccagcagcatccagtccaccacatccccgggaatggaatccacgcaggcgggggcagtgggatagggtgaattgaggggaatctccgcattctgggttgtcagcatggcacccccggagtatgccccctgcagccagcacttgatccgcccataggcggcgcagtcgccgatgatcacatccccgtcaaaggcttccacacccggtatctcatagccgatcacgtcgtaaagttgaatattcactatgtctatgctgctgaaatctccggcgagggcggtaaaattgaggttgagcatgtcaccgggcccggtcacatacagctctgcccccataatgatgcagggaacccgaatcctggtggggctttccctgacgctcagaaaccagtattgggcaaatccgctgagcagttctccaatctcggcgccctgatactcgatcttgtcgggatcgtattcgaaccacacggtgcaaccgcggatcacggtgggggtgtccagagtcacgtgcacagtaaattcttgctgcgcctgggtcaccttgggattgggtgtgatgctcacagagatcgcactcaagcccagggaggccatcagcagcatcaaagacaggcagaatctggacttcattctttctccctaaaagggggagtccgccccgtggggggcgaactcctgttgatacttttatttgattaggatacctttggtggtctgcactttacccttggtttccatgcggaagatataaactcccgaggccacggggcggttgttttcgtccaaaccgttccaggttgcctggtaggttccggcagccttgctgtcgttcaccagggtgcggataagctgtccacgggcgttgaacactttgagcttcacatatcctgcttccttgatcccaaactggatggttgtgctggggttgaaggggttgggatagttgctgcctagatagctgtgggcggggatcacgttcaccacgtctccgttgttcacgtcgccggtgggattgttttcgatctcgatttcctggttatcacaggtgcgggctgtcatgtgttccaaagccaggtcggtgttggtgccggtcacggcgaaggtgagggtggcgatcacgccgttgccttccacgaccgcgtcagctcccatggctgctatggaaacagtgaccctgccatcggcgttggtgtgcagcagcaggctgccttcaggccacacttcgccgctggctacgccaagcagatgcagaccgttgccatagctcacggggatatccaggcctttcacaaagccggcgttgccgtccagaaccagttccacgacaagctggccggcagcgctgtggctgttcaggctgatctcgatgggattgatttcagggaagttcctgatgtaataggtataattcgtgttgtcgtagttcatggcgaacatcatcaggtcttcaatgtcgatcttgttatcgggagtggggcgggaacggcgcatatagtccgtggagggtcccacatcgatgacgttgtaagtgtcatcccagggcaggtcggtggtcacgccgcgtccccaggctccggttagaatggcaacgtcgttatccagaacctggccttcgatcaccacgtcgccaggccagtaggagatggactcgcggtagaagggggcttcgggggcttcgctcatgttgcctgcggcatcctgcgcgaagatggtcacgtagtaatagccgcgctccatgccggtgagggcataggggaaggtggcgggaacaggatcgacggtatatttcacccagccgttctgcgggctcgcgccatagggatcgggagcggtgatcgaagctggttcctgatggttttcatattccggatagtggttggcagcgtctccgcccatggcgtcgccgtagctcaggatccagatatggttcttcaccacatcgccggtgttggtccacatcaggtcgatggagttgttcgcgtttggtgtggtgcggcagggatgcagttcagcggtcatctgaggttcccagaccacggcggctggaccggtggtgtcgatgatgaaatcccaatccaggatgtagtagttgccagcttcgtccaccaccagcagatacgcggtataggtgccatcagccagggagccgatgggcagggtccagttgtcgatatcggtcagggtgccgtccactgcgccaacgaccgcggtgaaatcgcccggatcgtccggagctgtggcatcctcagcctggatcaggtacatggctgtagccagatcccagtcgtcggtataggtgaggttgaacacgggttcgataatgccgtcgccatcaacctgaaccatatatggctcgggataggaggcgatgttgtcgatcacgaccaggggagcttcgctgtcgatcagcacccatccgtcaacggtaccggcgcagggtatttcatggtaaggattttggtcgtccttgaggattactgagtcgtagtcaatcacgatatagcagccgttaggcacgtttgtgtgtggatccgcgttgctggtgagtttcaccgtgagcagttccttgtccgcgccggtaatgccgtctgaagcgccaagatagctgccggtaatggtatagaggtagtaatcttgatctgtatcgtcaaacaggatagattgtatcatcttgaaggtgtactgatcgtaggcgctgccaagggcgaaatcgatgtttgacccagtatgaacaggctgtacgaaatcggccctgggaatcttcaatgttaaggtgaaagcacgcaggtcttctatatacgacgctttcactgaataggtctgttggaagctattggggatcacttcatcgggcacgtcaacatacagtaacgccgcgttgccgtagataatctggtcaactatcatgtatgtggggagatatgtatttacagtaggcacaagggtgttcacgtccaaatcactggtgtaattggcaacatggatcaggttgtctgttagtgtatttccatttataacgaatccggttccatgagctattattgcttcatctgtcccggaaacgctattgttggttatggtaacaccattgctatcataactatatattcctacctggctgtttgatacagtacatgagcttacgacaatgttctcatcttcgcaaagcaatatagctgctgccacccaaggctcgccaacattaggatcgggatcgatccaatatacatcgctaacgttgcaattgtcgattgtgcctgttgcacccatcacttggattccattttgcgctgtaacggtcgttgctccctgacccacgacattcacgtagtcaaggtcaactgtcaagttgttgtttccattcagggccaggccattcttctggaaatcagtcacattaacatggtcgagtttgatgttgtaaggcccggtggtgttattataggcataaacgccaacgccatgctgagcgccgctgaatgtatcgttcatgatgttgatcacatcaacgtcttcgagggtaccgccagcgttccagaacccgactccgcagaagcggtagttggcgtttcctttgttgttgccgtccacggttacgttattgagcgtgaattcctgcacgccatccacgaacacgaccggcttgttagctgctgaggttgtgaacgacagaggcaggacatccggcgactggatcaccaccggatcagtgccaacaccacggatggtgaggtcttcggtagtgacatgcagttgttccacgtatgtgccgggttgcacctcgatagtatgtcccgccagggtttctgggtcatctatggcttcctggatcgttgtgaaccactcgcctgtgtcgatgttctggacgttctggttggagagtctggtcattgcagaatccaggtaccagggatcgtacaacacataacccgaaactttagtgcccagcccatcaggattgtcagcttgaggatcaggattgatggagtcatcatccagagggccgctggcatctccccaccaggttttggtggcatctaacaccgcggcggttgttgcatactggttttctactccaatgacgcaattggtgatcgaattgttgtttgcggtatttccgcttgggccggggataccgggctgtccccaggaatagctttgccagatgcctctgtacacaccgcttatggtattattgctaatatcggcgtttaacacgttaccgagtattcttatcccgcgggctgaagtcgtgggtaatcctgatgctccagttatagtgttatatgcgataactggattgtagaatccgccgttatccccattagcttccagttggatgccttttccggttgcagatagattcgatatgttgttgtaggatatctccacatcggtgtatttgccgccgagatattgattataatgcccaccatacggggcggacataccaatgcctgtgccggttgtgatagtattgtgatgaatatactgtctggcggtgatctcatacatttcgggagcttcacttccggatttctcggtcatgaaccagattgcgggaaatggtgcacagtcagttatagtattataggatatctcgctcgcgcccctgtgacgttccagcccaacaggattgtcataacaattgctgatgctgttgtgatggaaaaacaggttggatgcacaattactgctccaaaggccgaaaccgaaatctgtatagaccccagtggcgctgtcgtatccaccaataatggcattgttggatatctctaccattgctccggtagatccactgccaagcgctaccttggttgttcctacttcttcagtagtcgagttcctgatggtaaagccatcgagtttcacatttccagaagtggtgtttatcctcacaacataggttgctgttgatgataccggatctatgatcgtgttagcggctccagcccccaaaacgcttacgcctttattgatcgtaaccgtttcgttgtaggttccttcggctacttgaatgacatgaccgggggtggcggcatctattgcggcctgtatagtgggaaaaatagctggaaccgcgagtgccgtaccggaatttaccaccacgtgattgctataagtattggctggagaaagagcattttggatcctgtccagcccaatgctgggattcgaagtctgggctgtcattgtaacgggatatgagccgttgaatgtgttacctgtaatcgtatattccccgggacccctcatcctgagtgcttccgcgtatcttgtggtcgatccgctgaacgtattgccggcaatgatattgttagttccggcaaattccagtgaggctaatgtgttgccttgcggcgtgggatcaatcggatttccattgttgtctgtgatgctcatgcctccgcatatcccggagaggatgttgtttgtgaaagtgaagctctgagtgttggttgtaccagctcctccaccgaatactaccagttggcgtggtacatttggcaagttgtattgagcgccaaatcctaccccacccggattatccccgacgaaggtcttgcctgtgatctcattgccatttatcactatattggtgtttgcggcgttatattcacccattagggcggcgtcacctctggcttcgatgatgttgccctcaatcgagatattggtctgtgcgccggtcaggtagatggcggcaaattcaacaccgggagggccatcgattcctttaacggtgaaaccgtggccgattgtgccaattaccacgccattccttccgcttttcagattgatggtgccagtccctcctcctgagttcaaaccatcaattatagttgtggctgcaccattgacggaagtgaggctgatgttcttattaacggcaacattttccgtgtaggtgccgtcctgcacttgaatcaggtcgccgtcgcttgctgcattgaccgccgcctgtattgtggcaaaatcaccagtggggccaacagtccatgttgtttgagccctcaaacctactattcccaacaatgccgttaggaataaaactaaaaaaagagttcgtcgcattctttactcctcttgtttttccgatggtccggtttttatcccgggccgctcatgggcagcctgctggagggtgcccgccaatagacaatctatataatacatatatttctcgtctgcgcgggaggaccaaccggttttaaacaggagtagcgccaacaatcctaaaaacagtttccgaataactggtcagccatgctacaaacaatgaacccgatggcctgacagatctcactgaggggtcaccgaagatcaaggtgcaaaaaaatatatcttcctattgatgtcaagccttatttccgggtggaacgtatataatggtatgtttatatttgctatcttgaaaacggtaaaatgctttgcagagggagattagaccatgaaagccatacttgggcaatatttcgccctcattcgcaaccctctctttggcatgggtcttccttaggtcatccttataatttataaggttgacctaaggatgatggggccaactcctctggtatcaaatgagggcgataccttctgcacctgaaaaaaactgaacattcaaacacctccttccatatatataggtgctacgaatgtgctctgtgccttgcaggcaggctgggcgggcatcgctcagaccatggcgtttcaggcggctcgtacatttagcttgacggaataaatcagagccgcataaagtccgacaaatcctgaacgcggttcacatctctcgctttatcagagagttctgaatggcatgcgtcatatccgcgaagagaaaaggatttgagaaatagtagaaaagaagaggtgctttatgcaattggccagctttctcgatccccggctgatcctgcacgaacagcggatattggatctcgacaagatctatcaggctctggtggagctgatttgccgctatcacaagctgccagtgagctgcccggaactgatgcgcctggtgcgccagagggaagaacaatcgcatactgcctatcccagcggaattggcatcccgcacgtgcgtctggaagggctggacgacaccctgatcgcgatgagctttttgcagaatccggtgcaatctgaagatataaaggtttcctgggtggtgatgatcatcacggacaaaagcagctccaatacctatctgaacatagtttcggcgctgttgaagatgtcccgggatgccgggctgatggaggaaatgaagcggcagcacgacgggcacggggtggtgcaggtcgtcaaacagcacgggatcgaggtgaaaaaggaagtctgcatcggcgatatcatgacctccagtcctgtctcggttggcccggatacgctgttgagcgaactgagcctggtcatgagtgacaaggaaatctcgatggttccggtcacggatgaggaggggcgctatctgggcgaggtgagcgtgctcgacctgctcaaggtgggggtgccggactatctgatgatgattgacaatctgaactttctgctctcttttgaacccctggaaaagctgtttgagaccatggacgtcgccacggtgggcgagatcatggagacggaggaaccggtgctgcatcccaaggcatccatcgtggaaacggtggcgcttatgatcaggcaccgcaagcgtttcgtgagcatcgttgacgagggcaaactggtgggcgtggtaacggcaaaagacatcctgcgcaaggttataacggtgtaatagaatgtatctgatgattttagccctggcgatatttatcattacctatgtgttgatcataactgagtggatcaacaaaatgctggccgccatgatcggagggttcgcgctgattctgaccggaatcctgcagcaacccgaggccttcagcgcggttgactggaacgtgatcttctttttgatcgggatgatgctggtcatctccgtgctcaaggataccggcctgtttatgtatatggcgatcaagaccgccaagcttgccaggggaaaaccgctgctgatcatgatctatatgtttgtgatcacagccgttgtgtcggcgtttctgggcagcgtgaccacggtcatgatcctggtgccgatcctgctgctgatcacgggggaactgaaaatctcgccgatgcccttcatcatcaccatggtggtggcttccaatatcggaggcgcggcaacgatgatcggcgatccgcccaatatcatcatcggcagcgccaccaatctcactttcatagatttcctgctcaatctgacgcctccggcgatcatcaccacagtcttcagttgcggattgatctggctgatgtaccgcaaagggatgaaggtgagcaccgaaaaccgcgcccgcctgcttagctataaggaagacaacctgatcaagagcaggaaaaagctggcgatcgccatcggcgtgctggttctgatgctggtggggctgggcctgcaaagcgtgctgggcatccataccgccacgatctccatgtcggcaggcctgctgcttcttgccatcagcagccgcaaaaaggtggaacacgtgctgacgaacgatgtggactgggtcacgatcttctttttcatcgggctgttcatcatcgtggaaagcctggtcaagacaggcttcatcaacatgcttgccaatggcgtggtggagctgacgcagggcagggcaaaagagacctcgctggccatcctctggctgtccggcatcttttccgccttcatcgacaacgtgccctttgtggcggcgatgattcccgtgatcgagcatatcggcgaagtcgccaggcagatcacggacatcaatccgctctggtggtcactggcgctgggcacctgcctgggcggtaacggcaccctcatcggcgcgtccgccaacatcgttgccgtcggcatagccaaacacaatggctatcacatccgcttccgggatttcaccaaggtcagcgtgattttcaccctgctttcgctgctgatctgcacattctacatcctgctgcgctatttctgatctgaggccgtaaaagccctcgcgggaagcctacagcggtttcaggcactcctcgccgttgttgccaaccttgtttacgtatttgctcacgggatacagcgcgatggagtcatccggcgcgggtttgagcaggggaacgaagtccagcgcgtcctgccggctgtgttccagccaggcgaggcggtcatccccccagagcagcaccggcatcctgtggtgcaaggcccgcatgggggagttggcatcggtggtgatgatgcccatcgagggaacgtaactgccgtccggagagctccaggcgtcgtagatggcagccatccagagcaaatccccctgggcggcgtggatgaagaagggctgcttgtcgctttgcctccattcatagaaccccgtggcgggcacgaggcagcggcggcgttgcaggcctccccggaaactgggcttggcggtgatggtctccgccctcacgttgaacagcggaaaggaaggtatctccctgctccaggaggggatcaggccccagcggaaaacccccagatatcgcctggcgtcctggcttaccaccgccatcgcgggctgggtgggcgcgaggttgtagttgaactccagctgctggctctcccggttgagtcgcagctctctggccagtttttgcaactggtcgtgcttgatcacctgggcaaatcttccgcacatggcaaactccttctggttgacaagatagcggggctgccaaaacctgcaatcattattttgagaacagagtgatttgcaaggaaagaacatggcaaaattcgacattgacgcggtgatggtagagctggaaaagcacttccacagcgtgcagacccccatcgttgacctgatccagatacagaccaaagaccccttcaaggtgctggttgccaccatcctcagcgcccgcaccaaggatcagaccacagccaaagcgtcggaagcgctgtttcaggtggtgcagactccggatgacctggaaaagctcagcgccgccgaactgaacggcctcatccgccaggtgggtttccacaatgaaaagacaaagcatctcaagcagcttcccgccgtgctgaaggaacgttttggcggagaggtgccctctgaaatagacgatctgctgcagcttcccggggtgggacgcaagaccgccaacctggtgcgcgcggtggcttttggcctgcccgccatctgcgtggatgtgcacgtgcaccgcatcagcaaccgctggggctatatccgcaccaaaaccccgctggagagcgagatggccctgaggaagatcctgcccgacaggcactggctgaattacaactcttttctggtggctttcgggcaaaacctctgcatcccccgcaagccgagctgcgccgagtgtccgatccaccagtactgcaagcgcgtgggggtgtgattccagccctcccgccaaacaaaactgaactaatgcttgacacattctccgcgggcatataattatccaaaaacaaaaaggaggctccgcttcatggaacagaacaaccccaactttggcatgcaaccggtagccccggtgatgactgtgggcaattgggtggttacctttctggtgatgatgattcccgtcgtcaacataattatggtgatcgtgtgggcggcgggtggcagcggcaatcccaaccgcaaaaactgggcgatcagcctgctgattttctgggctgtcctcctcgttatctggatagcatggatgcttctctttggaggcacaatgctggggatgatgagtgccctaacctgacaccaaccgctattaccgctattttcccaagaccggccgttcagcgccggttcttttttggcctccgcggcagggggatggagggggttcagccggatgcgggcttgcccaaagcttcccaggcgctctggatatcctgcagttcaaatcctttgcggaagaagtgggtgaacgccttttcccgcagcttttcgcggggcagttcgctgtggctggcgcaatatctgtccagcagctcccgcaggttggaggaggcctcccgccggggatagagctccgccaaaagcggttcccagagggaggaggggatgcgctgttcacgcagtttggcgatgatcgcgcggcggctggcgcggcggttggcgtatgagcggatgagggtttccgcgaagcgttcgtcgctcagatagtttagctgcctcagacgttcgatggcctcttccgccaggctgggatggaagtggtgccgtttcaggtaggcgcggcattgcagggtgctgtgttcggacttggcgagccagtccagcagcaggttgaaggctctggcacgcagcaggtcgagcagttctccgatctctccgctatccgcctctccttcaaaaccttccggaaagcgcggcgggagcacccttccgggaagggtgccctgattcacgccgtctatttctattataaccgcgagtttattcttcgggtttatcctcagccgcatcggtgtccacggaattcaaagtttcggggctcacctgggcgcgcaccttttcttcgatctccttcagaagatcgggtgtatctttgaggtactgcttggatttttccatgccctggccaagcttgacatcctcataggaaaaccaggagccgctcttcttgatcagtcccatctcgatacccatctcgatgatgatatcgatattggagatgccttcgccgaagataatggggaaatagaccgtcctgaaaggcggggcgagcttgtttttgacgatcttcacccgggtcttggcgccgatgatgtcggagtccgcgccgccatagcggatggcgccggcatagcgcacttccatgcgcaccgaggagtaaaatttgagcgccacgccgccggtggtggtttcggggttcatataggcggtgacgccgatcttcatgcgggtctggttgatgaacaccacggcggtgttggatttggatacgatggcggtgagcttgcgcagggcctggctcatcaggcgcgcctgcaagccaacgtggctgtcgcccatctcgccttcgatctcggccttgggcacgagcgccgccaccgagtccacgatcaccaggtcaacagccgaactgcgcaccagggtctcgcaaatctccaaagcctgctccccgccgtccggctgggaaagcagcaaatcttcggtctgcacgcccagcttcttggcataggcgatgtccagggcgtgttccgcgtcgatgaatgccaccagtccgccaagcttttgggtctcagcggcgatgtgcagcgccagggtggttttgccgctggcttcggcgccgtagatctcggtcaccctgccgcggggaattccgccgatgccaagggcgatatccaggttgaaagcgccggtggggatggcgtccaccacttgctggggcctgtctcccaggcgcatcagggtgcccacgccatatttcttttccaattgcgagatcgccgtcttgagcgcggcttctttgttcttttccagcatcttaacttccttatggtataatatattgatttaaaacatgataggtggggccttccggcttcaggatgctacggtaaagcgtcaccgcggtctgcggctgccaggcgctgtccacctcgctttgcaggatttcctcttccagccagaccggtaactggcttttgatccgccccagggtgatatgcagtttcagaggcttggagtccggctcgaagcccgcttgccgcgtctggctcaacaggtctttgtgcagcaggcgcggttcgtcgtcccgcgcgtccaggcttgcccagatcaggcgcggagacttggcgggaaagaggtcaaaaccacgcagggagagccagagggggcgcctgcgtcccacgcattcatccacgatttcagacagttcgggcacccgggtggaatccacatcgcccagaaagagcagggtcagatgcaggttttcattcttcacccagttcacgccggtcctggggcgaaaacgccgcagatgctcctccagatggccgcgcagcgggtcaaccgcctccagcgcgataaagcagcggtagttcattcagcgcttgtagcctatatcccgcaaaaactttttgcgctgggtgatatccgtatccagctctatgcctttgggagaggagccgtcgatcacgcccaggatgcctctgccctgttcgctggctgccaataccacctgcaccggattggcggtagcgcaaaacacgtgtaccacctcgcggcaatctttcacggagttcagcacgttgatgggaaaggcgccgcgcatcacgatcaggaagcagtgcccggctttcaggcgcagcaggttttccaccgcgcattcgatcaagtcgttgtcggtgccgtccttgcggatcaggcagggtccggacgcctcgctgaaggcgatgccgaattttgccccgggaacgctgtttaccatcacctcgtaaaggtcttccagggtcttgatgaaatggctttgccccaagatgatattggcgtccgatgggaattgcagttgttcgagcaggagttccattctgcaaacctctgttatttgtgatattggcaagcaaaaaagggattgcctgcctgtcaaggaaaagtttgcccgcccccgtcccgccgccctgataccgctcccctttgcatcctgtagatttcctggggtttacctggggtcatccttaactttgcaaccacatacctaaggatgatacccccaaaacaagtggtggcaaaggagggcggtatgggggagcatggaggtggttgtggggattttgtggaaaggtgtttttgaggtggaaaggtggaaaggttcccccaaagcaagtccaccagacccagaaacaaacacctccagactaaaaactgtgtcatcacggcctgcgagccgtgatccagtcttttgaaaacaaccaccagaccccgaaacaaacatccccagactaaaaactgtgtcatcacgggctgcgagccgtgatccagtcttttagaaacgacaacccagccccgaaacaaacacccccagactaaaaaactgcgtcatcccggcctgcgagccgtgatccagtcttttgaaaacaaccacccagacccagaaaaaaccacccccagactaaaaactgtgtcatcacggcctgcgagccgtgatccagtcttttagaaacgacaacccagccttgaaacaaacaccccaagactaaaaaactgcgttatcacgggctgtcgtgtcccctcttcccgcatgaagtcaaaagagccaaagcgtctggcggagatttacagtcgggaaaggctctttcaactccatgctggcttgagtttggagttcgagccggcaatatgggcttcatgcttatgccagtcctgaagccggcccggacttcaaacaatcctgagaaaggatgaaatcgtgtgaaaaaggtggttcggcgactgcctcaactgtggcggcgcttgctatagcgccgcattgggagttgcctcccagcccggaaatggttttcatcccgggcaaagaaaaacccccgggggaaacccgggggccgtaatctgagccaccgcacgcaggacgcggcggaggcggttgatattgtttatttgatgagcatcatcttcctgtggctgctgtagttgcccgcggtcatgcgatacatgtagactccgctggcgaccgggttgccgcgctcatctgttccgttccagatttcgctatagaatccgctgggctggatctggttgaccagggtgcggacgagctgtcccttggtgttaaagatttcgatcttcaccggggcgggctctttaacgctatagctgatggtggtttcggggttgaaggggttggggtagttgccgatcagggcggttgccgagacctgcaccacatcttcgttgggcaatgccatcacgaagttcagggtggtggtttggttggcgttcacctggattccctgagcggtttgggtgaaatatccggttgcggaagctgtcacgtcgtaagttcccacgggcagcatcagggtgtaggcgccgccgttgttggttgtcgcggtaatgccgttggctgtaacatgggctccggcaataggcgtgttgctggagcttcttaccacgccggcgatcaggccggtgtactggaacttttcgattatgttggagaacgagggcacagaactcacgccgttggtgtagatggctttcaccgcccagcggtagttgccgtttggcagagaaatccaggtggtgtcgctgaggtcggtttccgttatcacttggggagtgagggactgccaggatgcttcgttgttttcgttgccctgggtgaggcgccataccttgtatccgacgtgcaggcgaccactttgggccactccgcggatttcatccgggaagggcagcctgggctcgttgcggacaccgccgttttgcaaggcgcgggatggattgacgtttgtcatcggacgggcgccgaagccgtttgtgccagcggatttgacgatcaggtctgaatcgctgaagcggatggtttgggcaggcgtggccgcggcggtcaaggcattgccgatgtagatgttatcgatgaaccagacataccagaggccgctgtcatcggggccatcggtggcgttgaacgccagcttgacctgctgtccgctgtaagcgcccaggtctatgttgatgggtgaggcgtagtagttccagccgccggtctgagccgaagcgtcccaaatctcggtccaggtggttccgttgtccagagagatcttcacgtagtagtggtctgcgtttgtggatcccaggaacacgtaggagtcgaagttcagataccctgagggcgggcagttgaaggcgggtgtgatcagccattcgtcctgatggttatagctccaccacaggccgctctgataagcgccgtccgtggggttggcttgctggccgctgatggtgattggcccaaagcggcaccaggtggggtacactccgttactggtgggctcgccggtattgttgacggtctgggtccaatccgtgggcgggaaggcgttgccttcaaagctttccgtgatttcgacggcgttgggatcaggcggttgccaggtgagttcaactgtcgatccggtactgttctcttcggctacaactgtgtgtggcgcgtaagccacttcgtttaggacgatggtgcccatgttgaggttggctgaagccacgttgatggttccctgcgccgaggtgtatccgggagccatgatcacatagtcgtaggtttggttggcatacactccggggatggtgaagctgcctgaggcggtggaattggcgtcgtaattggcgtagccttgcagatggatggatgctccagagatgcccgctccggtatcggaagcgttcacctggccagtcacgctcacagtgggcattggggtcatgctgacgttcagggtctcggtcacatcttctgcgatggttacggtccgggtggcgtcaatatggccgtaggcgctgaagttgacagtgtaggtgttgggcaggatattatggatcagatactgtccctgggcattggtgacggcattgtatccgccagtggcaaatgctactgccgcgccttccagaggcattccgcccgctccggtgacggttccgttcagatgccccactccgccggggacgccgaagagtgtggtcatggggaactgcccggtgagggttccgtccgcggtcatgttggcaggatcgtaattaacggagtcagactgaatcttgcgggcgcggttggaaccgacggtctgggctttgaagtagtttgtactgttgtagtaattattatccatcgggcgctggaaggtcaggatcaggttttcgccgttcagatagaggtaggggtttgcgaaggggatggtgatgacgttttctccaatggggaagttcaggtttccggagaagacctgtgtgtggttttggatcgggatccagccggctgtcatatcttctgccgtggtggttcccagccagacgttgatgggtttgtcgagcaggtcctgtgtgaagttgttgtagaggcatataccagtgagtatgcccatgaagttgtcaatttctgcgggatagatcagatactggtgcaccgagtttttccagtagaaatcgatcggggtgcggaaagtttgtgagccatcgcccacggtgtaggtgacggtgcccgcgggatgcaccatgacaaggatcgtaggtgtgctatcgttggtcggcacggtatcgccattcaacaccacttttccgttgatgctcatggttccgtccgtggtgggtgtccagacaacatcgaacacatgcgtctgacctgctgtcaggttaactccatttaccgaggccagttctgtggttccagacatcagtttgaccgtgtagttggttccaagctgagtagttgagctggtgttttccacagttacctggtaggttgtggctacacccacggaggtggtggcggggccggagattagggttgcggcgaggtcttgcctcaggatgcgcagcatgttcgagaaggctggcacgctgggcacatcgttggtgtagaaggctttcaccgcccacttgtagttgccgtccggaagtccgccccaggcgttgtccacatagctggtgtcggtgatggagttggtggtaagctgggtccagctggtttcatcgccttcactgccctgcagcaagcgccagactttgtagccggtgaacaggcggttggactcgaggttgctgtctatggagacttgatttttggaacggatgctattgatcagctgttgtttgcttgccacgccatcgctttccagcccggcgaatctgcctggaggaatgggagtggggggtgcaattttggttatggccctgcccatgggcagcccgacgtagacatcgtcgatataccagccggcgtaagaaaccgtaccggtggcgaaccattcgaagctgatttccacgttattctggttgccaaaggcggaaagatcaatggtcaggcgctgccagggcataaataccgccgcagagctcgagccccacaacgtggtgccgttgaccttgattaaaccgtagtcccaggtattatagccatccatgtagtgccagagatctagcactgggttggttaatccggagaggtcaaatgtctttctgaggtaagaccagccattggcgttggtataaccgccattgatgactgttccccacagtcctgttccggagtacgcttcggcgggtggagcgtcgacataagtatcgatatcggtgtaattgctgatgtcgtatgtattggtccattgccagtcgccgagggggtttgaccaatttgaactgggaacccagccgccatcgtcaaactcgaagtcttcaatacctgctccgccggaggttccgggggccatccaggcgagggaaacctgtgtctgcgcagtgttttcgatggcctgcacctgtcgtggtgggaaggctaactcgctcatcaccaaggtgcccatgtcgtagttgctggttccgatcgtgatgctgccggtcaggtcttggtagccttctgtttccagccggtagttataggtattgccggtgagcactccggtgatggtgaagtttccggaggcgttggtggtgccggaatagttgattggaccaagcagggtaatttccacatcagccaggcccacggtgggttgatcgctgccgaccacaaagccggtcacgttcacggaggcggaggggatgaggttgaagttctgggtgatggtctgatctgcggacagggtcaccgtcacagactgagtatcgtaaccgatcttgctggcggtgatggtgtaggttccgggttgcacataggggaagttgtaagcgccgttgacatccgtgacgcaggaaaatactgttccttgcagcacgatgttcacatctgccaatggatttccgcctgacgtgaccactccgttgatggtgcccatgccctggaagttgaagctcaagcggatgttggcacggttcaccgatgtagttcccgtggtgctgctggatgcgtcagttgtgtcgctttgatagcggagggaggtgttgactccagtggttgcggtataatacacttgggcgtttcgggtgtaggtgccgggaatcatggtggtggtgatgtccacaagcaggttggatgtcccgttccaaataaacggagcgctgaaagtgtgtgtgttccagccatccacaggcaagaagtcgttctgatagaagacttgggtataatcgcctgtctcgaaggtggtggtcagggcttcctgggtggtatgtttcaaattgattgtatagttaggcatgggtgagcaggtgttcaccgccatcacgttgaatccgagggaagtgatcggccccggagctccgccggcggctagaatttccgccgcggtgtagagatattgctgatggaagtttttaaaatatgttccgtagggtgtagggactccggtcgcagtgttggtggtggttgcgtcgccgatggagaccatgtttgttccagattccattacatgaacgttgatgttagggctctggtcgttggcgggattgacgtctccagccaggaacaccttggcgtaaagaaccacgattccttccgcggatggggtccaggttaacggcacttccactgaggtatcgggagcgatatccactccgttcgcggtggcaagttcaacgttatccccgttgtagagcttgaccgtgtaggtgctctgcgaggccgtgccccagttgcggatagtggcgttgtaggtggtggcattgcccacgccaggggttgtattgccgctgagctgttcgcaagccaggtcgttgggcgcgatctgctcaaataccacgtcgtccacatagaggctgcggccggtaccgcccaggccgtgcttgaagcagatatgtgagcctgttccggtataggaagtgaaattgaccacatattcggtgagcgtggtggtgagagccaggttgtgcacttcagtgtaggtggtgggatcctgaggattgctcatcaccccgatggagagcggatagtctgctccgcttgagcgtgcccagaacttcaggcgtacggtgttgacggacagcggcgcaatgatgggcggacccaccaggatcagcgtggcgtcactatccgatgggttgtacaggcggacgcagttgggctggctgtgcgcgtaggtggtggaggcataggtagccaccactgcgcttgtggaggtggattggattatacttgcccagtcgatgggcagggtcggagccgttacagcgtcgaagtcctggctgtaaggcagcgtgctgatagaggggtcgtggcaggttccggtgatttccacggtatggctaaggcggttgccacggttgtccgtgatggtgatggtggcggtatgcgtgcctgcggtggtgggattgtagttgaccacaaaagtgatattctgccctatgaccagattggcaggcagggtgggcagattctgcagcgtgaagaaggggttgccggagatgctgatgctgttaatggtcagggtgccgccaccgctgttggcaatggagaaggtctgattttgcgaggtattcatcagcaccgtgccaaagtcatggctggaggggctgacgatgaacaacggatccgggctgggcggagtaatgtggaaactcgttttggcgaaggtgccggagagagttccagccgaggagggattctgcggatcgtaggtcgtggagtctgactgtagctttcgcgcgcggttgctgcctacagtctgggcctggaagttgtcgctgctgctaaaataactcgtgtccatgggtcggcaggcataaagcaccagattcccatgtgtgtaggaaaagggagtttgcagcgggatggtgattagattttctccagtggggaagttgactgtgccatcgaataccagggtcagcccatccgcgggcagtatccagccggcgctgaggtcggccaggtcggtttgtcccagccagaactggcatggtttatcggtcaggtcgctcacgaagttgttgtagaaggtcagcgccgtaatgttcccaaacatgttcagttcgttctggtaatagagggcttggtgcaggctgtgtttgtaaaagaactccagcggcacgccttcggccaggttgccttctcctatcgtaaccaccgtcgagcccgcgggctggacgctgatgttgaggttcgggctttggtcgttggcgggattaacgtcgccagcgaggattactttggcataaagagtggcaggcccttcgacggcaggcgtccaggttagagtaaccatttccgtggcatccggcgcgatagtttgaccggcgacactcaccagctcggtgttattgccgtcatagagcttcactgtataggcgctttgcgaggcggtgccgttgttatggactgccgcgacataggcagaagccgttccgaccgttggggttgaattaccagtcagtgcaatgcaagccaggtcattgggcgcaatcggttcgaagaccacatcgtccacatagaggctgcgcgcggttccacccaggccgtgcttgaagcagatatgtgtgcctgttccggtataggaagtgaggttgaccacatattcggtgagggtgctggtgagagccaggttctgcacttcaatgtaggtgtcgggatcctgggaattgctcatcacaccgatggagagcgggtagttcgatccgcttgagcgtgcccagaatctcaggcgtatggtgttgacggacagcggcgccatgatgggtggccccaccagaatcagggtcgcgttctcgtcgctgggattgtagagccgcgcacagttgggctggctgtgggcataggtggtggaggcataggtggcaaccactgcgcttgtggaggtggattggattatatttgtccagtcgaagggcagttcaggaggggtcaccgcgtcccagttctggctataaggcagggtggtgacacccgggtctccgtgggtggtaaagctccacaccgggcagttgattgcgttgccaaggctgttatacggaaccacctgccaataataggtggtgttgggcagcaggtcgggaacggggtcataagttgtcgccgggcccagatcctggttgttgacgaggttggtgggcggattgttggtgccaaaagacagccggtagccatccgaccagatattgccagacctccagttcagggtggcatagaggctcaccatggtagccccgggcaggggtgaaatcgccaccgccgggtctggctgggttgtgaagggggtgattagctggatgttggggcggttgtaggttctggtgccgttatcggtggggaagttggcatcaagttgcttgtaaacagccttgtagtccggggtggtgctggtatattggaagttggggtaatttgatacataggagccatcccagttctcaaacaggaattcgatgttctggctgccatcccagacaaagggggcggtgaaagtgatgtggtgccagcctcctccattgtaggtcagctcgccctggaataccagctgaaactgcgtgttgtccgggtaattggtatccgtcgtctcataggcagaggcggtggtatgccgcacatacacgcgttggtcctgcatggagtagttgctgggcgagttaccgacgtagaaaccaacgccgatgatgttgttcgcgactgtgagtccggcagtgtttatttctgcctgcgtgaagataaccttgctccagttgtagttgtagaatccgtagaacggaatgtaactctgggtgctggtcccgtcgccgatggtgtaggtgtcggcgaaagcgaaaaccgccaggagcaggaatagggtgaaaatgataactcttttcatctcttctccttaatagaggttaataaagattgttacggttgaagttggtgtgggtgttaaaacttttgacaccctataccctcgaaataaagacaataatacaaatcggcttgagcctggccacgattctgggtgcacagcttgcgggcgtgaagtaattgcggggcgagccgcaaccgcctcatgcgacacttttctgccaacacagtttttgctacagctcaagctgaacatcgcgtacctcgatgtcttctttttggtgaacgcaaacgaacccagcctatcacacatcacagctcaggctaacattcaccatctacatttcatgcaaaaatagttccatctttttgtaaaggattattttgaagcgccacgtggtaattgtcttcatttctcccttttgaaggcaaagtgatggtggcggtcgttcctgcttgttttgggcaggacacttgaccttgtatcctttcgtatttaagggctgccgaagtctgttcggcagaggcaacggagttgcctgtttggaagagacctccggtctctgtggcaaaaggactttgccacccctgggcactggattacgggttagacggttcacgcagatatacgcggataaaaggcgcggatttccacagattggtataatgggtttgtttcaaggctgggttgtcgtttctaaaagactggatcacggctcgcaggccgtgatgacacagtttttagtctggaagtatttgtttcaaggctgggttgtcgtttctaaaagactggatcacgggtaagccaccccagaggggccccgacttcccgtgatgacacagcatatagtttggtggacttgtttcggggttggttggttacttgaggctttaaaagactggatcacggctcgaccaccccaccggatcgttaccgatccggcgaggaccccggtaggccgtgatgacacagtttttagtctgggggtggttttttatgggtctggtggacttgctttgggggaacctttccaccattccaccattccacctttccacttttccacgacctcatcgtagcaccaataatatatggagggatgtttttcctttcgggctggatcccaagccttagtcttcctggggtcaaccttataatttataaggatgacctaaggatgatggcactgaatccagtcgtagcaaaggagggcgctatgaagaacgcgttattctgatctaatcggttatcttctgttaacaaacaactttcccagactgaaagagagccttttttattgacacgaattcaaccgcgaaatgctatgtccgaaacaccactttcgacaaggaaggggacatactttatgaaaaagaaatggaagatcataatcgggatcgcggttgtgctgatcctgctggcgttgggtctgcgtgcctgcggcaaggcgggaggcaaaaagatggctcaagatgcagtcccgcagtcctatactgtggctcggggagacattgtctccaagatcgagatcaccggtgaggtgcagcccaaaacagttgttgccctgaaatccaaggtctcgggcaagatcgtgaaactctatgccgacgaaaacgactatgtgagcctgggacagaagattgcggatatcgagccggactataaccaggccaataccctgttcagcaccaaagcccagctcagccgggcggaaatgcgcctgagaaacgcgcgcaaggatttggaagataaacggatactgctcgccaaggactacatctcccgcgaggccttccaagccgcggaagacgagctcagttccgcccagatcgactatcagcaggcgcaatcgcagtatgagatgattcaggatctggatgtgccaggcaaggtgacccatgtgtatgccactgcttccggcgtggtgattgagcgcaacgtcaacgaaggcgagatggtgcagtccagccttggcagctttggcgagggcacggttctgatgaagatcgccgacctggcacagatgaccgtcgccagcaagatcaacgaggtggacatcaccaaattcaggctgggacaggaagccaccatcaagctggacgccctgccctatgaggaatacagcggccgcatcgtgaagatcgccccctcggcggtcaacgaaaacaacgccaaggtcttcccggtggagatcagcatcgaagccagcggcgccaacgccaggccaggcatgaccgcggcggtcacgattatcggcgaatctcgcctcaacgtgctggtgatccccatccgcgcggtgtttaccgacgataaggggcaggacatcgcgtatatgctgcccaagaccgctgccaaaacgcaaaaaggcaaggccgctcccgctgaggagcctttgcccacgcctctgcaactgggcgcgaacgacctgcagcaggtggaggtgctctccggcttgaaggagggcgacaggatttcgctcacggaaccgggctcagccaggaaaaacatgatgtttatgggaatgtaaaggaaataatatgatagagatcaaaaacctctcgcgcagctttggcgagctcaaagctgtggacgggatcagcttccgggtggaacccggcgagatcgtgggctttttgggccctaacggcgccggcaaaacaaccaccatgcgcatgatgaccggctatctgcaacccagcgggggcgagatcgagctggatggcgaaagcatctttgccgaccccctctccgccaacgcccgcatcggctatctgcccgagcagaatccgctctacgccgatatggatgtggaggagttcctcgtttatatgggacgcctgcgcaggctgggcaaggaacaactgtccagccggctggactacgtgcgtgacaagtgcggcctgcaggatgtgtggaggcaaaggatcggcaccctctccaaaggcttccggcagaggaccggcctggctcaggccatactccacgatcccgaggtgctgatcctggacgaacccaccagcgggctcgatcccaaccagatactggagattcgcgagctgatccgcgaactgggcaaagccaagacagtcctgctctccagccacatcatgcaggaggtgcaggcgctctgcgaccgggtggtgatcatcaacgccgggcgggtaattgtggacgacgccatcgacaatctgggctcctacatcgaaggctacaaccgcgtggtgctggaagtggaggccgtggaaccggatttctctccctggctggaacaacagaccgatgtggaactggacggctcgcaacaggaggaaggagttaccaccctggaattcctctgcccgccggatgccgatatccgcaaagacctgtctgcctacgcggtttcccagggctggcagattctgagcatctatctggaaaagcaaagcctggaaagcatattccacgagcttacttccgagacgcgggaggcgatggaggaactggcggaagaggagttgcagacgcaggctgaggacgcgcaaagccccgcgctggaggaaacagctcctgacatgccggaagacaacgaggaggaagacagatgaaccccgccctcaccatcgcccgcaaagaatatcagcttgccatgcgcaacctgagtacctacatcgttttgggtatcttcctggtctttaccggattctattttggcaacaccgccttcaaggtcggcctggcagagttgagggggatttttggctttatgcacaccctcttcctcttttttatccccgccctcaccatgggcagcatcacccgggagcgtcacagcggcaccctggaactgatctccacgctgcccatacggcgcgggcacatcatctggggcaagttcctggcatctttcggcctgctcaagaccgtgctgctgcttagcctggtttatcccgtgctggtgctgctttttggcagtggtttcgacatcggggctgcgctcagcggctacctcggcctgctttgcgccggcgctgcctacatcgccatcggcatctttgccagcagcctttccgacaaccaggtgctggccttcatcctgggccttgccatctcagccgtgttctatctgcttgggcatctgggcagcatcctctccgccaccctcttcacgcggctggaattctttggcttcgactaccatctgcagagctttttcaaaggcgtgatcgacacccgcgacctgctctactttgccgttgtggcttacatctttgccttgctggcgcagatgcgtctgcaggctcaaaaccttgcccaggagaagtgacatggctcagagatcgcaaatattcagttcctacctgctgcgcatggccatcgccgtgatggtcctgctggtggggggcttgctctacctgcgccaggatgtgagccgcgaccacgtctattcgctcagcaagcacagccgctccactgtgcgctccctcaaggacaaggtgctggtcaaggtcttcgcctcgcgtcagctacctccggaattcagcaatctgaaccgcgccctcagagacttgctggaagagtttcaacgcaacagccgcggcaagttccgctatgaatacgcccgtttcgccaccaatgaggagctgctggcccaggccagcgccagcgggattcagccctatgtggcgcacatccaggaaaacgatgaactggtgagcaaggagatagtgctgggactggtgctggaaggcgccggcaagtctcagcagatggttctgttgccaggcatggaaagccgcatggagtatcagatcatgaaggaacttaacaagttcgacgcccgtcccctgcctgatctgaccatcttcgcggactctctgggccttatgtaccaatatgccaacaaccgcaatgaactggccactttcatctacgaactgagccagaactacaatatcatctacaccgacctaaagaccgcgccccgcttcactcccgtgatgctctgcctcggcgtggtgagcaatctggagcgcatccagctctaccatctggaccagtatctgatgcagggcggacagatcgtgatgacccaggaccgcgcctatgtctattccaacaactacggcaccgccgtggtggagaccgagagcaacctcttcaggctgctggatcactatggcatccacatccataacaacctggcgctggaccgcgagtgcgagatacgcaagggagcgggattgggcacccaggcgccttatcccttcatccccatgatccgcggcaacccgaagctggaatatacccgcggctttgacagcatctatcacttcctggcctcggaggtcacgctgatgccgggcgcaaagctcaaatacagccccgtgctgcagacctcggaccactcaaaccgcctgctgggccccgtgtttcaggtggaggagtccatcaaccgcggactggagccgggatatctgaaccagcctcccatcaccgtggcggcggagttttccggccagttcaacagctttttcaccgaggccctcaccgattccaccttccacgcctcgacggacaaggcgcgcgtcatcctctttggcgacagcgaattgcctctggatttcggcgcgggcgcctatgtggtgctgaacgccgtggatcacctgctcggcaggaaggaagccatcgaactgcgctcccgcaacctgcggcccacgctgctgagcacgggcgtcttcatggaacgcttcaagatcaatcccaccgatcctgacaagacctccgccaacctcaaaacctggttcaagctggcagccatccttggcccgctggtgctgctgctcctggttggcggtggggtggccatccatcgcaagctcaggttggtagaggcatgaagcgcaacaagctgatcctactgatcatcctgctgctcctggtggcgggctatatctggctgcgttcgcgttcaccgcgggaaagcctaaagccggtgttcgcggtggattctctgcgcgtggggcgcatcgagattgcccagggagaaagaaagatcgtctttgccaaaaccccgcaaggctggagaatcagccagcccattgactgggacgtggaaccagaccgctttggctacttctttcgcgatgtgatcaaaggcaaatatgccaccaccgtcatcggagaaggcagcgaagccgtcgccagctatcagttgcaggactctcaggcttactgggtgaaggtgtgggataccagggacaggctgcgcgcgcaggcgctctttgccaatctggggcatcctttcgactatttccgctacgcggggcaggacaaggtctatcagattcgccagaaagtggcttctcaatatcagccagaccttgccagctggcgtaagcccaatgtgctcagcatcagtcctgaccggctttcccggatttcggtgcggcatcccaaaaacagctatgtgctcagccgcgacgccgatatctggcatttcaaggacaaggtcgcggagtttgacgtgccacccggcaacgtgaccatggccaagatccaaaacatcctcgccagactggatgcctacaccgtcctgcagggagaggaagctcccgcgctccaggacttgggcgatccggtctgcgaggtggacgtcctgctcaccgacgccagccagcgccagatcaggttttacaagtataaagacaactatctgatgaccgtggacagccatccggatatatactttgaggtgatcttcgataccgtgttccgcttcacccggcacgcacagcttttcaatgccagggtgggggagctgcccccggaaggagccatttgaccaccatcacccgcgcccgggcgctggatgagcctctcttcgagcggattaaccgcatctggctgaataccggcatcagcaatcctgcccgcatggacgacctggcctcggtgcgctacaatctggacaacggcggcatcatgctgctggcctgggaagatgacgaactggtcggaacagcctggctgagccacgacttccgccgcctctacatccaccacatggcggtggaacctgccctgcaaaaccgcggcattggcaggctgctgctgcaggaggccctgcagatcgcccgcgagaaaggctttcagcccaaactggaagtccaccgcgacaaccccgccgcccgccatctctaccatagttgcggctttaccgacctcgacggctacatcaccatgatccgccgcggctgagcaccatgcgtacttgagttctaaaagtccgtggaaaggtagaatggaaatagaacgcggatgacaggatcgacaggatcagcaggatacagattggaaaagtccatttcatctattcacctttccacgatcttttcgtagcacctatatattatggggggtgggcctcatttgcatccggcgctatggcgtgggtcttcctggggtcaaccttataatttataaggatgacctaaggatgatgggctaacgctttgtggggtaaagtgatagcgatatgggagggaggaggggaatccggcttttggctcctgtgtgtcacagatgtatcgcctttctgggataatcactgtttagcttgcgttgttacaactggatttcatttcaccttcccgcggttgttcctaaaagactggatcccgggttccacggttcacgcggataattcgagggctgccgaagtccgttcggcagaggcaacggagtttcctgtttggaagagacctccgatctctctggcaaacggactttgccacccctggcactggatcccgggtcagccaccccggaggggccccgtctgcccgggatgacgcggtttctgggtttggttggacttgtttctggggaaccatttcacctttccacggtctttacaagagaatatccaattacaaattgcaaagatagcttgatgaaagcgaattggtataaactgggatagaccagaggcgaagagaccaaatatggagcaggcaatatcccgtattacaagagtatatccgcgcaataagggacgtattacaagagtataactgcgcaatcgggggtaatgcccgcttcaagatggccagtttattgataaagcaattatctgcagacaaccatctaaccgtgtggttggaaagagggctaaaagtaattcggcttttttgatttgcccgttataatagataacgcagcacaatcaatgagaaatcaagacattcagcatatacgtttagtaggtataatatcataagttaaggcaaaaaaactgtcttcaatcgaaagattattttcacaacaaattattttatgaatacagtgggtgttttgatgtgtataaacacgcccggcaaattagccaacctatcaccaaattaatgattaggagttaacatgaaaaaaacactcagccagccagccaatttattgcacacgatcatgttgtacaagtccaaactggatatgtgcggctgcccggaagattttaacgatgaggacaataccgaggaagagattgaagacctcgacttattgtttgaggaatactccagatcaaacaacagctccagaaagcggggcaagcccgctgccaaagccgcgcccaagttaaaagaacgccttgccgcctgtgtctccagcctgcggcagcacagaaatctggcatcctaccaattgagcgaaaatgacgttatggtggcagcctacctctggggccactcagaaaaacgctttggcaaagattgggatgacatcctgtcctggtgcaagatcaacaatcatgatttgataggcaatcttgagtatctgggctcactcctggagcgcaatatcatcgtcaatgtagaaatggatgccaccggtcatcagcttgatccttacaatctgatgcagggcagctttacactgcatagcaagttccgccaagaccttcagcatgggaatccctgcaaacagatcgaggcttccctccatccagcctggaatactaaaagggaaatggatcgagacctgatcctgttccgcaatctgctgacactcagctatcccgaattcaatgaacgacttaacaaaaatacgcaccgctgccaccgcgcgttgattgacaaactaatgaagccgctgcaaaagcggatcaaaaccgccgaccgtaacatccccctgattgggtacattgacgctcatcagccaaccgatacagatttgatcgttctgctatggacctatacggatcacctggtgcaggacaacagccctatctgcctgctcgccaacctgctcagcagagaccatggtgaaagactgcagatggagaccaatctcatgttcagcgccagtctgcatgaattgggcttgcgctataatatacgtggctcattttgggatatgagagatatgaactacatggtactgtgtaagcgggttctttccgatttgcgcttgcatgacgaggaatctgatgaagacctgcccgacaatagcggcaacctcatcgaactcaaatccacccaaagctttgacgacctgattctgccagccggggacaagaacctgatggccgctactatcaggcgttacaagcagggggagaaggccgatctttccgactggggcttggtggcaccatcttccggcgattccggtaaaggggttaagggcacctgtttcctgctctatggtgcaccgggaacggggaagacctttgccgccggcgccatcgccaacgctttgggcaagaagctcatggccatagacgccagcagcctgagagacaaatactacggcaattcccaaaagatcgtccgccgcacctttgccgacatgcgcaagttggtggaagattctgacaaccctcccgtattcctgttgaatgaggctgaccagatcatccatcgacgcagcaatattgaaaaatcatgtggagaggtggaaaacgccatccagaacatctttttggaggaactggaggacttccccggaatcatcatcctcaccaccaatctggtggataatatcgatgacgcctacttccgccgcttcgacgtgaagctggaatttcaccgccctgactatgagtgccgcttgaagctctggaagctgcacctgcctgaaagcatccccggtgccgcggagattgactgtgagtacatggcacgcactttcgacctcagcggcgggcagatcagcatggtggtgcgcaacgcctgcagcgaggccatcacccgtcccggtaacgagcgccggctcactcaggatgatctggtgcgctatgccagggacgaagacccctggagctgccccgggggagccaaaagaagaataggcttttgcgcttaaaacaggatgctgttaggctaaaaccgccagctctcttccggaagggggagagctggaattgataagggtggggaggataacgtgacggtgattttgttggaatgctgatcctgaacgtagtcaatgacagattatcctgtttctttggaactaaacaggcataaaaacacttgccataaatgggcagtggaatattatgtcattgattgacgatccaaaggatccgttgcgaacaaggcgataatgacgccaggcaagtgaggaagaaaagatcgccatcaaacgaatgtaatgacctgccacgctggggcagggattaagcctaagacaccgttatacaaggtgttgcggggaaacatagccgtgaagccgcttgtggagaggctttgagcctgtttccggtgaacctgtccattttaccctcatttttggcctgggtcagaggaggttcacggaaatggggtctggagcccgctctgctaaagggctaaaattgaggctcttgaaatgacctcccttaccgggaggggttgagactctttaacactgctccgtcgtagctaatgccatcgaccttgaaatgacctcccttaccgggaggggttgagactgtatgaaagctttgaaaaacgtcttaaatttctcttgaaatgacctcccttaccgggaggggttgagactttttacaacttctttattgtttttgtttttacttgaaatgacctcccttaccgggaggggttgagacccacacctatctccggctgatggcgcaacagcttgaaatgacctcccttaccgggaggggttgagactcttgccaatcttgtgacaaagatgtgctatcagcttgaaatgacctcccttaccgggagggcttgagacattgggcaaaatttatacaccgaatcccttctagaaatgacctcccttaccgggaggaattgagacttatacactggagaattaccaaaagactgtatcccgggtcaggcggttcacgcagattgcagcggattggtgtaagaggggttcggtatttgcaacttgttttgggctggatacttgcccttatcctgttcttttaactcgtgattatttgtgtaatttaagggctgccgaagtctgttcggcagaggcaacggagttgcctgtttggaagatacctccggtctttgtggcaaacggactttgccacccctgggcactggatcccggatcaagtcaccccaccaaaccgctacacgctgtggcggggataccgacagccctggatgacgcgattttgggatctggtgggatttgtttcagggctgggtgattgtttctgaaagactggatcccgggtcactgcccgggatgacacagtaagtagcttggtggacttgtttcgggggaaccttttcaccatttcacctttctacctcaaaaacacctttccacttttccacgatcttttcgtagcacctatatattatgggggtgggcctcatttgcatccggcactctggcgtgggtcttcctggggtcaaccttataatttataaggatgacctaaggatggtgggctaacgctttgcggggtaaaatgatagcgatatgggagggaggagggaaatccggcttttggctcctgttggtggtagatatatcgcctttttgggataatactgtttagcttacgttattacaactggatttcatttcaccttcctacggttgtttcgaaacgactggatcccgggtcagacaccccaaaggggccccgtctgcccgggatgacgcggtaatgtagtcttcgtgtggtttgttttttgggctggatggtagtttctaaaagactggatcacgggtcaagtcaccccaccaaaccgctacgcgctttggcggggaccccgacagcccgtgatgacacggttttgtggcttgggggcttgttctgggctgcatccaccatcaacatgtcaccacgacaccacctcgccacgaatgtctcctttccaccttcaaatatcctgcggatcctgtcgatcctttcatccgcgttctatttctttttcagcagcatcacgacacaacctcaccatgaagggaacctttacaccattccgccttcctgcaacagcaaacagaaatcaggtaattcaactttaacttatctgaaatgatgatgttaagccaggagtattactcttgaggtgatgccattatgttgatatattgtcaacaaactggaggtaaaatgacagatcaggtggtaaatgtcgcccatcagcccttcgtccccaatcccgccgcgctccaaaactggtcgcaagagctgttcagtgtctggtggagagggttaaactggggtagtccagaggcgaatagaccaaattagaaacaaataataccccgtattgcaagagtatatccgcgtaataagggccgtattacaagagtataactgcgcaatcgggggtaatggccgcttcaagataggcagtttattgataaagcaattttctgcgttaacaatctacccacttagtttgaaagagatcccaaatttaatgcttctttcgatactcgacctgaatacacatattcctgtcctattgtaaatgactctaatcgatataagtgtcctattttacatggaaattgtccaggaactgctgcaggatggccgcgcgggaggggtggcgcagttttttgagcgctttgtcctcgatctggcggatgcgttcgcgggtcacctggaagatgttgccgacctcttcgagggtacggtggtatccgtcatcgatgccaaaacggaggcggatgacgcgttcctcgcgggtggtgagggttttgagcacctcgtccatctgttttttgagcagtgagcgttccgccaggcgttccgggctgatgatggtgcggtcttcgatgaagtcgcccaggatgctgtcttcgctgtcgtggccgatgggtttgtccagggagacgggttccttggagatggaaaggatgtttttgaccttttccacaggcatgtcgagcacctcggagatttcttccggataggggtcgcgtcccagtttctgcaccaaacgccggctggtgcggctgatcttgttgatggattcgatcatgtgcacggggatgcggatggtgcgtgcctggtcgccgatggcgcgggtgatggcctggcgaatccaccaggtggcgtaggtgctgaacttgtagcccttgcggtagtcatacttttccacggcgcgcatcaggccggtgttgccttcctggatgaggtccaaaaactccagtccgcggttgttgtagcgtttggcgatggagatcaccaggcgcacgttggcctcgatcatctcgttctgcgctttttccttgttgcgttcggcgcgctcgatctcgcgcaggaggaagacgaggtcggtgccggtcatcttggtttccagttccacgcggcggattttgcggcgggcgtttttgatcttgcgcagggtctcgatgaagatttcggggtctatattggtctctgcctgcacttcctgatagtcctcgtcggatttcttggcgcggcggccgtaggtgcagatttcgtcgatggtaaagcgtttgatgcgggtgagatcgttgatgctggcatagctttcctcgatgcgctccaccaggctgcggatgcggtaaaccatgcgtttgatgagcttgtcgttgtagtgaagctcgttgaaggtgtttatgatgtcgcctcgcagggagttgatctcttcctggcggacggcgttgccgctttcgtcatagtcgcagttgtccaggatggtgccgatcctgtcgaaggtggcttcgttggttttgagaacctcgcggaagtggtcaacgatcaaaacatcctgctttttgtcgatccaggtgccgatgtccactttgaagatttgatcgaggcgcacgcggcgttcgcggtaacggtggaggaagttgtacatctcacggagggtggagccgctcttgaatacgttttgattgatcattttctgataggtctcgatcttttgggctacccgcacctcgccttcgcggtccaacaggggcaccctgcccatttcgcgcagatacatgcgcacggggtcgtcgtagaagcgtttgctcttaaatttcttggtggcggtggtcttgcggatcacgttgccgttcttggtgaggcgtttttcggtctcatcgataatttcaatgccgtcctggcgaagatcgaagatgatatcctccaccttgtccaaaaagtaggcgctgcttggcaggatatcgttgatctgtttgaaggtgatgtatccggtgtctttacccagatccaccagttttttcaggcattcgttgtaagtgatcatcaaagctccttgcgaggctaattgttcttaattaaggtgacgagcgaaagcccgctgatcatgttgcgataggtgttcaaaagttccattttggagcgcaggagatcgaagttgcctggctccgcgaggatgcggcggtcaatgtcctccagatcgcgctgtattttgcgcacccgcacctggtcaaccagtgttttcaggctcaaatcctgcaggtcagaaaagagaaactctgccaaaagatcccttaactccttattttccatgttatcgagcaaagcggcgggctctgcgaaatccgcatctgaactttcagacagcagatatttgtagagctcgcggttggttctgtctataaaataatcgggagtgagctcttcggcaacaaaattgaacgattcccggtcacgcaaggccaaagtaagcagccagcgttcttcggaagggctctccaggataggttcattttcctcttgccgggcggatgcctgcctgccgatctggcccagcttggaaaagagcgcgccggtggagatggaaaaagcttccgatatgcccttcaccagcagttcgcgttgcacggcatccttcacaccccgggcggcctccagcagcatgtcgatgcgttcgctttccgggctgtcccaatctttgcgggccaggaagctggtgatgggctgcgcggaggcgatccttttgcgcagggcgggccccccctcgtccaggataaagctatccggatcgtgctcgggaggcagttccacgatgttggcttccaatcctttccccaggcagatcagggcggcgcggatagcgttgctgacgccggctttgtcgccgtcgtagagcatatagattcgcttggcgtagcgggaaagcaggaagatctgatcctcggtgagggcggtgcccagtgaggccactgagttcataaaaccagcctcgtagagccgcagaaagtcgaaatatccttcgcagatcagcgcgtagcctgccttgctgatctcatacttggtcttgaagaggccgtagagctctttacccttggtgtagatctcggtgccggaggagttcacatattttaccccggtatccgcgtcattccaaactcttccgccgaaggcgatcacctcgccgatgttgttgtggatgggaaacatgaggcggttgcggaagaaatccaccaggttgccggagtagttgccgaagaggccggattccctgagcagggaaacggagtggccttccttgagcaggtggttgagcagggctttttcgctgttgagggcatagccaagctccaaagctttggcggtctcctcgctgaaggaacggccggcgaggtatttaagcacggatgagccgtgctcgaagaggctggaggcaaagaaatccctggcgctgcgatagatgaccagcaactggtcgcgcttggtggagacggtcttggtgcgctcaaactccggaatggcgatgcccacgcgggcggcgagctttttgaccgcctcgatgaaggtgagcttttcgtattcctgcacgaaggtgaagacgttgcccgccttgccgcaggcgaaacacttgaagatttgcttgggctggcttacatagagcgaggggttggtgtcgttgtggaaggggcagatacctttccagttggcgcccacgtgcttgaggggcaggtagccctgcaccacgtccacgatgtcgttggagtgccgaatctgctctatcaggcttttttccatctcgctatatctttaccagggtcaccccgctgccgccttcgccaggcgagggtgtatccagcgagatcacctgctttttccttttcaaatagtcgcgcaccttgtttctgagggcaccggtgcctttgccgtggacgatgcgcaggctgtgcaaacccgccagcaccgcgtcgtccaaaaactcgtcgatcaggggctgcgcctcgtcaaaggtgagccccagcagcttcagttcatagcgtgcctgcggcgtggcgttggtcctgccggtcaccaccatctccaccctgggcgccgggcctttgcccaaatagaggttttccaggggcacgcggaagctgatcccgttcagatcgaccgtcgcctggcggtcccggatttccagaaccaccgcctcggcatccaggtcggccagccagacgcggtctcccgccttggggtcaagcgccttttgccggccttcggagccggattcgcgcagctcgctctggatttgctgaagcttgacatctatctcttgcaattttctttccgaaagtgatttgcgttcttccttatccagctttttgaggctctcctgctcctgccggtaaagcttttgctgggcgatcagctctgcctgcaggtctttgatgaatttctgtttgcgtgctttaagctcgctttccaggttggattccttgccttccagttcctggattttggcctccaggttgcgggtcttgagctgatattcgtagctggccctgcccaaagccttcttttccgcctgcatcttcttgagcagctcggtgaactccacattctggcttccgctcaggctgcgggcacgctcgatcagctccggagccatgcccagggaggacgccacctcgatggcgaagctgtcgcccgggattcccgcgctgaaacggtaggtgggctgcaggctcttgaggtcgaactgcatggaggcgttgaggcagccgggatggctctccgcgaagatcttgagtgccgtgtagtgggtggtgaccactgccttgcagccaatctgggtgaagctttccaggatcgcctgcgcgagggccgaaccctgctggggatcggtggcggctccgatctcatcgatcaacaccaggctgtcggcatccgcagcggcaagcatgcgctggattttctggatatgcgaagagaaggtggagagggcgctttcgatggactggtcgtcgccgatatcggcaaaaacctggctgaagaggccgatctcactgtccgcgtccgcggggatgggcaggccggaaagcgccatcaggcagagcaatcccaccgatttcatgagcaccgtcttgcctccggtgttcgggccgctgaggatcagcacccggtggctgttgccaagttcgaggtcgaaggggatcaccttgcgcgggtcacccaggcgcagaatcagcagcggatggcgggcggaaagcagcttgagggatgaactggccacgatcctgggggctttggcgtccagcttgcgccccaatgtgccgcaggcatagcggtaatccagttcagccagggtctcctgattgacaagcagttcccgggacttctctttgatctgggccgtgtaagcggtgaaaatgcggaatatctcccgtttttcctcctgcttgagcaattggagttcgttgtttagtggcaccacgctctgcggttcgatgaacagggtggaaccgctgccggaatggctttgcacgatgccgggcacaaaggcgccggcgttttccttgatgggcagcacaaagcggtcttcccggcgggtgatgaatttgtcctgcaaaaagccttcgtagcgggggtcgtgcaacatgccctgcatggtcttctggatgctgcgctggagtgacgcgttgcgtttgcggatgcgggaaagttccggcgaggcgctgtccaggacctccccttcgggatcgaatatctcaacgaagcgcttgcaaatctccccctggggcctcaacctgtcccacagtttgcgcagcaggggaaagtcctccacccgctcccgcgcggaagccagttgggttgccagggcggcgttctgatacaccagcagaaactcctcaaagctaaagagggagtgcttcgcttcgctgaacagctcccgcaggtcggcaagctcctcaaaactgaacaccagcccgcgttccacacattcctgcagctccgagaccagcttcaggctgctttcgatgactttcttatccgccagggggcgcaactgccgggctttggagcgtcccagcgcgctgtggcacaggtttgccacctgttcggtgagcgcggaatactcaagatccgcgtagagttcgggattgttcatttgctcttgcaggactgctcctcttgggctttcttatccgccttcattttgtccatgactttcagatagcggtcgtactgcttgagcttgatggtgttcaccagatcggtcttgagggtgtccacggcagcatagacccggtgtttggagcctaccttgagcggggtggacagtgagggaatgtaatccatcatcatggtaaagacgatcacgacaagcaggccgttcaaaaagcccagccccatgcccagaaacttgttagcggtggttagccgggcggacttcagcagcagttgcaaaaagtacatgaccaggcggatcagcaccaccatcagcacaatgatcagcagcagggcgattatggtggcgaggacgacgcccatcttgtaattggccagcaggctggtcttcaccaggggaaagaaatggccgatgaggaaaaaggatgccacgatcccgccggtgcggacgatcattcccgccaggcctctgcgccagccctgcacgatgaagtagagcagaaacaaaagtatgatccagtcaataatacccattttagactcctcgtttgaaccttaaaaaagctgacagggataaggtatccctgtcgcttcaacaataaaatccagaaagacgctgcagctatctatctgtaacgttgcattctgcgctgcagtttcatcatcttcctgcgagcagcgttggcttcgcgttttttcttaacgctgggcttctcgtaggcttgattcttctttatctctgaaagaattgcggctttctcgcatttctttttgaagcgtttcaacagataatcgaaggattcgttttctttcgctacgactgtcggcaagcaaatcaccacctttatttttattcagaagatcacaatttttcaaagccttatcgctgtcaagcgaaaaaacgacctgtgcgaaagtgctggtttgggataaccgctgtaagtattaatcattcagtaagagcctgtgacagtgccaataatgtctatggcttttggagcgcggcaggctggattctttttgcttgactgataaaccgatgccaacggcgatttttgcaagcgcgcgcctgaagggagttttatgctgcatttcagtctcatcacatataagaccgtggatacaatatccgtggaagtggttgccggggacactatctctattgctccgctaacgctgttgcgagacccaaacgttcgtatctttcattgaccattgtccgcctattggccttaataaataatccttcacattcatgcaatacggtattaataatctgcaatatccgtcatagcgccctcccttgctgctacagcgtttggagccatcatccttaggtcatccttataaattataaggttgacctaaggaagatatagacttaactgccgtttgcaaacgagggggacaaaaatatctggacacattctcccgtctttccaagcttgcaaaaatcatattcatccgaggttggatgcgatgtcaaaagacacaatatcttgttattttacttgtctttacatgaatatagtcgcctatgccaggcagtctgcggactacccggggaggttgaaatgaaagttaaacgagctattctggcggtggccgcgctcctctgcgctttggcccttttcgccgccttgcgcggcaatccctttgttgaccggagcctctgcgtgggctgcgaagactgcaagacggcgtgcccggtggaagccatcaaactggaaaatggcaaagcccgcatcgaccaggacaaatgcatcgactgccgtagctgcgcgaaagcatgccaatacagagccatcagggtgccccaatgacgaaaaaacgcctgttcatcctcgccctgttcgcttccctgttgcttctgcttgcccttgccgcctgcaaaaaggccacagacaccgaatacaacatcgattcctcgtcttgcagcggctgcgccgattgcgtgcgggtctgccccaacgacgccatctatctggatgcctccggcaaagccagcatcgaccaaagcaaatgcaccaaatgcggaaagtgtgtgacagcatgcccaaacagcgccatctactgatcctcgccctccttgcctgcgtggttccggcgttcgcggaatcctccttttttgtgaagacctcggtgcaaaacatcagcgccgaacaaagcggatggctgttgcaaaaccggcttggctggcagcaggagctcgctccgcggctcaatttcagcctggattccgagcagcgctggtctgacatctatctgcgcgacaatccccaaaaggcatggtatggcagcctggcagccttcgactggcaaaaagggacgctggcgctgaaagctgcgtaccgcaacatcagcttcggcgatgcagccccgttgcagctatatcccaactgggcgcccaccacggaataccgcaggaagacgcagcaccaggcaatcctggcggcggactggcgggacaatgtgcacggctgggtgatgtacaagcgcctcaacgcgctaccctacacgctggattttaatacctttgagctggtgcagggagaggaaaccggtctggaagacctgtatggcggactgggactggcatggaaaccctccgaaaactggaagctggctgtgggcgcggatcacaaggatggcactttcgcccgggacgacttgttccgggtcaccaaattgaccgcctcagcggaagctcagtacagccttgattacggttcgcgcctggaaggcagcctggcggtggaacaccgggaagcaggctttgcggacagccagcgggagaatgtgctgcgaacgaggctacgcctgcaaaagcgcgtcaccagcgaactttcctccctgctggtgtgggaaaataacagttgtttcgacaacaagttccacgctctgcgcctgatctccaactatctgaggctgcaggcggtgctgaatctgccctacgatcccgcctcggcttcatatatctcgggcggggtcaaatacagcccggaaaacgatgcctcggcgctgtttgccgaaacagattgccttatcggctggcatagctatgccggttgcggagcgcagatcatcaccgaccgccaaagcatcctgaaaggctggctgagccaccatttctggaaaaaccaggaagtccgcctgggctacagcagggtggaaaatctggcaaactcagcccacacagaccaggtgggcgtctccgccgctttctggtggtgacagccgcctgaaatactggactgcccgcgcgcttaacggcgcagcgtaaccatccggctaacgctggctccgtcctgcctgatcacaacccggtacaccccattggaacaaggtttcccgccattgtcacagccattccacgccagttgctgccagcctttgccgattgaggcatagctgcggtcgaacactttttgcccgcgcgagttgaaaaccagcaggctcactcccctgccccgggggtcgtagaacttggcggcggtactgaagctgaaggggttggggtagagcggttccatatccaggccgcgcgccgccaggctggggtcgtccaccgccaccgtctgcagatgaaaatcctgggtcagagcctgccctgatgccaataccaggtcatacacggtctgcgcgtggtatccctgggcgctgcagttcagcgtgtaggtgccgggtggcgcggtgatggtgtaagctccgttggcagtcgtggtcacgctaaagtttcccgcctgcaccaaagccccagccagaggattatcctgctcgccgtacacggttccagagatcgtgccgttcaccaccacagggtcccaggtgagaaccatgtctttgaaataggtctcgttggggatggtcagatttaccggttcggatcccttggtaaaggtcacctgtttgaatttgcccatattgctggcgctggcgttgtgttcggtgaattccacattgattttgtattcgccgtccggcatctcggcgttttgatggtttttaccgttccaggtcacattgtgcagttgatggttgttcagtgacgctccggtgatggctccggtggtgttttgtcctgaactggcgatccagcgcaccagcgtgtagcggtactggtttgcccacactttgatggttttcacaaactggttttgggagttggtgatccagatcgcgccggcgttgcggggcgcgtaatgcccattgtaggtcacggtgcggacgctgaagcccagcgagccttccgtgttgcgcttgaaaggattggtcagcatagccgagcccgggtcaatgatgtccgccaccagcagggtgatcagcaacagcaataaaaacgggagtatcttcttcattatttacaggtcatcctctgaatataatctgacagaatccggttttcccgaaacaaagtcgggtatttacttgcaattagcattccactttcaggattctgtggtgtcagtcgtggtccacactcacttcccgggtggatacctgcccgatgaaagcccggtcgtgggaaacaaagatcagggagccattgtagtcgtgcagggctttgccgagcatctcacggcttttgaggtcaaggtggttggtcggctcgtccagcagcagcaggttgtattcccccatgagcagcatcaggagctggagtttggccctttccccccaggagagcctgccgatccgctcttcgatcagggcgtccttcaggccgatgcagcccatcaaggtgcggatctggccttcctccctgccgcttgagagcaggtaggcgcgcaccatcagacgcggatcaagctccgtgaggtcctggcggtagtagccaatcctgatcctgttggcaaaggagatggagcccgcgtcaggcgcgagttcccccgcgatcagcttcagcagggttgtcttgccgcttccgttggcgccggaaagccagattctttccccggaacccagattgaggtagaaatcgctgaacaccgggctcccgccataggaaaagcacaacccggagatgttcagcagttccttgcgggattgctgcacctggccgaaatccagcttgcggggcttctcgaaactggggcgttccaccgcgtagcgttcattgagcatggcgatgcgtttttccacgttgcgtgcctgctgcatctgggtgcgggcggcgttgaagatggattcatacaccgcgcccctgccttcagaacgggtttccggctggaagctgctggcccaggaacgccgtttttgcgccgcctcgcgcaggttgcggagcagtatttgccgttgcctgtactggacaagctggtgctccttcagttgggtctggtcgcgggtaaagctctcataattgcccatgcggacttccagtttgccgtccgccagttcggctatcttgctggcggtgttgtcgatgaaactcttgtcgtgcgaaacatacaagaccgctcccgcgtaggcgttcagccagtcctccagccacctgatctgctccaggtcgagatggttggtaggttcgtcgaggatcaggatgtcgggcttttccagcagcagggctgctagttgcaggcgggtggattctccccctgaaaggctggcgcagagccgctgtttgagctccattagatccatttccagcatcacggagttgacgtctgcctcccaggatgccagatccaggctgtggtattcgtgccacagcgtcgccagagccaagccctcagcctcgctcagttcctgctggtgctccaggtgccgcaggcgggagatgacctcatactttgccggagctacgcccagcagaaagtcttccaccgtgagtgaggcgctaactttcgtatcttggggcagataggatatcacgggctggtgcgcgggataactgatagtcccctggctggcttgcaggtcgccgaggatgattcggatcagggtggtcttgccgcagccgttttttccgatcagggcgatcttttcctgctccgcgatgaccaggtctatcccgttcaggatgcttttatattggtctggatagcgatagtggatgttttttagctgtatgaactgcatgcaaatctcctttacagttttctggggatgagcgcagtaacagcccgtgaattgaggtgttcagatgtttttcaaggcatgagctgctactggtttttaactctgcttgcgcatctgactaatctcctctgatgattgtttggttacagattacagcttacgccattgttgtcaatatctttctgggtgttttgccggtaatgaacgggtttcaacccctgatactgcaactgggtgacaaccggttccgtttcctgctcgacggcgcaggtgcggagcgtggcaaagctgattcccagagccgccaaggcagccagaatccaccaccagaggcggtttcgcttgcggggagccggggcgggagtggcgggggtgatgggcacatgtttgcgtggcggcgctgcccggggcgttgagtattcaggtttgggagcgggggcatcaggtttgggctgagtagtttttatggtttcaggtttggcatcgggagcgggagtttcgaaggcaactgcctttctttccagatcgatgccgctgtgatcgccctgtttgaaaggcaggctgtatttgcgcagaatgatcgccagtccgttgggggttttggcctctccgatgcctcgccccggcgcctcaaagccccagccttcgccatcccggtatagtttgcccagcaccacggcgttccagggctgcaaatccatcgccagttcatgcacgcagaggggttccgcgctgtccgagccagcatcaaagaccttgaggaaaaccttgtccagcacgcccaggcgcaccgggttttccggcgcttccgggaaggggctgctgctgagcgtaatcaccagcgatttcacttcctgcggcaattgcgcgagatcgaccacaatctgctctcctccggcggtttgctctccttcgtggcgcagggctccatcctggcaactggcctggttaaaatagaccagcgcgtccggggcgggcatcaactgatccttgcccaaaagcagcgcggaggcatccagcagggcgttttgcccgtctttgaactgccagcttacattcagacgcagcttagagggtgcctggcctccggcggcctgaagcaggttggcatgacccagggcctggcctttttccacattgatactcataatttatctcctaaaatgtagttaagttatctgtagccggcggcaaaacaggaggcgaatacctccgccctgtgccgcgcggaaatgctatgcagttgcaatccttgttcccgatgccgcgccaaaagcatcaaaaagagccgggacgcccggtgtccctctgccagtagcgtactccactgctccctgaactcgcccttgttccagtagaggttgatgatccgcgccaaatcctgcagggtggccatttggcggaaactgaggcggtcggaagccagcacctgccagggcgggctgtccatccagaagtagccgcgttggctggcgatggcttgcatgggcgtgccggaaaggattttgagcgtgcccagttggatttcgtggggcaggcaggcagccagttcgtccagcgaatgcagcacggaggaaagggtctcgccgggcagtccggccagcaggtcggcatggacgctcacctgggtgcgccgttgcaaagcgagcagcatggcgcgggctttgggccagtccgaccttctgccgcaggcttgatttacggcgcggttcactgtctggatgccggtttccaggcggatgcggccagccggggcctgggacagaagctcgatatcctcctctgacagcaactcgggatagatctcaaaatgccattcgcaggaggattccaggccgatggcgaactgccagatgtagcgcgccagggcggtgttgatgttgaagctgcggtcaacaaacttgatggtgcgcggggcgaaggacagcaggcgatgcagctcggaacgcagacggcgcctgtccgcggcttgggacacatcgaagcgtggctcgtagcggtcatcggtggcggaaaggcagtaggcgcaacggaaggggcaaccccggaaagtctcgtaatagaccagcctgtcccgcagggcgggcctgtccgcggcgcgataggggaagggcagttcccgcagcgggggagcggggtgttccagttctccccccggcagggtgaaagcgctgtcagccagatggcgcagggctccctcgccggggcctttcaccacataatcctgcggacgcagcccataggcggtgccatccgcgtcggggccgccgaggactatcctgctctggggttgcagcttggcgagttccggaagcagcgcctgcagcatgctccggttccacacataggcggaaaagcaatagatgccggccttgtggctggcgatcctcgccaggatctcaaacagcggctcgctggtggtaaactccagcagcttcacgcgcaggggcaggcctttcatgcagttgcgcagatagcgcagcgccaggctggactggtaccaggcgctgttgatggtaatcaggcagaggcgttgagccgcgggagcagatttattcaggttttcaaatttccttgtaggcagtccagcacttaaaatcctgcggcagggctgaaaatccggccttttcatagacccggttcgccgcggggatttccgagtagaggtagaggtggttgtcgttgatctggcggctgtattttaccaaatggtcaagcatggcacccgcgaaaccacgtccgcggaacttgtcccgcgtgaagatgtcactcacccggctgtatccggcgaacacacttactgaggcgaaagaggccagttcgtcgccgacgaatcccgccagcagatgataggatggattcagcaggtggcgttccaccgctttgatggtccagtcgccgccatattccagggcgatggtctccatgatgtcgatgctcaaggtccgcaggcgttcgatgcgcagttcaggcacgggacgaaagctgctctcatggtcatacagaaagaactgatcctcgtggatttggactgtgaagccgcggttttccagagcggtgccgatcttttccagttcattgggtgtgtaggattggtagattctggggactatgcccttggacttgaaaaaaaactcgatgtcgcgaaccgaagcttccgctccgaggtggtctgtgatgattgcgtggttggagtcgtgggatctcttgttgccttcattccagaaaagcatcccatagtcttttgttgtcatgtttgtaaaccgttgcggaaagcgcagctcggtttccagcatacggttcatgttgaatggcatgggcatggcatcctcctttcatggttgcatacgactaaacacattatatccggtggcttaaatttgtcaagcaggctcttttgtttcgggagggcgcaggctcaggcaggcatctgacgcgccgataagacaaggacagcatcaaacttttatccccagcccaaaaaagtgcttgccaaagatcaaagcccgccaaaggatgcggtatcagttcccgatcctgccacagagaggagtttgaatggatagtatcccgaagctgggcatttcttcctgcctgctgggcaacaaggtgcgctacgacggccggcacaaatatgacaactggctggtggaggccttggggcgccacgttcaatacgttccggtctgtccggagacggagtgcggcctgcccgttccccgtgagcccatgcgcctggtgggcgaggtcagcaagccccgcatggtaaccgtcagcaccggcatcgaccatacgccccggatgctggactggtgctcactcgctatcgcccggttggcggaggaggaactctgcggctttgttttcaaaagcaaatcaccctcctgcggcctggagcgggtgaaggtctttcccgttgggggcggaaccggagccaggaagggcacgggcatctttgcccgcgagttcactcgcgcctttcccatgttgcccgtggaggaggagggacgcctggaggaacctttgctgcgggaaaacttcatcgggcgcgtcttcatcatgcagcgctggctggaactgcaaagacgggggctgactccggaagcggtgatggattttcaccaccgccacagactgctgctgatgtcccacagccccgaagcttgtggtgttcttgacaaactgttggaggaagcccaaacccataaaccgcaggactttgcccagacctatctgcgcctgttcatgcaagctgccgccaggcccgctactcccgccaaacacctgaaggtgctgcgccatatcatgggctgtttcaaacgggaacttaccccgggcgaaaaagctgaattgctggagcagatcgaggcctaccgcctgggccaacagcccctcagcgtgcccctcaccctgctcgggcactacgcgcgggaatacggcaaggagcagctgaacgaccaatactacatcaatcccgatccccgcgagcttgccatgcgcgagcacgtctgagactgagcggaggacgcggcaggctctgatgccaattcgctttcatgtaattttataaggtggaaaggtgtttttgaggtggaaaggtgaaatggtggaaaggtgcccccgaaacaaagtccaccagaccatatactgtgtcatcccgggcagacggggcccctccggggtggctgacccgggatccagtcttttggaaatgaccacccggcccagaaacaagtgccaacagactacatactgtgtcatcccgggcagacggggcccctccggggtggctgacccgggatccagtcttttgaaaatacccgtgtaaagatgaaatggtgcaatccagttgtataaatacaaactaaacaatataagccaaatccaggcttcccgtacctactcaacctgtcagcggcctgaaaactggcactttgccgaaagccatctgtctcaagcagttgtaaacaggcggtgagacccttgccaaataatgcacccgcctgaaacaaatgcctccctcatttgacagggtgggctaagtctatattttccttaggtcatccttaacttggttagggatgacctaaggatgatggcatcaaagccaggagcagcaagggagggagctatgaaggattatgcggaatattgccgttgtatttggtgaatgtaatactatattgattgcgtttgttttggagcttggttgcagattctaaaagactggatcacgggtcaagcatgcgcttgcccgggatgacactgtatgtagcctggtggacttgtttcgggggaacctttccaccatttcacctttccacctttccacctcaaaacacctttccaccttcaaaaatcctgctgatcctgtcgatcctgttatccgcgttctatttcctttccacagccatttccaaaagactggatcacgggtcaaaccaccccaccaaaccgcttcgcgctttggcgaggaccccggtagcccgtgatgacacagtatgtagtctgttggcgtttatttctgggtcgggtggtcgtttctaaaagactggatcccgggtcgctgcccgggatgacacagtatatagtttggtggactttgtttcgggggcacctttccaccatttcacctttccacctttccacctcaaaacacctttccaccttcaaaaatcctgctgatcctgtcgatcctgttatccgcgttctatttccttttcacagccatttccaaaagactggatcacgggtcagtcctgcggctgcgggtagtccttgatggccagaaccttgtaaaagcggcggggcgtcagcaacccggagctgtccgtgaagccggggctgaaactatcccccagccaggtaaagcccgagtaggggtcggcggaagagaagatggcgtagcggtcgggcacgatgggttgtccgcggctgttgagcgtcacggggttccagttcagcagcaggccgtccgctccggcgctgagggtgagggcttgcggagccaggggcggagcggggtcggtgttgaaaaccgccggctggccgagcacatccagggtgtccaggatcacgcccaaagcgtcttccagattatagccgaggtccaggatatccttcaaggcaaaggccgaagcaacgcagcgatatgaaccgtcgctatggtagattgccacagggtgatcgggatgggaggcgttgagggtgctgaacagcacactggcgccgggcaaagcgggcaggggaagataggtctggggatcgctctgcgcgtatgccagcaggacatcctgtccggcgtagtcgcagcccaggttttcgattatgaccgtgccttgccccacggtggtgccaaagctttgccagaaaggatcggcggcatcccaatccacatccccctccagatagatgctgcctccgccagccagataggaactgagcagggcgtggtcgagggaatccggttgcggagtgtaggcgtcatctccccaaccaaagaggcaaaagacggcggcaaagcggctgatatagtcgtaatcctggatcaatttgtccgtgtagatcacgttgaagcgcccgcagcgccccaaagcctccaccacgggcaagccgtcggaggcggtgggttcatagaccagtatttccgccaggggagcctgctcccagcctccgcgccccacagccggatcgccgaagagcaggtaggtgtacacgttttgcagctcgggatagatgatcccgccgtcgtccagggggtcgccgaagaggaagtattgggtgtgggtgaggtttgcccaggccagcgcggcgccgcaggacatccggttgcgcgccaggttctccacaaagaggtggttgtaggagccgagcccgccccagccggggttttgccagcccaccttgtaccagcccgtgcgcgtggcggcgatcacgttcaccgctttctttgccatggcgtattctgccaggcattcgggcgtgtaggaggtgtccagcatgccgttgttgcaggaagcggcaaagatgatcaggccatcggggttggcaaggccatcaaaactcgttttgcttaccatagtatagccgttcatctcgccggagtccgcgatctggttggcgttggtgtcttcccgccaatacttgccggaagaagaggcgtaggagccatgcgcgctccagttcagcaagccgaagctgttggcgctgagctggctcttgaggttgttgtagctcaggggcaggtcggaaggataggatggcatgatgccctgccgttcgtaaagggtggtgcaatcccagtcggtgagaacggtctggcgggagtgttccagttgggatgcgccatctgtgggggcaaagacgatgaggggttggccggggaagttcagccaggctcccgccagcagggcgctttgtttccacggggcttgggattggtcgtaagccactgtccgggcggcgatctgcgcggcgattgcggcatcgttggtggaaatcctgcccaccagcacctccggggtgtaatcgcaaagccagtcctgctctcccgcctgggaatagtattcgccgaggcggccatccccgtcgctgtccagaatgctgctcaggtctccataatagaaatccgagggcaccgtggccgagccattgggcgtgggggtggtcttcagcaccggcactgtgtcatggtctcccaccagcagcaggtagctgaagggatgggaattgtattccgagatcaggtagttgcgcagcttctcgccggggctgttgcccgtgccgttggcaaggatggtggagatgtccgcgaaggaggtcgccagcccctggctttggcggaagctttccagggcggagatagcggcgtagagggagggagtgctcacgatcagatagtcgtagctgcggctctggacaggggcataccaacggggcaaatcctgtgggttggcgaagaaagtatccagcttttcccgacccaattcgtccatcacgggcggaatcctgccgcttttcgggaaggcgctccagttcagctccaggtgcagcttttgctggcaaatccagtccttgccgctccagaccgctggcagaaccctgaaacgggcgaagaccaagtctccccatctgccggtgccgcaataggtcacctggggcgaggaaatcacggcgggacgggcatccagggactgttcgccgtcgctgaaggcggagttaatccccggcgcgggagcttccaggcgcaggggttggtagaagctggcggagtatgagatgtccttcgcgcccgcgggcagcaggatgttcagggagcggccaggcaggcgggggtatcccggagcggtcagcgcgccccagcctgattcctggagttctttgtgaggatcgaaacctgagagatcgacctcgaagctcaggctttccgcggcaagattgcccgcaagcagcagagcaaaagccacaagggacagcagcgctccggcgggtcgcggcttgcgtttcagggcagagagaagtctgccaaatctggtaaaaagcatggttacctccacaagggggttaaatgaatatctttcactctagcacagctaattacttctgagtgacagtctactgccgccaaagatttctgtcaatgtaattgtttgggcttgttcgtctttagtgaatgccacgcgatgcaaacgcttttttgccgtgatgtttttattgacggatttaccgcttttcccactatgttttcagcagaataaaaaaactttgagggaggtgccaatgagccgccccacctatattctcaagctggctgttgtcttgctgctggcagtttttgccacgcaagccgccgcctattacaccaccaatatgcccacccaggtgcggcagccagacggcaaaatgctggatctgcttgccagcggggacgaatatcacaactggctgcacgacaaggacaacttcaccatcatccagaatccccagaccggctggtattgctatgcccagcgcgcgggagagggtgtggaggccagcccgttaatcgtgggggaaggtgatccccgcagcctgggactggagcccggcatcaatatcagcgaggcgctatacaagcagcagcgccgtgagagattctacagaccggtagagcgcgacgcccccaccacaggcaccatcaacaacctggtgatctacatccgcttttcggacgagacagagtttgggcagcagaactccatctatgatggctggttcaacaccaacaccagctcccagaaaagctactttctggaagccagctacaaccagcttaccgtgaacacccatttctatcccgtcccgtcgggcggctacgttgtctcctggcaggatagccatccccgcgcctactatcagccctacaacgccagcaccaatccaagcggctattcaaacgacgaccaacgccgcgaccgggaatttaccctgctgcagaacgccgtcaatggagtcagaagccagattcccagcagcctgaccatcgactctgacggagacgggcaggtggacaacgtggtcttcatcgtgcgtggcgcagccggagcctggaacaacctgctctggccccaccgctgggctatctatgaccgctatgtgtacatcaatggcaagcgggtctacgactttaatttccagctccagaactttctcgccgatcgcggcgtgggcgtgatttgccacgagtttttccacaccctgggcgctcccgacctttatcactatacgagcaacgggatcagcccggcaggaacctgggacctgatgaacagcgaccagaatccgccccagcacatgaccgccttcatgaaatggaagtatggcaactggatttccagcatccccaccatcagcgcggacggagtctataccctcaatcccctcacttcatccaccggacagtgtttccgcataaactccaacaactcaagccaatactatgtggtggaattccgtaagaagacaggcacctacgaaagctccgtccccggctccggcctgctggtttaccgcatcgacaccagttgcggtgacggcaatgccgaagggccgccggacgagctgtatgtttaccgccctggcggcaccaccaccgctaacggaaccatctcctccgcccatttcagccaggagacaagccgtaccaaaatctacaccggcaccgatccctcccccttcctgcaggatggctcggccggtaacctctatctctgtgagatcggctcttccgcgggcaataccatgagcttccgcctgggccctccctttataaactttgttcccaatccctatgttcagagcttcgacgtcaccgattatcctcccggaggctggaccagccaggcgcagaacggcagctacaccttcactcgggtcaccagcggcagctacccttcctgcaccccccaatccggagcgggaatgctgcgttatgaaagctacgccgccccgtctgggaactccgccctgctcgtcagcccccgcatcgaggtgagcaaccattcaggctttgactacgggctgttcttctggatgtaccgcgatggcaacctaagcaccgcggctgataagatcgaggtctatctgaacagcagcgcgaacctgagcggcagcccaatcctgctgggaaccatccaccgggcaatgcagcttaatccggtggaaagttcggtcggctggaaaaactacagcttcgaccttcccttcagcgctgcgggcaactactatgtggtcttccgcgccgtcagcgcctatggttacaacatgttcctggacaacatccgcatcacccagttgccctttgccgcgcatactcccagccccgcgcacctctccacccgcgtaatgaccaacacccaactcgcctggcagagcggcggcggctcgcccacaggctacaagctctatctgggcacaagcaatcctcctgcctttttggcaaatgtgggcaacaatctgagctacagccccagcctcgcttccaacaccacctactattggtcggtcgtgccctacggccccggcgggaacgccgtcaactgccccgtctggagcttcagcaccatcgccgccaacgacctgcaggccattcaactgtggggaacgggctgcggcaggatgggcgaagcgctgcattttgacctggacgtgaaaaacaacggcagccagacccagaactcctatcaggtgcgcctgatgtccaccggccagggcgtactggcaagccagcaggtgaacgggcctctggcgatggacgcctccgccacccacactctgacctggacaccatccgcgagcggccattacacggtgtatggcgaggtgctgctgaacggtgacgagataagcggcaacaacagcagcccccaggaagccgtccatgtcctttccccgcaggatcacatcgccaatgtggggaatcttgccacggcctccacaaccaacactctcccgctcaatttctattggaaaaacagcctcagcgagaccgtctatctggcggaggagctgcagatgcagtccggaaccctgcaaggggtggtgtatgtgaacaacttcagccaggatctggccaacaaaccggtgaagatctggctcaagaacaccaatgccaccaacgtcagcaccggctggctacccttcagtggctatcaactggtcttcgatggcatggtggattttccctcgggaagcaacctcgtcttcatccccttcagcgcgccctttgcctataacgggcaaaacctcgccctgcgctgcaaccgcccgatggatacggcctacttttcctccgataataagttctattacaacacctctactgtgcagccttcccgcagccgctatatccaaagcgacaatactgcttatgatccagccgcgcctacggcaccgggaaccctgtccaacaacatccccgtgacttcctttatcgcggagaatgccgctttgccgccgctgcccgcgccacaggtgagcattagccagtcgggaacgaatatctccctcacctgggatgtccagcccggatatcacggctacaaggtctttgcctcggacaatccttacgcgtggcccggacagcccaccgccacggtctatgaaccgcagttcagcaccggttcagcggcacgtatgttcttcaaggtattggcgttctcgcagccgacctccctgcctcaactgccccgcggttcctggctcaggcagggtgtgaatctgcccgccgaccctcccggtactatgccagacaaggattagcctcacagggagcggcaggctttccgccaaagccgccctcatggctcatgccagttcgctttcatcaagctcttttatactatttgtaaactgactttctcttgtaaagtcagtgtaaaggtgttttgaggtggaaaggtgttttgaggtggaaaggtgtttttgaggtggaaaggtggaaaggtgaaatggtggaaaggttcccccgaaacaagtccaccaggctatctactgtgtcatcacgggcaagcgcatgcttgacccgtgatccagtctttgggaaacaaccacccagtcccgaaacaaacaaccccagactaaaagtgtgtcatcacgggctgtcggggtcctcgccaaagcgcgtagcggtttggtggggtggtttgacccgtgatccagtcttttcgaaacaaccgtaggaaggtgaaatgaaatccggttgtaataatgcaagctaaagagtattatcccagaaacacgatacatctgcgatacaaaggagccaaaagccggattcccctcctcccttccatatcgctatcattttgccccgcaaagcgttagcccatcatccttaggtcatccttataaattactaatctttcctagttatctaagacattggggcacactaaaataggtaaaaatagcacttgacaaaaacacctcgtatctttttattgcataagcaattaaccaaatatcaagaacgaggtgttaagatgaatttcctaagaatagcccaaatcagtcaagtgaaatcttcagatttgatagagcacaatgctcatttcctgttcaaacgctttaggt

SEQ ID NO: 510 - DNA, 144260 bp, Artificial Sequence
  Synthetic Oligonucleotide
gagacatggtggtcggagtatggaacaaggccagcctcgcattgcaggggttgcgcgcgctcatcgcgtcgttccgggacggcacgggcgagatgtccgcggaactggcgcagaagcttcaggcggcaggcttgatgggttttgtcaccacggtgtttcaggtctacacccgcgtgcgtgcgttcgtcgagggattcgcgtcggcgctgggacatgccttcgggcgcgtgaggacgattctggaaccgccggtccgggccttggtgtatgccttcgcctccgtctggaaggcgctgttctccgtcgtggaagtgttcggcgtcgtgggtaccgcagcggacgcgtcctcgttccggacctttggccaggtattgggaacgctgctgggcgtcgtggcacaggcggcggccatcatcctgcgcggtctcgtctaccttgcgtatgccgccttcgcacacctctagaaagaaccgttgacggcggccattgtgaacgaagccgccggcggcggctccgcaatgagggcattcgtgtggacagtcatgacaggtctcatcttgagcgagtcgatgcttcttcgcgcggtggaaatcgtcatggggcatggtttcccctggacgattgactcggacttgtgcatcggcaggcggaccgcagcagacggttcgacctcgtttcacacgagatcgtggctgcgcttagaggcggtagagaatcacttgtagcgggtgtccacgagcatgccgtggcgggccgagcagggaaaaccgtcgggagacttgtggggattcagtttcgtgtcgtgggtcgtccgctggaatcgcttgtgacaataggggcattcgatcacgtatacggttccggtggaacggccaagcgaagacgaatgcctcgttaccggtgctgccgaccgctgcgtttcgggagctcgaatgggacccacactggagaactcaaccatgtagaccggcttgaaagaccgtgtcgtggcttccacgctctcgattcggtcgatgcgatacgaccggtgctcgcgattgtccacgcgaatggcatgaaggaccagatgaccgtcctgcgtccggcggagcgaatacggctcgatgattcggtacgagccgtggtatcccaatctcacgcacagatggttggaggcggcgaaacggattgtctccagtggaatgttcgcgcgccagacctgcatcggaacggcttcgatcttccgaactggcgccatctccgcaggggcgacaggaatgcgtggtaaagcggcaatcctgattgccttctccagccagccgaagaggtgctcaagttcctcccagaaatcctcgaagggaggcagtaccggcaattgatgcgccagcatgttcgaccattccgactccagcgcctctcgattggctgcggtcttgaccgttgccaatgtcggcaccgggattcctttgactcgacatttctcgcccaggatggcccggatgactgctgcctccacatcgagttccggccgtcggaagagattgacgatatcgtacagatcgcgaggacgcccgcgctctcccatcgcccgtatcttttccgcaaagacctcctcgaagcagtagcagcacacggttgcgggctccggaagcccgtccggataggcgtgatgtattcggcgcatgacggtcggtcggaccacgcgttccgaagcgctcagatccagcttcacactggccaccttcgtcgcgccacgaggaccttggtagtagacacggccttccgtatataggccggactcatgggctctcaggagaggttctctgccgccgaaattcagtccggatgcttccgttaccctcgagagtgccgcctgcaatgccggcatgagctcttccggtctgataggaccgccgggaagcacagtgaaatccaggtcctccgaaaaccggtaggtctcgacatagcacttcttcaggcacgtgccgcccttgaacgcccatcttgttccgaggagttcatgggaaccgatgccccagagaagccagcccaggacgtaatccttctccacgatatcgtcgcgcagcgaccattcacggacccgttcgtcgagatcgaatctgctgatcatgacggttctccgccgcgccggatttccacgttcactctcaggttccagcgtttcgatatgcgtcctggccgacgaacaccggggtcgagaaaggtcagaccggcgctcagcgcggtccggcaggtttccaccacgtgagggacatcgatgcccagcgactcgacaagataacccaaacgtttgtacacggtaccgttgttcactcgcgctgcgtaatcaaggagcaggcggtcgtcccgatgttcacctgcgaaatagtcgttcagaacatcggcgacatggcggataccggcgccaagttgcggtgcatcgagaacgtcgacgacggtcctggaaggatccgagacaggtacctgaacgcggtcccgccagactatccgtgtaccgaacagcatttcttcggctcggtgtcgaagacggaaggcggttccctgaatcgtgacagcgctctttctgacaggttgggcggttacaaccgcaatgtctcggaagatctgttccgtcagtccccagtgctcgcatgcactccaaccggcgatatagcagggtgcgaaggatcgaacggcaacggtccatgcgtcctcacgccagtcggcaggctcaacagccccgagcggcactgtggcgtagagcccgcgtcgtatacggacgagccagcctttttcagcgaggtgggcgacgagccgcctcgcgcgaacccggtccacaccaagtacgcgccccgcctcctcaacgccaaagggaccggtcgtgttccgatgaagcatttcgaggcgctcgcgagtctcggcttcgaggcccttgcgagacgaactctttggtgcagttaaactcacctagattcattctccgtgaactatatgcagacacactataccatagctttccgcggagcgcaagcttctcaagcgaaagactggagggtaatcacgccttacgccagaggggtaacgccccttccttcttccgatgacgtgaagatgatgcggcaacacactgagaatatctactgtacggcgtggcccgccaccaagtccccgccgcgaagagattccgctgtcgaacgaaccatcaaggaaatggtcaggactcatcgggcgattagaaaacagcccggtcaaataagagcaagatttcctttcaacggacgttttccgtcaagtgtgtcgcttgagcttcttgatggtgccgcatccttgtcatgacggaaaccttggttgtgtccgtctttcttggctgagtcgtttcgcgaaaacatcataggaagagattttccgagtccaagaccgaatcctccaccattctctttttccctctgaatttctcgcctcatcgggggcgggaaacgcccctcccggaccccgcgaatcaagccctttcgccgaggaactgagaatttggcatagtcatgaacacacttgaggaaatggcccaaggcttgtggccggttggactgttgcctgtcgtgttggctagactgccgtcaaggagcaggtattgcggatggcggatgagacccttgtcgggccgaagatcggccgtgggccgttgcgcgtggcccgtgatcatttcgagcggatcgtccaggcggcgatcttccccgaatcgcgggcggtgttgattgccgaagaggccgccattgcgctattggccgcgtatttcgtttatgcgcgcggcgcgatgatgggcgcggcggcggcctttgcgatcctgttcggcctgttgtttgccctcgggtcgtcgcgttttccgctggcgctttttctggggtatatggcggcctcgcaccagttccggtcggtggccacgaaacagttcggcggcatcgaatggcatccacgcgaagtgctcttgttcatgctgctgtttcattggggcgcgagactgttgcaacgaaaagcggcgtggcggcacgacttgaccgatatccccatgctgatttacggcgcttttttcgtcgagattgcggtgtgcggactcttgagggaaaccgatctgcaccgctggattgccgaatgccgttatcccgtgtttctcgcttcctatgtggcctttgcgggactcgtgcgggacaagcggacgctctaccatggattttggtttctgttcacgctgggcggggcgattgccggtctcgcgatcctgttttttctttatacgttggcgacgggcagcgtcatcaatacacaaaacgcgttcggcgaatatgtgccgcgccaaatcggcccgttgcttctccaatctgtgcgcccgaacggccatatgatgttcgagatcctgctgacggttctggcggcgctattcttctgtccggcgctgtcgcggcttcagcggattggctgtgtgctgggcatgggactgttcggggcggccattggcatcgggatgatgcgaacggcctatgtaacggtgttgttgtcgctcgtcttggccggttatttcctgattccgtcgcgcgcggcgaggagaagcgtcctggccgttgcgattatcggcggggtaacggcggcgctgttttcggcggcggcgctttataccttcctggccggtattgtgccggttttgggcgaatccattcgcggccgtttcgaggaaatcaggggcgcgtggagcctctttttgcaatatcccctgctgggggccggcatggggagtaccttcgaggcgatgggcttcgtttccaagaccagcacgttggcctacggccaggcggagtatcaaaccgtccataacgtctggatctacttcctgtcgaaaggggggatcatcggattttccatggccgcggctgcactggccggcttgtacgggcgcggcgtgtcgctcattgcccatgcacggaacccggttgatcgttacttgttgatcggccttgccgcctcgttcggcggtcaactcgtcgcgtcgctggccatgccgaggctgacttatccgaatgggcatgtatacatcgcgattatggccgcctgctggggcgtgttcgcccacgatttacgcgggaacaacagcgcggactatccgccgcaacctcaggggcttgcttgaaaccgtgcgggaaggagccaagtcctattctattgcgaattgacataagaactttgagagtaccgagttcttgcgacttaaggatgagaagttccacgaagattggcattttcgggcaatttcatgtctgatcaggcaacgagatcttgcggtgaaattaaaaatggccgccttgtagcgccgatttccaaatcggcatgtcgtttttcagtaagccgatttggaaatcggcgttacattccgaggccttcacgactccgagaacacggtactctcaagaaaaacaggcggaacaacccgaaaataatggccgtttttttgtccttcgacccaactgacaggagttacggatcatgctttcttctttggttgtattgggcgcagcggccctgcatctgttgaatgccccggaagatgatgcccgcggatcttggctgcccgagggattccggctgccgaatatcgtgcatccgtttatgccgacgttgggcaagcggacgttaccggttcaggtggcgcccttctttgtgcatgtccggggggcatgctcggaaatattgtccgaaaaggccgtcgggatacgctttggcgaacaaggcaaattggaagcgataacggaacgtgcgcggatatccggtttggaaatggccgtcaatgcctcggtgaaagtcggggaaggcgtttatcacgccaccgacgctgggctttatgtgcaggaaacggcttcccaaccggcgaaacgtcatgaatcctacggcgttgacggtccgccggccacgcggatcacatcgcttgcggtggattcgcgcgggacgttatgggccgggacacctgccggtcttggccgccggacgccggatggcgaatggactacgattcgcggacgggatggcctgccttgtgaaaatgtgacggcgatcgccgtggattcgcgcgattgcctctggattggaacggatcatggcgccgtcttttacaaaccttatgaggaagggcggcaatggttttaccgggccggaaaacgatatctgcccggtaatcgggtgaaggccgtagcggtgcatccgtctggaacgcccgcgtatttcctgacggacgccggattgggccgtattgacacggttcagacgacgttgctcgaaaaggccgaaaccatcgagaagcggatcaacgagcgccatcgccgcctgggactcgtcgcggagtgcatgctcgacaacgcggaaaacccaacctcgcataccatcggcgacaatgacaacgacggcctgtggaccgcctaccatgtcgcggccatgtcattgtgttacggggcgacgaaagacgaatcggcgcggacgtcggcgcaaacgggcatgaaggcgctttatatgcttcaagacgcgtcgggcacgccgggccttgtggcgcgcagcgtgttgcctgcggccgagggcaaactcaagggcccgcaatggcggcccacgccggatggcgcgatgtactggaaaagcgacacgtcgagcgacgaaattgacgggcattatcttgcgttctacacctatttcgagcacatcgcgcggcacgaccccgaggagagggaaacggccgtccgccacgttcgggcattgaccgactacatcgtggacaacggctaccggctcattgactggaacggcaagcggacccgctggggattctgggatccgaaaacgttgaacgacagcctgttcgaatatgtggaagcgggcctgaacagcctgcagatgctgtcgtttctgaaagtcgcgcattacatgaccggcgaccgcaaatacgaggatcattaccgatcgctcatcgtggatcaccattatctggcgaatgtgctgttgaccaaaaaggcttttccggacagcgtcaatcacagcgacgatcaactggcattcgtggcgtggtatcccatccttcaactcgaaaaagatcccaaggtgcgccgggccttgtgcatgggcgttcagcggcacatccagattgtccagtgcgaacagcccagtttttacacgttcgtctacgctaccgtggatccgcaaggcgcggacatcgaaggcgccgtcgaaaatctgcggcaaattccggcggaccgccgtcattgggacatgatgaacagccaccgggccgacgtgtccttttccccgttgccgaaccggttcggacatcaggtgctcacgcgggttctgcccgccgacgaacgcgagttcgccaagtggaatgccgatccgtatatccccgactatcccggcgacggtcgccacgaagacgacggcgccgcttacctgcttccatactggatgggacggtaccacggattcattgaggaacaatccgccggctgaattcgggcatcaaacgctgcgcgggttcctgtgtattgttcggaatagcgcggccgaggtcaagacaaccgggccaattcctggaccaagtcactgagaccgatggcttccactccggatgcgatccgatagcggttttggcaggaatatacgacgaaaggcctgtccgttttcagatcttcccgtgcatgatggaaccccttttcacgcttgggagaagaagccgtttgattttttgggcccagagaccgtttcccggcagttccagtagcaaatcaatttccgcgcccgccgccgtccgatagaaacttgcatgggcgcggtcaggggcaaccgccaactggttttcgacgacaaatccttcccgaatcgcgccctcgaccgggtgcccgaaaagagcacggcaatcattccaattcggcacgggcattggccgttcagccgaatcggaattcggcgttacatgtcgttgtactgaatgggggcacgggatcataagggacttattccgcgaggatgctgtcgtatgccttgaaagccttgcctttgcggttgttttcagccggggaccttcgtttaccggaggtttgcggaaggaatcgggtccactggagcgaccggccatattttgatcgtcgtttttccaccttgtgacacttcaaaggggccagggaagggatggtattcatttcgctggtttccgaagtaatccgttccgatacggattggcgatccatcccggttttcgtaggggaggccgggaatgcttgccttaccgagtagatccgtggtgacgatcggccgtgtccgttcggctacccatgccgcatcgaacatgccttcgagatagaagccgtccgcccgttcggacagcgtgaattccgctccgagccctgggtccagcaggggatccgtttcatgcttcggcggcttggaatcgttcaggtagacattgcccttcataatcaccggaagcgccgccttgtcgtaatccttcaatccgccgcatcgcgcgaacagattgttgacgaggcggtcatcgccgatcggattgttgtgcatgcccgcgagttcggtggaatgggccttgtggaacggggtcatccgtccgtcgaagcccagcaggtggatgttgccggcaatcaggttgtgggcataggcgccgccctgcgaaatggaaagcacggcttttttcgacaggaacaggttgttgtccacgagaaacggtccgtgattgacttcaacgaacagatcctggtgcgcgttgtcgtgaaacaggtttcgcgacacccgagcgccttgggccatccagtccagccaaagtcccatgacgcaacggtaaatgtgattgccggcgataacggtgtcaatggcgccatgaaacttgatgcccgccatttccgcgccggtaaacaattgccggacgtgaatgtcgtgaatggtgtttccggtgacggtgctgaaggcggcgcccatgctgccgacgatacccgcctgttcgcaatgggcgatggtgtttccacggacgatgtgcccgccgatggtttccttgttccatccgttttccaaggcgcgctcgatagtcttgacgtatccttcggcggtgtcggcggaagtgttgtcccattgatcgccgtatttccccagcgagatgccggtacagaccgagtagcggatgtcgttgttttcgataatccagcccttgctccaatggacgccgattgcgccggtctgttccgccgtcggaggcgcccattgcgtggcggcatggcggatgaagaagcctctgacggtaatgtagtttacaaacggtttttcgggatagaagatggttttacgcacattgatttcgacaaggcgctcattggggtttattcctttgaattgcgcccatatcgtcgtatgggtttcgcctgcctcggcataccacaagcggatatcttcctgtactggacttgagttgcgggacttgaagacaaggcacaaggtccgctttccgcttaccggcttgatggcggccttgaaactggcccaggattgccatccgcctgtaaaggggatcggacacgttcccactagatcgccatccggcgcatccaggcggatttcgatgttcccgccattgcttgccgcagcggcgcggatctccagttcctcggtattttccctgaaatcaacgtcctcgtacttgacccagtggccgttcaaaataaatccaatgcattgtccgccttccgagcattcggcattggccgtgccgttcttcgccgtgaaatgcgtggcttcgatgcggggggtgtccgccgcgcgattcaggggcctcatccatgccacattcagcaagtacccatgcccgtcctggccgaaccaggaaggaaccgtgcccgcgggcgccatgacttcgtcccggttggccgcctcgaccagccagtgcccgtccagataaacggccccggtgtgatggttccgtcccttgggattgaaccaatcgccccggatgcgttcgccatagggattgtacttgccgaaaaacgtattgggcagaacgaccttccacgtgtcgtgttgcaccttttcccagcccctaatgacttcggaacccttgatctcgacatgttcccccggagccgcttggtagacgatccgcttttcgtcggattccccgccacgcggaggcgcaacggattcacgatacacgccctcgtgaaccgtgatgacgtcaccgggctgcgccaagcgggccgcggcggcgatcgtcttcagcatccgggcgggcgaaccgtcgttggcatcgtcgccttgcggggaaacatgaaactcggcggcgccggccatcggcatgatcaaacatgtcaaagcgagaagggttgcgcaatgggcgaatcggtctttcatgatctgtttcctctctttttcgtttcccgctactcttgcgagcggctgtccctgacggcctgctccatggctaggatgttctcttcgggcagcgtggcctgcagattgtgaacggcgttgaacacgaaaccgccgccctcgttgaatatcgcgatacgttctcggacttctttgtacacttgttcgggcgacccaaacggcatggtcttctgggtgtccacgccgcctccccaaaagacaagatccttgccgtactcccgtttcaacgtccgggcgtccatgcccgccgccgaacactgcaccggattcagaatgtcgaaacccgcctcgatgaaatccggtatcaattcgacaacgcttccgcaagagtgaatgaacgacttccagttcgtgcgcgagtggatgaaatcgttgatggccctgtgaaaaggccgatacaggtcgcggtaggtctcacgggcgatgaacaacccctgttgcgtgccgaagtcggtccccgtgacaaaggccgcctgcaccgtgtcgcccagcgccgcagccagccgggccaggttttcgagcgcaatggcgcattgacgctcgaacacttcgtacacatagtcgcgatgcgcgagtgtcgccatgtaccattcctcgacgccccggatgccgcgcggatgcttcatccacatggccggaaccagtgcaatgtcgccgaaacccgttcccggacaggtcaatatcgcgcctttccccttttccgcggccctcgtggcctgcgcggcgaaatggacgatgtcttcctgtgaaagcggggcgaattcctccaggttctcacggggatccagccgattttcgtgaatggggccttgccggttcatggcgtcgaaataatagcccccatgcggcatgtgtccgctcggcggaacgctggtgtcgccttccggatagagataccaaccgcccgcgccgtccggtgtcacgttgaagtttcccggtacgagcacctccgtgccatcgaatagcctgaacggtttccagtccttgttttcaaagccgaaaagggttttgcggggcattaccggcgccacgtcaacgcccagcgcgtccatgagggcgtcgtccacttcgcccagcatctggtacggttcaatgactttgacgggcggtgaatcccggcccagcaaggccttgcgcagttttgcgacggcggatgccgcgattccggttacggccgtggatccgaaatccacgcacacacagtccggctgttgatggttcagcgtggcgttcagccgttcaagcgattgcatgttggcaaagcctccctatgacctttggtgtctccgatgacgaccatgagggcgatgacaccgttgacggcattacggccggatgcgcttttaggcatttcgcaaacttagggtcggatgccgtcgccaatccacattcgttcgatttcttccaatgacttgcctttcgtttccggaaccgcccggaggacgaagagaatggacaccacgcaaaacgcgccgtaaatccagaacgggaatccgccgtggaaggccgcatcgaggtgtttgttttccgccatcattgggtaggtctgcgaaaccacgtaattggcgctccacaggcagaatgtcgcaacggacatggcccgcccgcgtatttttgtcgggaagatttcggacaggatgacccacgtgaccggcccgaccgacaaggcgaaacaagcaatatagcccagcacgaaaaccagcatccatgcctccaccttttggatgtacgccaaaaatcccatggcaaagagcgaaagtcccatgcccgaaaagccgataagcatgagcggcttccgtccggtcttgtccaccgtgtaaatggccacgagcgtgaagagcatgttcacaaaaccgaccacgatcgtttgcaggagggcggaatccgtgccggttccgagtttcttgaaaatctcgggagcgaaatacagaaacacgttgatgcccgtaacctgttgcaacacagccaggacgactcccgcgagcacgatgccgcggatgcccggccggaacatttcccgccacgaaccgccttccatttcgagcgtccgctcgatttcggcaatctcggcatgggcgcactcttttcctccgattctctccagaatagtcaaggcggcgcgccgatccccctgcttcatgagaaaacgcggggtctccggcacgaaaagcatgaacacgagaagcgccaacgccggcaaggcttccgaaccaaacatccaccgccaaccaacggtctcgttccatgtttgatcgccttggagcgcaatgaagtaattgacgaaataaacgacaaacatgccgaacacgatggccagttggttcagtgaaaccatgcgcccgcggattcgagccggcgagacctccgcgatgtacatgggcgaggtcatcgaggcgattccgacgccgacgccgcctatcatgcggaagaggatgaattccgtaaagtttcgcggcaaggcggtgcccaccgccgacacgaaaaacagcaccgccgcgaggatcagcgcgcgcttgcggccaagccggtcggccatttcgccggccatggccacgccgacaatgcagccgacaagggcggaggcggccgcccagccggtggccgcgggacccaggccgaaccgtgcggcgagcgggcctatcgcgccggagatgaccgccgtgtcgtagccaaagaggagtccgcccagcgtcgcgaccacgctgatgccggccatgtacaacgtgctgccggtttctttcgaatcacgcatgcccttctcccgcggccatgattttcccgcgtcgtgccgtgaagactctacgccggcgggaagggcgaatcaagcagcgtgcaatacaaaaagacgattcgaggaaaagaacgcggcacgcgccatgcgaaggttgggcggattcttgaatcaggtgttttcccggatatataattccattcgatcatggagcgagagaatccggctccgatggggttcctgggagttcccgcgttgttgcggtgtgtcttcgcaacagtgcatggggacagggatccgtggtggtgtcatggcggtccaggtggtcgttccgcgtgtggtgcgcggtccagcccgatggcaataggaggagaatgaccttatgttggcacttgtggtaggcgtcagtctgtacggactgcttactgccggccggccggtccgttcggcgcggacccggtttgtaggcagggagcggacaggcaagcgggcggcgatgtgcgcgctcgcacttgtgatgatgttgttcgcgggcacggcgggcgcgagcgaggcggatctcgtaatccccgatttgtccagcgtgagttttgccggaatcaacgggcacaacctgctgttgttcggattgatcatctgcgttggaggctcgctgttcggtctggtgcagttcgtgcggattcgcaatcttcccgtgcacaaggcgatgctggagatttcggagctcatctacgaaacctgcaagacctatctgatcacccagggcaaattccttgccctgctgtgggcgttcatcgccgtcatcatcgtcgtgtacttcggcatgctgctgcatttcacgattgccaaagtcgtcacgattgtcttcttcagcatcgtcggcatcctgggcagctacggcgtggcatggttcggcatccgaatcaacacgctggccaattcgcgcacggcgtttgccagcctcggcgggaaaccgttcccgacgatggcgattccgctgcaggccggcatgagcatcggtatgctgctgatctcggtcgaactcgtgatcatgctgttcatcctgttgttcgtgcccggcgactgggcaggcccctgcttcatcggcttcgccatcggcgaatcgctgggcgcggcggcgttgcgcatcgcgggcggcatcttcacgaagattgccgatatcgggtccgatctcatgaaaatcgtcttcaaaatcaaggaagacgatgcgcgcaacccgggcgtcatcgcggactgcaccggcgacaacgcgggcgactcggtcggcccgacggcggacggattcgaaacctacggggtcacgggggtggcgctcatcaccttcattctgctggcggtgacgggcgcggcggttcaggtccaattgcttgtgtggatttttgtgatgcgtgttggcatgattgtgaccagcggcctgtcgtacttcatcaacgacgcgtgggccaaggccaagtacggccatgctcagaagttcaacttcgagattccgctgaccacgctggtgtggcttacctcgttcatctccatcgcgatgacctatgtgctctcgtttgtccttatcaaggatcttggcgacggtacgctgtggtggaaactctccaccatcatcacctgcggcaccatcgcgggcgccttgattcccgaattggtcaaggtgttcacgtcggtgaattcgcgccatgtgcgtgaaatcgtgaccgcttcgcgcgaaggcggcgcgagcctcaatatcatcagcggtttcgtggccggcaatttcagcgcctattggatgggcatggccattgtgttgctgatgggtatcgcatacgtcgtcagcacgctcggtctggcttcgatcatggccgcgccggccatcttcgcgttcggtctcgtggcgttcggattcctgggcatgggaccggtcaccatcgcggtggattcctacggtccggtgacggacaacgcccagtccgtgtatgagttgtccaccattgaaaccatcccgaatatttccaaggacatcgagaagaccttcggattcaagccggatttcgagcgaagcaaggatttcctggaagaaaacgacggcgccggcaacaccttcaaggccacggccaagccggtgttgatcggtacggcggtggtgggcgcgacgacactcatcttctccatcatccaactgctgaaagcccggtttggcgatgccgacgtggcccacggtttgtccattcagaatccgatgttcctgctcggcctgattacgggtggcgcgatgatcttctggtttgcgggcgcggcgacgcaggccgtggccaccggcgcctacaaggccgtcgagttcatcaagcgcaacatcaaactggaaggcggtggggaaaaggcttccgtcgaagactccaagaaagtcgtggccatctgcacgcagtacgcgcagaagggcatgttcaacatcttcctggccgtcttcttcggcaccctggcctttgcctgtctcaaccattacttcttcatcggctacctgatttcgattgccattttcggcttgtacgaggccatcttcatggccaacgccggcggcgcatgggacaatgccaagaaaatcgtggaaaccgaactcaaggccaagggcaccgaactgcacgatgcgtgtgtcgtcggtgacacggtcggcgaccccttcaaggatacctcgtccgtggccatgaacccggtcatcaagttcacgaccctgttcggccttctggccgtcgaacttgccatcgaactcagccgctccatcagtcttacggcggcggtgctgttcttcatctgttcggccgtgttcgtgtaccggtcgttctacagcatgcgcattccggaacgcgtgggcgacaaataagaagtacgcaacagccttaacccggggttttgccttgagcgaagccccgggttttccatcttccggcgccggggttcattgtgttcagaatgttttttgaatggcaatggttctgatatcttcagcaaaacacgatggattccggtctgaattgcttcgttggccggaaaagaagaaggagcaacagccttggaaggaccccgtcccatccgcgtggatgaattgccgtcgttggcccggctggtggataccgtgttcatgaagggccgcgaaggggcaatgttcggccatttccccgcgctgtttggtgggcacaatgcccgaaattgcctggttttcgtggacaagggccgtgtcgtcagccatttcggcatgattcaacgctgggcgtgtattgacggctgcacggtgcgcgtggcgtgtgttggcgccgtgagcacccatgaggcgtatcgtggccggcggcttgccacgcggcttttcagcgccgcacggcaacaggcccttgaagacggcgtggatttcatgctcatttccggcgatcgggacttgtaccggcaggcgggggccgtgccggttggaatcgattggacggcgcgcattatacgtgagcaggcggaagcatggcggctgcccggcattgagattggcgccttccgccgcgaggatattccggcgtgcgccgcgctttacggccagcgcacggcgcgatttgtgcgcccgccggaagactggcacaacctgctcgtccatggccgcgcggatgcgcgggaggtgattactatcgttgtgcggagatatggagttgtttgcggttattttgtcctgccggaaacgaccatcgaaacggtcaccgatgccatcgagtttgccggcgaaccgctggcgctgcgcgcggcgatggcgcccctgatggacaaccggggattcaacgaattctttttgcgcctgcaacagggcgacgcggtcctgcggggcctgtttgcgcgggagggcgtctcgctcgaacccgtcaaaacgggcggcacactgctgattttgaatttcaatcaactcgtgcaacggctccgtccggtcattgaggcgcggacggacacggcacgatcggcacaaatcaatatccgggaagacgacggcgtttttcggttccaatcgcccgacgcggagttttcaaccgaccgttccggcgccgcgcgggccctgttcggctaccccggagatccccctcttccgggatcgctgggaagcatccttccgctcccaacattgtggtacggcatcaattacacatagctgactttttgaatcgtggccgttctccgttttatggccatcccggtgattgcctgggcgtacaggaacgttcgaaatcaattggggcacggcgcggatcccttcactccacacgccattcaagaatgccgccggagaaaccgggctggagttcgacttcgatacggagtgcatcggtcttgacaggattgaaggtggtgcggttgtacgtgttcaggtgcagggtgtacgcggagggctgatcgacctctttccattggcctttgtcagcatggagaatgcgccatgatttcggcacgcggcattggcctgttccggtgtcgtcaaaccagtagacctcgaccgctttcacctgctgtgcttccttgaatgtgtactgtatccattcgcgcgtgccgaggtggtcccaccaagtcatgcgggggatggagtggtcattggacgatttcggctcgattctatccttgacggcaaggatcgaatcgcggttctggaatgaggccgtgactttactttcggaggccatggtgggtgggggaacggcctgcgcaagttcgatggtttccggcagccagacggccatagggccctgttcccggttgtcccacgcataatagggaacggcttgaaacgaaaccgacgcagcgcccgattcggtgcgcgcctgggccttgccgacgatcgtcatgacgccgttgagcaggtcaggccgccattcggcgttcagcggcgcatcggcgggcagcgccagttggcggacgtcgccgccgtgatcaatgccttcgacgcaatacacgatcggtccacgctgaagcgcgacacgcccgacatcggccttgacgttcgggtgtgccttcatgcgcatgatcggcatgggcaacgacaactcgatggtgtcgcccggtttccatttccgcgcgatgcgggcgtagccattgtccattgcgagcggcgtatcctggccgttgatcttgaggatggcgggtggctcgtggctggggatagatggaaccggggtatagagatcgccgggaacgggcggtcggcgccagccggggatgcgcaggcgaagcgtccaatcgccggatcctttcggttcgatcgtcaggcggatatcgccgtcccacgggtatttcgtggccattgagagggtcagttcgttttcgccgtcacgaatcgttgcacggcccggcataaattgattgacaaagatttcgcggccgcgatgggcataggcgtaaccggcgatcgaggggagaaaccgcacgatattcgtcggacaacaggcgcagccgtgccacggcgcgcggtggtgttgtccggcgctggcgagcgggttcacgtaaaagaagtgacggccgtcgagtgaaacgcccgacaacgcgccattgtacatcgcccgttcgacgatgtcggcgaaccgggactcgcccgcgatcaggcccatgcggtgattcatgaacacgaacgcgatggcggcgcaggtttcgcagtaggcgctctcgttcggcaggtcgtaaccacccgtgaacccttcatggcgcgcggtcgaaccgagtccgccggtaatgtacatcttgcgctgtgtcgtgttcgtccaaatccgttcgagcgcatcgcgaaagccggcatcgcctgttatggccgcgagatccgccaccccggaaaagagatacatcgcgcggacggcatgtccaacgatttcggattgttcccggacaggtttgtggtcctggcaggtctcgccccatgatcgcggctttccatcgggaccggtgcggcgtgtgtccatccgcccgcgctcctcaacgaagaactgcgcgagtttcaggtaacgatcctcgttggtgatcctccacagtttgaccagggccagttcgatttcttcgtgctggggcacgtcaacgagttttccggggccgaacacggagtcaatatgatccgcgaaccggatcgcaacatcgagcaggtctcgcttgccggtggcctggaaataggcgatgcccgcctcgatgagatgaccggcgcaatacgtctcgtgtgcgctgtcgtcggtccaacgcttctcgatgccccggagttggaaatgcgtgtgaagataaccgtcgggacgctgcgccgcggcaatcttttcgatgagatcgtccgcagtcttttcaattgtcggatcgcgctcgaacgcaaggcaatacgccgcgccttcaagcaccttgtacacgtccgaatcttcccacggcgcgccttcatgttcgccttgcagacgtcccgccgccttgaggaaattatttatctttcccgccttctcgcattgatcaaagcagtgtggcagtacgtgagtccggttgagttcaatccaggcggtccagaaaccgccgtccagtttcacgcttgtaaacggcgtcggcgccagcggttccgcagccgcaaaggaaaacaataccggcaaggccgatagccccagcaatatgctcatggacaatgtccctctcaaccgtagataaacgttgtttccggtgcgttatgaaaaacagactttctcggcgactcataatacttcttaggtttctcaatctccagcaatatttagttggactttacaaatcttggatgaggtctgcggatatcgtcaagaaaaaatgttaatgccaagaaatgaaatccaattataataataattttgcgatatgcaaagaaaacgatatattgcataataaagtgatagaatagcaaaccgcttgacaaatcgggctgatcatgggataatgaaaccagattattttggggaacattggaattgacgattggtttgaggttgaaggctgccaggtgtgggcgtttttttaggtggctttatttccagagttcctgattggtttgagtgaggcgccggaattattttgtgacagtgcgggagtcgcgtttcgttgtgattgacaaccaccagtagcagggaaagacctaagaaaggggtaacaacgatgaagacgaagaaatggcaatggcggagttttcttgcggcggcgctgatgtttgccgtgtgcggtgcggcgatggcggacggcgcatacataccgcgtccctatccgccggacttcgacccttcgttcattccgccgggtgaacccatcgcggagaaggcggcgccgaaggttctgccgttcgtggacgacatggaatccggaacgaatgggtggacagccacgggtttttggcggctaatcgcgaatccggaaaacatcgggatcagcaacgagatcaacccccggctggtccggttgcccgatagcggacaactcccctcttcctatagcggcaacggctgctggtggtacggcgaggacgtcaacgggacgtttatcggggcggatttccagcgcgaacagccgaatttgacgggcggcacgtcgcgcaaggccaacagcggatcgctggtttcgccattgctcgacctgaccggtgtgcagaatccgcgattgtcgttctggacatggtacgaagtggaaggcgtggacgtggaccggtacgacatgatgtacgtcgaggtttcgacagacggcggaacgacgtataccaaagccggcgcgggccacatcaatccggccaacgacgtggacggggcgcattggcagccctacgcgtcgcgcgcggtggacgggaccggcctcggtcaagttggtcagtggattcatgtgacctttgacctgtcgcagtttgcgaacagcaacaacgtccgcatccgtttccgtttcaacacggtggatgaactgtataacggttttcgcggctggctcattgacgatgtgcgcttggacggtcaagtcacgccgcagccgccgcggattaccgagatcaaccccaatgcgggatacaagaacacgttggtgaacattcgcggttctggtttcgtgaacggcgcggtggtatcgctgacgggaccgcagggcggcgcggcgccacagtcctatgccctaaccacggttgtcgttggatcggaaatggccacggccacggtcggcaacctgcctgtcggacggtacaatgtcaaaatcaagaatccggacgatctcgaaagttccgagccggtaacgtatgacgtgacacaggagccggcgccggatattaccggcattcttccaaattccggtctggacaccgaagaaacgccgatatccatcagcggaacgaatttcaagacgggcgccaccgtgaccattgacgacacggttccgcttacggacgtgacggtcgtttcttcgaccctgattcgcggcaaggtgcccgctggattggccccggggtatcgcaacgtcaccgtcaccaaccccgacagccagtacgaccggctgatcctcgggttccttgtcattcatcgctcgaccctgaccatcaatgtcatcggcgggggcacgacaaatccctcggcaggtgttcatgcctacgatgcgggcacggttgtccccgtgacggccatggcaaacaacggctggacgtttatccgctggctgggcgacatgggcgaaagcaccgatccgactttgtataccagcgtgtacaacgacacgaccataacggccctgttcggcgccaatctgactatttcgaccgttggccagggcacgacggatccggttccgggcgttcatcccatcacggatcaatcggtcacgctcaacgcctatcccgccgaaggttggcggttcgaccactgggaaggcgacgcgagcggctcggccaatccgcttacgcttccgatggacggtccgaagtccgttcgcgccgtgttcatgcaggaattcgatttgaccgtcgaggtcgtcggacaaggcacgacggatcccggcgagggcacgcacacctatcccgtctacacccaggtggccttgtcggccacgcccgcgcccggctggcgtttcgaccattgggaaggcgatttgaatgccgcgggcggcttggtcatggacggcaacaaactggtgcgcgccgtattcgtcgagcaggttacgcttacgctggccaagaccggcgaaggttcgacgtatcccgaattgggcacgcacgtgtatgacgccggcagttacgtctatctgagcgccatgcccgcgaacggctggcgcttcgatcattgggaaggtgatctgacgggcaacatcaacccggtcatggtcatcatggacgtcagcaagaccattacggcggtcttcgtgcagcagcatgccgtgacggtccgcgtgattggcggcggcgcgaccgatccgcaggtggggacgtacatcgtagacgccggaacgactttcgatgtggacgcactgaccgtcgagggttggcggttcaaccgctggatcgaaaaccagtccaccgagccgtcgctttcgcttacggtcaacggcgacacgaccgtgacggccgaatacatccagcagttcccgctggagattgccgttatcggttcgggcagtacggatccggccgtcggcacgcatctctatgatgcgggcgtaggggtggatatcgccgcgaccgcggacgcgggccatcgcttcgaccggtgggtgggcgatgtcgaaggcacggccaatcccgtttcggtgaccatgaacggtcccgtttccgtaacggcggaattcgtcgaggaaccgaaattgaccatcctcgttgaaggcgacggcacgacgagcccggccgaagggacccacacctacgcgatcggcactcaggtcgccataagcgccacccctgaagacgagtggcgattcgaccactgggaaggcgatctgaacagcctcaatgcgtcggacgtggttgtcctggatagagacaagaccgtcaaggcggtattcattcgccagtacgtgctggagatggaagtcgaaggcaacggcacgaccgatccgccggtcggcacgcacaagttcgatgccggcacggtggtgaatgtggcggccttcgcggaaaaagtgccgggcacggccggctatcagttcgaccactgggaaggcgatctgaccggttcggacaatccggcgaccattacgttggatgacgacaaggaattgacggccttcttcacggcggcgccgccggaaaaggtctcgctgaccattgccgtcaatggcggcgggtggacggatccgccggttggcacgctgatggttgacggaccgaccgttgaaaatccgaacccgaccacgacggtcatggcgacggcaaatgagggttggcagttccagtattggagcggcgacattcccgatccgaacagtccggaaaccaatccaattgatgtcttgaacgacgacaacaaggccgtgacggccaccttctacccggtattgaacatcaccgtcgaaggcaatggcacgaccgaaccgccggcgggaactcccgttgtcacggccacgggcgatacggttgaactgtttgcaacgcccgccgagggttggcgtttcgatcactgggaaggcagcatcaccagcacgtccgatgagacttccgtgattatggatgctccgaaggacgtcaaggccgtgtttgtgcggcaatatacgctgaccgtggcgaaaaccggggaaggcgcgacgacgccggccgtgggcgaatatacatacgacaccgctcagacggtcagcgtggcggcaagcccggcggagggttggcgtttcgatcgctggacttcccagggcgccgacgtgggcacgtccaacccgatagccgtggtggttgacggcgacaaggacatcacggcggtgttcgtgcggcagcacaagctgaccatcgcggttagcggcagcggaagcacggatccggcggctggcgtatacgttcgcgacaccggtgcgactgtccaggttacaccgacggcggacagtggttggcgcttcaaggaatggcagggagcggccacgggatcggcgattccggcttccgtgacggttgacgccgacaagaccctgacggcggtatttgtacaacaattcccgctgaatatcacggtcgagggcgaaggcacgaccgatccggcggccggcacgccccacctgtacgatagcggcgcgcaagtgcctcttgtcgcaacgccggcgaacggctggcgtttcgatcgctgggaaggcgatgtgaccggaaccagtagcgccgcatcggtcacgatgaacgccgaaaagaacgtgaaagcgatcttcgtccagcagtttactttgaccgtggccgtgaacggaaacggttcgacgagccccgctgtgggcacgcatgtctacgacacgggcgcgcgcgttacgttggcggccaccgcggcggccggttcgcgctttgtccgttggacgggcgatgcctcgggcagcgacagcagcgtgacgataaccatggacggcaacaagtccgttacggccgagtttgtcgcgcagtttgcgctgaccgttgacattcagggcgaagggaccctgacgcccgcgcccggcgtacatgtgcgcgatgccggcacggtcgttgacctcatggcctcgcccgcgtccggctggcgcttcgaccgctgggaaggcgatgtgtcgagctccactccgtccgcgtctgtcacgctggatgccaacaaggcggtcagggcggtatttgtccagcagtttgcgctgaccatcgaggtaagcggcgaagggacgaccgagccgccggccggcgtgcatgtctatgacgtgggcacgcaggtttcgattacagccacgcccgccgacggctggttgttcgaccgttgggaaggcgatgcgaccggttcggagccgtccgcttccgtggtcatggacgcggcgcgaacggttacggccgtctttgccgagaaaccactactggcggtcaacccgacagccatgggcgtggattatccggcgggcgcggtggcgttcaacgtccgcaacgtccggaccaccggcgcggtgatgccgtattttgcggcggtcgttcagggcggcgaatggctgaccctcgacacgggcgtccaaggcatagatgcgggcacggtccgcgcctcctacacccaaaacaccgcatacgagagccgtacgggcgtgattctcatcacggcgccgaatgccgtcaatggaccgctgagcgtgaccatcgttcaggcgcgcgcgccgtatcccgcgcaactgcgggtgattccgagaagccagtccgtgggcgcagcggaaggcacgacatccttcacggtgtcgaacggcggcgaactggatctgacgtataccgccgtggccgtttccgggacggactggatgtccattacgggcggcgcggtcggaacgaattcgggcgtgattacggttgcgtttgccgcgaatccgtcggtcggtgaacgtatcggccagatcgaggtcacggcgcccggtgccgatagcagccccgcgaccgcgacggtgttccaggccgggcgcgaaggcgacggcatcgtcgagggcacggtgacgaacagcatcacgggtgcgccggtcgagggcgcggtggtcgcattgaccgctccatcgttcgaagggagccttcaggccgtttcgggcggcgacggcaagtacatcttctcgcaattgaccgtcgcggatccgtatgaactggcctttgaggccttcggttacgagccagccacgatgacgggcgtctaccagacgcacaacgccgacatcgcgctcgatccgatcgcgataacgcggcccgaacggcccaaggccatcagcggaccgcgcagcgtattcgtcgaatgggcgccgaatcccgaattcgatgtcaagggctacaacctctatcggacgcgggtctacggcgcaaccgatcccacgccgatggaaacgcccgtcaagatcaacgggaccgatcccaacgacgtttatgaagggttgattacgggcacgcagttccgcgacgagaccgtgttgccgggcgtgtactacgtctaccagattcaggcgatcagcggacaggacaggccgagcgattattcagacccgtcctatccgccggtgaaaggccagtggctgacgatctacttccccgagattttcctgaaccacgcgggattgtatctgtgggagcaggcccagggcacgctgccgaatccggaagtggtcatgccggtgtccttcgactgcgcctatgaagtgtcggcgaccggcatgcagattgtcgcccggattccgcaggccctgttcgaggtcatcgatccgctggccgatatcaccatcgagcccaccggcgtcaccgccggcatgctcttcgagtcgaacgtgcttgtcggccccgacgacaaatgggaagtctttatgatttcctcggacatcacaggccgctcgctctacggcaacggcgcgctgttctacatcaaggcgaagacgatcgacgataccggctgcggcccgcttgagttgatcccgttcatcccgggcgattatccgggcggaccgcagacgatcggctatcccggccagcagggcgtgagactgtacgacgacgccccgtggccgaaggcgatcgatttggatctcgtgaacgggctgctgtgcaccaacggcggctgtctccacggcgatgtgaacaacgacggcgtcgtcaatggcgatgatgcctcgtttatcctaaagttgtggacccggaaggtcgatccgaacgagtgctcgatgtccgccggcgacatcaacctggacggctatgtggattcggccgactcgacgctcatcctccgctggctggcgggcatgaacatcgcgcccgcgaaggccggcacgaaggcggcggaaggccttgccgaggtgtcgtttgccgcggcggccattgaaaagaccgatccggagcctccgtcggtggccgtgggaacggtcacggcgaccggcgcctcggtggcggtgcctatcacgataaccaacgccggacaaatggcgggctgcaccctggtggcgacattcccgtcgggcggcgccggcctcggattcgcctccgcgcaactgggagcgtccttcgcctcccaaggattcctgatggagtccaacttcacggatgccgacggtttcggaacggtgcgcattgcaatcacaagccccggttcggcgggcaaggcggatgcaattacgcttgtcacgttgaacctaacggtcggcgcggatgcgccgggcaacacgacgctgccggtcaacatcgccgcgttcacgttgtccgaccagtacgcgttcgctcccaagttcaatgcgccgctggcgccggttgtcgccaacggaggcgtcaaactgctcggcggttcgctgacggttacgattacgccggcggaagcggtcgcggcaggcgcccagtggtctattgacggcggcacgacgtggcgcaacagcggcgaaaccgtcgcggatttgccggtcgggacgaagaccatcacgttcaagacaattgccggctggcaaaaaccgtccgatgttgacgtcgagatcgtggccgatcaaaccgcgacggtgttcggtgggtacatctccaccgtgacgacaggcgggttgaccgtcttgattacgccggcggaagcggtcgcggcgggcgctcaatggtccattgacggtggcgtcacatggaataacagcggcgcaaccctccccggcctaccggccggttccgtgaccgtgacattcaaggacgtggccaactggcagaaaccggccgacgtgcaggtcctgattgaagtggggcagaccaagccggccaacggcgtgtacgtcctgttgctgggcagcgttcggatcgtgatcgagcccgaaggcgcgcggaatgccggcgccggttggaccgtggatgacgatgccacggtgcatgccagcggacagaccgtcggcaacctgaccccgggcaaccacacgattcacttcgtggacgcgaccccgaccgaaggcggctgcttcaagccgggtgtgacgtgggtgacgccttctgaccgtgtcgtgaccgtgacgggcggcgggttggtcgaagagatcgttacctatgaaaccggtgagaaatcgcttgcggccggcgcctccggcaacggcgactggatactgctgtcgcttgtgagcgcggcgttgctcgcaggcggcctgcggcgttcgcggcgtcaacccgcggcctaacgcggagccaatagcgcaagaacaagccccgcgcggttccatgtggatcgcgcggggctttcagtttgttggacggcggttgtgctatactccgccggtgttttgcggtgtttgggagaggaaaaaacgatgtggaagaaactgttgaaaatagccgccggtgtcctggtggcgctgattgtgctgctttgggcgcgcaaagcctatgtggacgcgcactatttcgacaattacgatcccggtgcgccgttgaacgtttccgtgccggacaccaccgaagtgaacaaggatgctcctgaaaaaggctactcgatcgccaagttcaccttcgacgggtacaagggcgagaaggtgccgaccttgatgtccatgccgctgaaacgaaccggcaaaaaacttccggtcgtcatctttcttcacggcattgggcagaataaaaattttctcaaagaaatcacggccccgttcaatcaaaccggattcgcctttgtgagtttcgatcagtacatgcagggggaacggaaactgccgaagggttcgggcggtctggcctatctcaaggcgtttgccgaacgccccgccaagacggtcaatgaaacacgccggcttattgattatctagtcgcccatcccgacatcgatccgcaacgcatctaccttgtcggcgcgagttacggcgccattacgggaagcaccgtcatggccagggacaagcggatccgcgcaggcatcttggtctatggcggcggcgatttcggcaaactgctcgattcctatgccaatcatctgggggtggcgatcgcgttgcggctgatagacggcaaaaatgtcaatccggaaaaaccgcccctgcccaagctgaccgcgtcgcaggagcgcaaagtgggcgtggtcatcgcctgcatcgtgccgcttgcgcgctacttcatgggcgtggccgatccgattcactacgtggggcaaatctccccgacgcccgtctattttcaaaatggcaaatacgacgtgctggttcccgctgcggccggcaaggccctgcaagacgccgcccgggaacccaagaagatcacctggtacgaatccgaccacgtgggcatcaatcttgaagacaccaaacgcgtgctgagtgacggcctgaaatggctccttgaacaggacgattcgtttcgcgcgccggaggaaaaagtgacggaactgccgtccttcgacattgaaaagacctgatggtgggtttcaaacgccaagtcgcgttttcttgcgaaaaccgggacagcgggatatgctggtttacggaaggatcaagaatatcggcggccgggcgaatggatccatacggcgaagggagggtggaacatggatgacgtgacgcgcaggacgtttctgggaacggccggggtcgcggcggcaatcggttccgcggccgaagcgaaggaatcgggcgaacgaaaacgaaagaaaggcacggccatgtcgtttcggcgggatatcgcggcgctggtggacaaaacgccgctggtggatacccatgagcatgtttgggaagaagcgaaccggctgaaatcgaaaaaggggccgtcgcctttccctgcgcccgacgtggggattttgttcacgcactataccgactcggatttgcaggtatcgggcatgccgccggagaacggcgccaaaatccgtgcgtacaatgtcgcaccacgtgacaagtggaaactgattgcgccttattacgaacggtgccgtcacaccggctaccaacaggtcgtccgcgaatccgtccggatgctcttcggggaagacgacgtgcgggacgacacatgcgaggcgatctcgcgcaaattgttcgacgcgatgaagcccggctactacaaacacgtcttgcgcgatgtcgccaacatcgaatattgccaggtaaacaacctcgaaacgcccgtgttcatggaaaccgcccagccggacctgctcgcgcaggacatcagcacggtggcgctgggttcggggctgaacgtcgagcctgtcctgaaactggccaagcgcgacgcgtccacgctcaaggattggcacgaggttatagactggtgctttgcgacattcgggccgcgcgccatcgccacgaaaaaccaaagcgcctacgggcggcggctcgattacgcgcaagtcagcgcatcggacgccgcgcccttgttcgagcgtttccggaaagatgaaaagagcctcgcgcccgcggaaatgaaggcgcttcaagaccacctgttccactactgcatcgaaaaggccgtggaatacaacctgccggtcaaactgcataccggctactacgccggttgcggcggcatgccgctcgagcggcttcggaagaacgcctcggatctgtgccccgtcatgtttgcgcatcccaaggcgaaattcgtcctgatgcacattgactacccgtaccaggacgaggtcatcgcgctggcgaaacattatccgaacgcctatgtggacatgtgctgggcatggatcatcaatcccgcggccagcgtgcgattcgtcaaggaattcctgatggccgcgccggtgtgcaaactgctcaccttcggcggcgattactgtcccgtcgaactggtccccggccatgcgcgcgtcgcccgaaagggacttgcccaggccgtcgccgaactggccgaatcgggctggctcgaagacggagacgttcccggtgttgtggagcgcatcatgcgcggcaacgctcgcgaaatcttcgactacgagcgggccttgaaaaactggaaacgataatccgggttgacggaacttattccgaatagaatccggatggcgttgttgcgcgcgtgggggagagggggctatgccgcgagggcggcttgaaaatcttggtactccttgagggctttggtctgcgcggcgatgcgaagggtgttgatttcctcgaaatggcgcaggagcatttcgacgagaggggcgtcgagtttgtcgtgatcggccatgtcgcgcaagatgcggaccgcctcgtccttgtcgcgtccggcatgatagggccggttttcagtgatgctcgtgaacacgtcggcaatggccatgacccgcgcgccgagcggcaaatccgccgccgtgtacttgaagggatagccgctgccgtcaagccgttcctggtgcagcgccgcccatggggtaatgtcgccgaacggctcgatggattcgagaatgtgataggtgtaatacacgtggcttcgcatgatatgccactcttcgggcgtcaatttgccgggtttttccaggatttccgaggggatggctaatttgcccaagtcgtgcagataggccgcgatttcgattttcgcgcactcctgatccgaaaaaccgatccggcgggccagcgacaccgccgttgccgcgacgccgctcgaatgtgtggccgtgaactcgctcttgaaatcaatgatattgcagatgagccgcgccagaccgagcagttcacccatctgcacaatttgaatgtgctgtcccacccgtttccgtaggatggcctcgacgaatttgcttgcggcttcgagccagatataatccttttccgaaaaccgcatcagggcgccgacatgcttgggcgcaaacacttttccctcggcctgggcgaccgcctcgcagatctcctgcacctgggacaggggaaacacgtcgcggcgcaacatgaccgccacacggtcggccagatgcaggatatgcgcggtttccggcacggccttgtcctgatgcgaaaggccttgcccgtggttccacggcaaatggtgatacaaaatgatgggtccgatgtccgcgaagggcttgaagccgttcaggagcaaataaccggccttgcaatgggggtgcgtgtaatgatcctcgaaggccaacaggtcgagccggttttttaccgagaatgcgccgatatcgtgcagcgcgccggcaatcaccagttcgtggatcgtttgctgtggaaagcccagttcctcgccaatccgcatggccaaataggccacccgcatgtgatgttccgccaatgccggcgccatcatgtcaaccgtgcgcgagatcggggagacaagatcccaaagactgagacgaacatcatcgagattcatgccgtgattcctttgcctgcccgtggagccgtcgaatcaacggatatacaatacgccttccattgccgcgtcgcaatatcctggcggtcgcgcggcaagattttggcggtgggggttattcggaatcggtggagtcgtttggccgtgcgatgccggcgatgaacagggccagaaaatcggcggggcgtttgtccggggacttgtcgcgattgaagacttggaccagatccatgtaatcctcctggtggtcccgatcgctgaggtagagttcatagaggggatctgtctggatgatgccgtcgcggtggcgcggacaccccacgtttttgtgcagcgaaaaggccttgaactcgccctgccgcgattcgtgtaatttcttcggatataaccggcagagaagagggcgtgcttcatagaccgtgcaatgccgggttttctcgtgcaggaaatagcagccgtgtttgttccgccgaagcgccatcatgtggcgcttgccgttacagcgcagccatgtcggatctgatttcggcacttcagagatgtcttccggtcctacaaactcgatgaattcgtacgggttcgcgcccgtctcgcgcacgagacgaatcacatcccacggggtcggcagacagatcacatcgcggcaacaatggccgcaatgatggcatttgaaccgaacgaaatattttcccatggccgcataacgtacatggttccgatcgaaaacgcaagttcgtgaaggcttctttttgaactaacgcctgtttcccgcgatccatcgggaaagacgatggcgcacgggcagcgcggcgccttcgcaatcggcgcctttcagcactgcgtcgtcgaggtttgcgcccttgagattggcgcatgtcagcaaggcgtcggtcaggttggcccgctgcaggctggcattcgtgagatcggcgccggagagatcggcttctgtgaaatccaatgcatccagattcagcccggcgagattggcgcgggccagatccgccgagcggaaatgggcgccttccagcgtcgcgccgcgcaagtccgcctcggtgagatccgcgccttgaaaatcaacccgcgtaagatccaaacccgtcaacacggccttcatcagattggcgccgcacagatacgccccacgcagccggacggttcgcaaatcggccccgcgcaaatcgcatttttcaagactggcatcccgaaggtcgaggtttgcaatgcgggcgccgtacagtttcgcttcgcgcagattggcccgctgaaggtttgcgccttccagattggcgccatgcaggttgacgcccgcgagattgcatccggtcatgtcaatatcgtgaagatccgcgttcagtaaatcggcccatgacaagtcacatccctggaaattcagcggcagaccgggatgttcccgccgccacgcgttccagacacccacgccctgccgaagaatggttgccgggccttccagaatagccccttgttttttggccaatgcccgcaattcggcgggtggccggatggcgccggtaaggttggcttcccgcacgcaggcggattcccatccgaaggagtcttgcagcatggccgccaccaggtttgctttcgtcaggttggcccgcttgattttggcgtgggtcaggtccgcggcgggcaagtccgcgccttccagattcgcgccggtcatcagcgcatggcccaattgggcgcggggcatccgcgccccgcttaaatcggcctctttcagattgctgttggccaggttcgcttccgtcagatccgcgccttgcagatgcgcgccggccaggttggcttcatcgaaatggcatccggcaagcgcctgttttcccatccgtgcgccgcgcaggtcggccttgttgaagcgggcttttcgcagaagggtctggcgcaggtccaagccctgcattccggccagatcgagtatggcgcccgaaagatcagcatcaataaggtttgccccttcaaggtttgcgcccgtcaggtccgcgccttccagttttgcgcccaccagaatggccccgcgcaggtccgcgccctgaaaaccggatcgaatgagcgtggcccgccgtagttcggcgtggcgcaaatccgcgccccggaaactggtgctcgtcgtcatcgccccgttgagattcgctgcgcgaagatccgttccggcaaacgatacgccgccgagccgtgcctcgcggaaatcgacctcgtcgagttttgcgccggtgacgacgacgtcccgaaaatcggcatattccaaatttgcccgcgaaaggaccgcatcggtcagatcggccccggtcaggaccgtcttgcgcagatccgcccctttgagaatggcgccgcggaggttggcgcccgccaatcgcgccatcaagagattcgccccttcgagattgacaccgcacagaatcatccgatcaagattcgcctcggacagatccacacgggtatatccgctgggtccccgccacgcattccacgcgtgaggaccctgccgcaacactctcaggcattccggatcggccatctaccgtttctccccgcgtttccccgattatacaaaggcaagcccttggcgacaagactattttgtcgggccttgctggacaggaaagtctgaaataccctatgatcgtttgaatttggcggagagatgggtatggactggatttgcgaagcggcaaccttgcggggatcggtggagatccccggatcgaaatcgcacacgatccgcgcggtggcgattgcctcgctggcggagggtgagagtgtgattcggcagccgctcgactcgcaggatgcgcgttcggccgttgcggcttatcgggcgttgggcgcggccatcgaaacgggcgcggacgcgtggcatgtcaagggctttgccggaaaaccgcgggttccggacgatgtgattgatgtcggaaattccggcactacgctcaatatcgtgatgggaacctgcgcgttgattgaagaaggcgccgcggtgctgaccggtgatgcacaaatccggcgacggccttccgggcctctcgcggcttccctgaacgatctgggcgcttccgttcgttcgacgaggaacaacggctgcccgccatttgtggtggcggggccttggcgcgggggcgatacggccatcgaggccgtcagcagccagtatcttacgagccttctgttgaatgcgccgttggcacaaggcgaaacgcgcattgatgtggcgctcttgcatgagaaaccgtatgtggaaatgacgcttgattggcttcgccatgagggtatcgtttggcatgcgaaagggtttgcggcatttaccgtgccgggcggccagcgctatcgcgcattcgaccggaggataccgggcgatttttcgtcggcgacgttctttctggctgcgggcgcgttgcccggcaacgatgtctcctgcgccgggcttgacatgaacgatacccagggcgacagggcggtcgtcgaatatctccggcgcatgggcgccgacatcgaaaccggttcggagacgattcgagtccggggcaacacgttgaagggctgcgatctggatctgaatgcgacaccggatgcgttgccgatgatggccgttatgggttgtttcgccgagggcgagacgcgcctgctcaatgttccgcaggcgcgcatcaaggaaacggaccgcattgccgtaatgggacgcgagttggccaaaatgggcgcgcatatcgaggaattgccggacggcttgatcgttcatggcggcgcgttgcgcggggccgaagtgcagggacatggcgatcaccgcgttatcatggcgctggccgtcgcggccagccgcgcgacgggtgtgacgcgcattcatggcgcggatgcggtggccgtgacttttccggccttcgccgcatcgctgtcggccatcggtggaattgtggaattccagacatgatcctttttcccgacatgcggccgatgggttctactttgtttccccgggagtgaattcgcgcaaagcgccggaaaagaaaggtatatcgccgtgaagattgtcatcatgggtcccaaaggcgctggaaaatcgtccatcggccgggtcctttcggccaacacgggactgcaaaccatagatacggaccgcatgatcgaagatctacacgaaaaacgggacgggcatcgcctaacctgccgcgagatcttcgccgaacatggagagtcctattttcgagagttggaatgcgacgtggcgaaggacgcgaacgcccatgattggcatctgataattaccggcggatccatcatgctgaatccggattcgcgccgcctgttgcgtcacgacgccttgctgatctatctgattgcgtccccggaagtcttgtgggaacgcgcaacggcccatgggacgccgccgtggctggaagggccggagggccgggaacgattcacgcgggaagtcgcgtttcgcgatgaagtgctgcgaccgttcgcggacgtggtgctggatacgaccgaaggcacgccggaggaactggcggaagaggccggcgcccttatcaacgaggaactggccattctgagccgatccgcgaacaccttcggtgaaattatccgcctgacgacttttggcgaaagccatggaccggcgattggcgctgtgcttgacggcattcgacccggcatcgagatttcagaggaaacgattcagcgcgaactcgaccggcggcggccggggcaaagcaaggtcgttacctaccggaaggaatccgacacggttcatatcctgtcgggtgtgttcgagggtaaaaccaccggcgcgccgatcgccatgatcatttacaaccaggatcagcgttccgaaaattacgatgatctcaaggacgtgttccggcccggccacgcggactttacgttctaccgcaagtacggcctccgggaccatcggggcggcggacgttcatccgggcgcgaaacggcgtgccgagtggccggcggggccgtcgccaaggaacttttggcaaggcgcggcgttcgtatcgtggcgcataccgtggaattggccggcatccgcgcgcaaacgtgcgactatgatgccatcgagggcaatccggtgcgttgcgccgatcccgaggcggccaaggcgatggaagaagccgttttggccgcgcgcaaggactgcgattcggtcggcggcatcgtgcagttggaaatccttggcgtgccgccgggactgggcgatcccgtcttcggcaaactcgatgcgcgcctcacaagcgccatcatgaccatgggcgcggtgaaaggcgtcgaagtcggcctgggttttgccctggcgcggatgcacggcagcgagtcgaacgatcccatggccggcggaacttttgtcagtaaccattgcggcggtattttgggcggcatttcgaccggcgagcccatcgtgatgcgcgtggcggtcaagccgacctcctcgatagccaagccgcagcgcacgttaaacatttcaggcgaggactgtacgatcaaggtgaaaggacgccacgatccgtgtatagttccgcgtgcggtgcccgttatagaaagcatggccgcgctggccattctggatttatgggaagttcaggcgcggctgcggcccgaatgggggcgccaatgggaatcggacagcgttgcctgatgtggccgcgccggcaatgcgaagcgaacaaccaaggagaataaaacatgtttggatgcacctacggcacattgtttcagaccaccgtggctggcggcagttaccaggaagggctgacggttcacttgcagggcgtgccgcccggcctgctcatcaccgaagcggaaatctatgaagccctgctgacgcgcaagcccggacaaagcgaactggcctcgccccggcgcgaacccgacgtcccggtgatctacagcggcgtgaacgcagcggacacaatgccgggtttcagcaacaaaggctgcaccaacggcacgccgatggtgatcctcattccgaacctcgaccggcatttcgagcacatcgaacaataccaggtcaccaatcgcacaccgagacccggccacgcgtcgtatgcctccttcatcaagtacggcgaatgggacgacgccatcggcgcggggttcttcagcggacgatacacctcgaccatcgtggcggcgggggcggttgcgcggcgaatcctcaaacaacacggcatcgaggtgttcgcgtatgtcaaagaggccgcgggcgtgcgcgccgccgacgtgccgcatgaggcggcgcgcgcgaaggtggacacgttccgcgcggttcgcaaagcctatgatccgatttacgattgggtgtacacatcaggccggatcacgcccgatatgcgtttcctgcataagatgtccgtgttggcggaactcgaacgcgacttgatcgccattcaaagcgcggccaagcccatggacgcccaagccattcgcagggaacacggtattcatccgacgatgaactgtcccgacacggaggcggcattcgaaatggaaaagcggatactcgccattcgcgacgagggcgattcaagcggcgggctggtcgaggtggttgcgacaggcgtgccgacgggcatgggcgagccggtgtttcgcaaactcgacggcgaactgggccgcatgatgagcatcggcaccatcaaggccgtcgaggtcggcgcggggtatgccgtgaaggacatgcgcggctcggaatgcaacgacgccatccgcgccaaggacggcaacgtctacttcgaatcgaacaacgccggcggcattacgggcggtctggcgacgggacagcccatcgtggcccggctggccgtaaagccgaccccgaccatcgccaaggatcagaaaacgattgacaaggtttcccgtgaaaatgccgtcctgagcgccgtcacgcgccgcgatccgacgattgtcgcgcgcgtgtggccggtggcggaggcgtttaccgcgatgatcctcctcgaccattacatgcagcaccgggcctaccgggcgttgtgggcaaaataaaaaccgggttgaacagccttcggatgtcttcgcggtgcggacaggtcccgtccgcgccggcctcttcaaagtttgaattgcggggcattgcggaggccgatatcttccaactcgaaaaactcccgcgtgctgaatccgaatgcgcgggccacgatagcggcgggaaaactctccagcgcgttgttcagttcccggacgttgccgttgtagaaacgccgcgcggcgccgatgcgatcagttcattttgcagcgcaagaaaaggggcgctcgccttcaagtccgggtagtgttccacgcgtgccagcagtcggcgcatcgcgcccaccagttggttttcgagaaacgcctgcctggatggcgcgcccgtttccgcgacgcaaaactggcgcaggcgcgttacctcttccagaacgccccgttcatgccttgcgtatccctgaaccgtccgaaccagattcgggatcaactcgtaccggcgtttcagttcggcgtcaatgttcgaccatgcctcgatgcaatgattgttcagccgaatgaaacggttgtacatcgccagtagccacaaaagcggcgccgccgcaaggaaggccaacaccatgccgatatgtcccatgcctgtttccattgtccggccacccccaaaaatgctcaaccggtttgaccggcgaacagatagttgggcatcaatgcccgcatttcaaccagttgatccagaaacggaataaccgtctgtggccggcttcgttcccggcgccaggcacacatccattcccgatcgatttccagcatggtttcgcgatggcgcagcaggtactccatcatgcgtggatgacagaaatcgtaggcgaatttccgatcggccgcacgcacggtaaatgcccgcgaaaactcgatggactcgaaatcaatgtcctcgaatcccaacttttgtccgagtttcgaccaaagggtttcgggataaatgcggagttcggggaaggaacgctccaattgaagcataaagacgctcataaagtgctgttccttgtcttcgccgctgccggtcgtataattatattcaaatgacaacaccatccgtccctcgtagatcccttccaggatgttgacggcctggcgatcttcgccctggcgcaatacattcatgaagtcgaattggcgcggcaggcttccgcttctgcggcgataggcgaacccatattggcgggccagaacacggaacgcttcgctccgccggcgttcatacaccaggtaaacgaccacgccaagagccgccgtggcgaaaatcgcccacgggattagggaaaacacattgtgcgagatcagggaaaacacgccatgcgggatcggggagaatggggtgtccatgactcgctttttcctatgatttgcgccgggcggtccggatcaacgattgacgaagacggttcggccgcaatgcctcaatcaagggcatgatttcttggtccgcaattttcatgcaccatacaaaaaagttgcggcacatgcctaattgtcggcgcagcgttgtgttttgtcaaggaacaggacgggccatgaatacccggcaagccgccgggcgtactgttcgaggcagtaggcgaaagtttcgatgcgtagggcgagcgagccgggggaatggttttcgtccatgtcgcggaagacgaagaagggcttgtccgcgcatcggaggatggcttcgagaacggcggacagggacgaatccatgccgcagcgaaaactggatcattcgattccaagcaagcggagatggcttacgatgatttccttgtcgtctgaatcacaccaatacccagcatgattagcaggatgtcgcataagcgagtccagaaatctgccgcatcaaaattagtcatgtccttatttctttggaaacatccaggccgagtttcgccttcaccttcaccctcgccctcgccttcaccctcgccttcgccctcgccttcgccttcgccttcgccctcgccttcgccttcaccctcgccttcaccctcgccttcgccttcgccttcaccttcaccttcgccctcgccttcaccctcaccttcgccctcgccttcgccttcaccctcaccttcgccctcgccttcgccttcgccctcgccttcgccttcaccttcgccttcaccttcgccttcaccttcgccttcaccctcgccttcaccctcgccttcgccttcgccctcgccttcgccttcgccttcaccctcaccctcaccttcgccctcgccctcgccctcgccagttgcgggcttcgggtcggtggcggcgagaaactcctgcgcattggttaggccgtcgccatcgggatcatcgtttccggaataggcatcgagggtctgaaaatgttcgatttcccacgtatccgggaggttgtcgccgtcggtatccgccggatcgtaaattcccaagacgccattcatggtttggggcaacaccgatgcggagccgtccgcattcgccaaggcttggggcgatatcgtttttgcggcggaaagggcaagagccagcgtaccgggagcagttcccggcggcacgttgacgacaatcttcatcagggcgccttcgtttgcggcgaaggtgctgttcttcgaataggcgatgacggtagcttttgtgccggccatgtggtaatcgagagtaaaatcgccgttatcgagcaaagcgccgggctgcagtcccacgatggccgaaccgtctggcaggcggatgctgccgttgagacccgcataagcttcatcgccgtccgccagccgcaagacgacgatcgtctgcccaccgggaatcgtgttggcgttgtctagtgcgaacacggggatggcttgcgcgcccggcgcaagacatgccaggaaaagcagcgttccgaattgggaaaatcccgtgtttcgcatatcgtctctcccttcagtaacggataatgtacgtcacgacagccgacggctggatgttgttgtggggctgatcgccgcctgtcatgctggtagaagcagttctttccatttcttcatcgtcggccacatcgcggtcgttggcgtcatccgaatcattgtcgcgctggtatttgtcctgatacgagtggttgtgacgcggcatctcatcgatggtgagggtgtgcgtctcttcgcctagttgggcgccgacggtgcgttcggtgaggccgctgccttggcccgcgcccataggaacgcgcccccgcaaatcgggcacgttaaaggtgtttgtcccgtcgccactgccccagatggtgccgatggcggcaaagaggtcggaatatttgctgcgttccaccgcgcgtccgtcgcagggcaaatagcccaggggctggtccacgttggcttcgcccgcaaagggcaggacggttcccgcaggcacgcggttgaggaggctcgttgcattgtcggccgtttttgcctgaatcgcgtagggactgcaaagtatctgttgccggggcaacatctcttggggattggccagcggtgtgcctgttttgtccgattcgatggtgatacccaagtagcgcgtgttggaggagaaggccgacgaaatggcaacgacacccacggtgggcgaaacttcgagggcggtgccgccgctgtcgcccagaatcacgttgaacatgccgttgttcaccggcgcctcatagcggcgtccccaaatgacattcccgccggtgttcgcatcgtagatccggaaggatatcgagtagacgccgtcgggaaggggagttccgtctggttgggtgagttcgccctgataattcatcgcatcgggcactgacgccgcccatgccggcgccgcgccggtcgctacaagagccgtcaggataaaggccgctacaagatgtctcatggtagatctcctgtttccacaacgatgctttgccgcaaaaaaccacattttgttgtctctttgctaaaagggcctgtttttggcccgatgattgaaatagatctcgatatcgtcacagtcattgacgcgcaacttggtttgatttccgtcttttgcatagatcaccagacgccagccggtggcggccacgctgcgttcggcgaattcgttgaaggtgttgaggggcgtggtgtcgcgggaggaattgacaagattgagaacgacgtttacggtcagcccttcgttgaagcgccatcccggcggctgcggcggattggccgcgggatttcccggatgcttgtaccaaaatcgcgttgaccatgccgttgattcgcccacataatggttcggttcgccgggaaccggctggcccatctccaaattgcggataaactgcacgccgccttgggtaagggttcctgccacggccgtgaaggcgccggagtgggatccgggaatgttgatcttcatgtaattgatcttgtcgaggaatgcaccggggctcagaagcgtgccgttggcggcgtatcgcggcccaaagaagaaactgagcccattatccagcacggtgctgaaatcgagtacaatgacgccggaggcgtcttggtgttcgagtagataattgcggaacaactgggtggcggtacgaagttttccagtctgttcgtccaagtagtaaagtgtgtttccggcggcgtctttcttccggtaaccgaggatgtcctcggtaaacgacagccagtcttccttggcgactccgccgggaagaccgagttcgaaatcgaaggccttgacggcgttaacgatgtcgatcaactcgtcggcggttcgtgccccaaatacggaattgagcgaatagccgtcgcccatgacgaaaccggcgatattgtgcttgtactcgaaggcgcgcaacgtgaaatacacccatcgctgggccgtttcgaaggccttctgggcctcgagcatgtcgccctgaaaacgcaggcggtgcgtcgggtcggcataatagcgattgaggaggtcctggctgagttccgccatggtggcctcgatcgtggccttttcgccaaacagccccgcaagccgcgccacctcctgattgagcaataggccggcttcctgcgactgtaactggtaggttttcatgtcgagcagccatgttttgatggcggccttgctattgacgtcgagcagggcgtcttcctgcgcgcgaatttcagcctgttccatggcggcgaggacttccttctccgcctcgatttcgcccttgtcttcttcccattggtattggagcgcggcgttcacgctaaaggcaatgagtccgccgcttaccgtggtcgttccctggagatcggctccataggaaatgctttgttggatgcagttcgcggcggcggccagattgtcggcgcgcacctgcagggcctggatatgggcaatctccttggtgagcgaggcctgcttgttgccgtagcggatcatgatggactggatattggcattgatgccggcctcctgggcgcggcgttggacttcgatttcgacctgttgcttgaggttggcgatcttctgctggttctgctgaatgcggttggcggccaactgaatgctggtgacttgcaggttgatctcgctgccttggttttcggccggtttcagataggcgagatggaccggattggcgggatcgggtcccggatccacacccgtaatggcagccagacgctcgcgatatcctttgacttggacggccatgtcggcggatagctggtcttggctgccgcggtaggtctgatagctggcgcgggccttgtcgagtttggccttggccgcgccaaggggcgaagttatgtctccgacattgttccagttgaggagggcgtcgaacgaatccttcgtgttttcgaactgttgtaccagcatcagaaaatcttcgcggaacccgagcagattcaaattgccgtccatgaaggccttcaagccgttcaattcgccgatgctgttctgccagcttgcgatggtttcagggatgcccgaatcggcgggcatttcgtccggatcgtaatcgggaaagatgccgagaaggatctgcccttcgatgtccattttcgacagagtctcgttgatgagggttttggctttctcgatatcgcctggtgtcgcaccgttgcgcggattcccccgcatgatgtagcacatggccagttcgcgcgccgcaaccgcctgatcgcgcagcacattgaacatgatggcccagtccttgtaaccggtgaggagcggcgcggcctcgttcttggagctacagagcacgggaaccggattgtcgttttcgtcgcggaacgtggccgcatacaaagatcgtccgggcacctccgtcacgaagacgagatagccaaacggcggatagtctccgttgcccgtttgcgtccacgggaagaatcggggcatgtctacccccattccgtccgtaaacaattcgtaatagggtgttgctgcatccttataggcctccatggccctctcgaaggcgcggatctccgcatcgataacccgttcgccgggcagcggcacatcaatccgtcgcttgtaggcgcgcaccagtttttctttcgccaccaacagattggccatgcagcggtaataggcgatgtccagcaacacattgcgcagtttcttgtcgaaaggcgcgtatcggagcgcgtcgcgcaccatggtttcggcgctccggacaagggccaactcgtcatcgccaaacatttcggcgagcatctgatcgatttgggtttcggtgaggaggcggttttcgagttggttgacgggagtgtcgttcacgttgccgtagatttcgtcaatgaaccgaaatgcgggaggattggccggatcgtcaatgttgttgagcgaatccttgatgatcaacgtccatacaccccgggcattttcgccgctgaaagcggccagttggccttgcggcttgtgcggccccaaaaacggcggagaaccttctccgatggaaatcgtcgccgaatcacgaagaattaacgacgatcccccttccacacactgcccgaagttatcggcgccgccgcccacattggcaaagagcaggacttcctggccattgggcgatcggagcgagacttcgagatcctcgtcccaggagtgctcgatatcgagcgcgacctgcacgtcggccacgaccacgttgtcctccaccgttaccgacgatgtgatcataccgggattgggaatgtctttgggcgtttcgccaaaggcgggcgtgtacgaatcaattccctgttggaacaggcgaaagacggcgggacttccttccgcgccggcagcatttacgaagatagttgccgagcggggcagccccggattggccggcacgttgaaagtgaacgatccgttgtttgttccattggcgccggacaacgtgaggaattcgccctccgaaatttcggcctgccacgacattgtgccggcgcctgcattggctacgttgaccgtgacggaaccgcccgccgtggccactacactgctctgcgggttgatcgtcaagatattctccgcggcgccctgaacgaccagcaccacggcggggctgccgtccacattatgctcctccgtgtaaacacggatggcctggctgcggacgccgcccgtattggccccaaatttgaccttgaacgacccgctgtccgtgccgttgtcgtcaccgtcgaaacgcagccaagtgcccgaagccgatggaatcaattccgcatcccatttgaattccttcttgtcgagtttcttgacagttacgtcgaatgtggcggtcccggcggtgttgtccacctgccgaaccagcggagatacccagaactcggcatgccacgttttttccaggggcgcgctcttgtcaaggggcccttgggcggaggtaatcgtcaacgaccaatccagaagacggcccacgccccctgtctggtcttggcgaaacagcatggaccgtgcggtgctgatagtatcggacacaaaatgtgtgcgagccaaaaaaggcgcgcagggctggccaaaggaagacgcggcgagcaccaccgtcccgttggtgacaagttcaggcgtgggcaaatagacgctttcgcattcgatgatgccaggattcaacacggcgcccgggttgtcgctccatcgcccgtcgggaccgattgcggcgaaatcctcgtcgttgtccaattcattcggtttgccttcaccccaattcgtataggcgcctgaaccgccgctttcccaaacccatgtcccttcttcatcagcgtcgctaaaaccgatccaagcccgttcaagatggtccaaaagtcctgaaacatccgtgatccagtcattttcctcatcgtcgttcacggaaccaaggcgcctccacaacgttcggcttcggcttgggcgttccagtaactcaggggcgcggtaattttgtaataatggccattggcctcgttgtatacccagccgctttcaggagccgcataggcgccgcggtggccgttgaaaagcagggttcccggtgtttcgcttgtacccgggcaaaggtttgcaaatcgggggcgtacaagtcgtgtgtcattctgggcgccgctatcaacgccggttgccggattagcccccaagatcgcaacaacaagccacagcggcgtcgcgaccttccatgcgcgtttactgctgtatagtccgttcattcctgtttcgctcccgggtccaacttacttggcgtctacaagaggtgcttccggtacgtttacatcacccggcacttttttaagcacaaatccgccttcgatctgtgtggccagatgggcaaatgccctgttttcaggaatcatccgctcgataacagcccccgcgaattcggtcagcgcgtcaataacggtgtccttgtcgggcgcccggtaatggaactcgaaagagcgggtgaatcgggtggccaggcgcgaggtgtaagcgtcgggaacgggaattccctcgatccggagattgaaagcggtatccgtgaccgtaatggtctgtgcgggccagccttggcccggcggatcggattcgggaatgatcccggtgtcgtctccccggaagtatgcttgggcggttccgccggatcgaagaatgaccaaatcgaagccaagtccgcttgaaagttgccgggtgaccacgcctttccacaccgcgtcattatcttcgatgtacacggtgcaatcggatggtgttcccaccacatatccagtgccggccaaaatccggatttcaatggattcggtgttttctacggtcaaatcgtcaagaatccgtatgggaatctccgcctcaaagccgttcacggcggcgctaccggcaagcacggtaaaatcttcccctcccgtggccaaggatgtattgtccacgacgtaattcacggtccccataaaggcgctcgtaaagaggatctttaggattacatcgctttccccttcgtgggtttttaccatcgtggtttcgaaactcgctttgggaatcgcgccttgattacgcaggaaatagacgagatcgcccgcgtcgagacggccatcttcattcatgtccatcgcttcggcatcggattcggaaaggctgttcctgcccaagatagaatcgcgaaggttttcttccgtcacggggcctgttccagcggtactgcccatggcaaatgctaataaggcaatgaacacgatgagaaaacccactcgagatgaaattagcccagcgcatgcacgttccactcgaatccctccctgaggtgcttgggaaacacaccacccttccgcgtttccctgcttattcccgactgcccactccatctttatatctcccctgtcaacggagacagatgtactccccagcacgatgattttacattaaaccaaagagagtaaaatgtcaagaacgagacagggcgggccatgaatgcccggcaagccgccgggcgtactgttcgaggcagtaggcgaatgtttcgatacggagggcgagggagccgggggaatggttttcgtccatgtcgcggaatgtgaagaagggtttgtccgcgcatcggagaatggcttcgagaacggcggacaggggcgcgtccataccgcagcgaaaactggaccattcgactccaatcaggcggggatggcgcgcgatgtatttcgcggcccataatttgcggttgctgtattcggaaaaactgggccgccagacatcgcttatgccgagcgcgtcgggatcgtttccgaataacccgcgcagggcttcgtccccgatgggcagcgattcgatggtgagaatgggatagcccagccggtgaagggcatcccacacgccgtgggagatccccggatccacgtggtacggcctgccgagcatgaccaatgcgatgccccggccgggctcgagcgaatcaatcacggcgcgtccctttgatcgccatgcctcttggaaatcttcccatgcggcgaatgccgcctcggcggcgcgcagcgattcgcggcgggtcatgcccaaatcgtcgcgccaatcctcccacagttgccgcgcggccaggtgcggatcgccgatatccacaaaggtctttctcagttggatgccgcgttccgcgaaaaggtcgcgatcgcgcctgaacgcggcggtggcggcttcgaccgctccggtgcaggcggggcaggcccgggtggcgacgacaccgcgcagccatgtggggaaggtgtccatgatgggaaagaagacgtgggtcaatggggttttctcatggatgcgggcgatcagatcgtgaaggtgcgcgatggccagtttactcggataacacggatcgatacagccgcgtttcgcaccttcgcggtacattttttcgttgctgtaaccggaccagatcaggcggtcttcgggcacgcccagcgcgcggaaatagccgaggaaaaacggagccgcggcatacatattcagtacgcggggcattccgattcgtagtctctcgcgctgttggataacccactgtcccagccgtccggatcgcggtacggcaagggggaggccgggcgatcggaacgtttcgcgcgcggacaacgcggccaaattcaaaccggcgtcactattgtgcgcccggggaggttccgggcggtgtcccgatgcgcctttctcgcagggagcgatgatggcctggcgtttgctcccgttcacgcgcatttcgaggatggtgcggatacacgcattcccgcagccggcgcagcgcgtggagtcgtcgtgcctcgcatcgcactggatcgtttccaacgcatcgaacccgataaaggtcgaagtccgatgttgggcttccatccatcgccgtgtttccatggcgcacccgagggcgccggcttcgccgcaatgttcatgaatgcggatcacgggttcgattcccgattcccgaaactgaccccgaatgaaatccacctgcgccttgacggccgccagattgcgctggacgccgccctgcagcacaaagacacgacccagttggggcaggttgtgccgctggcacacatacagccagatgtttttcggtaggaccgcggcaagccccgcgagaatttcgccgggcgtccagccgtgccgttgcacatccacaattccggattgcagaaacacggcgcatccgtggggaaaatcgggcatgtggcgggccgaaaaagccgcgtcggcatagcgatcgacggaaatgcccagcattgcggcggtggcctgaagatagaagccgttgccggccgaacattgggtgttgaggcggaaatcccgcacggccccccgttgcaggaaaacgatcttgatgtcctgcccgccgatgtcgcaaatcacgtccgcgtcgggatgcgcgcaaagtcccgcgcgcatgtgggcgaccgtttcgacgatggccgtgtcggcctgcatgacatgccgcaggatttcctttgcatagccggttacgcctgcgccgagaatccgcaatcgagcgccggcggtttcgacaccttggcgcaactcgcttgcgacatgccgcaggtcttcgacgggattgccccccgaaagccggtaggccttggcgatgatgctgccttggggagtcatcaggaccgctttcgtgctggtcgaacccgcatcaacgcccagataggcctcgacgtccgcttgcggcaggagaggaggcggactccacgccgggggcgcgtaatcgcgcataaaggcttcccgttcggcatcatcgcggaccagtccagcctgtccttgcggcacgcggcgttcctccatgatccggcggagcggttccgttccgcggtaccggccaatggaaggatgggctgcgatcaaggcttgtccgcaacacacggcgccgattgcgccgaaaaacaacgcatgatccggcacgataatcaaccgtccgtccggctcgccgtccggaacgaaaacaccatggtcgcgccagcgacgcggcagatggtgacgccaacgctcggccagacccggcatgaatacatgcggcccgcccagcaggagaaccgtgggcggcaaggcctcgccgcgggcaagcacggcaaggttttgaagaacgatggaatcgaacagggacgccatgagttcgtccgacggtgttccccgtttttgtagactgatgacgtcggtttccgcaaacacgccacatttgcccgcaacgggatggattcggaccgttgcccaatttacagcctgtaaattgttgatgcacagaccggtttttaccgcgatacgatcaatgatcgctcccgttccgccggcgcatttgtcgttcattgacacggtcttgcgccggccgccgtgcggggtggtgtcgtgaaagacaactattttggcgtcttcgccgcccagttcgatgatcgtgcgcgtctccggatgcaggatctcggcagcccggcatagggcgctggtttccggcacgaaatgggcgccaatcgcttcggcgacggccgtgcctccgcttccggtgacgaagacatggaattcatgccgggggatttccggaaaggccgcttcgatatcgttcagaaaatcatggcataccgacgcttggcgcatttcatggcggcgatacgcggaccatgccacgtcgcggcttttcgccatcatgacgattgccttgacggttgtgctgccgacgtcgaggcctatggttggagacacggtcgtgtccccgtttgttaggcgttgtgccgcacgggacattttattgaatgcccatatagcgcttgataacggcgacggtctccgtgtgaccgttcatttcggcaatttccaaggggatttttcccgacgagttctttacgtaagtgtccgcgccccgggccagcagcaattcggcgatttccgagtagccgttccgtgcggcctcgtgcagcgccgtgaaaccggcctcattgcgaaacgtgatgtcggcattcttttccagaagcaatttgaccatgtcggtaaaaccgagtgtgcatgacagaaacagcggggttttgccgagatagagcgtgttcacgataccggggtgttcgtccaagagacggcgaacttcgtcaatcttgtttccaaacacgttcgacatcagggcattgttcaacgcggcgtgcgtgcgacccgtttcttcctccttggcctgcaggttatccaactggtcaatcgttccccggacgatgccgacattgctcttggcgcccttcgatcgcaggaactcgacgacttccgatcggtttttcgagagggcgcgatccagtggagtcttgccgcggcgatcggatgcgttgatatcggcgccgagcaccagcaagagttcgacgacatccttgtgcccgcagtatgccgcctcgtggagggcggtcatgccctcgaaatttttctcggtcgcggcaatgtccgcgccgtggccaagaagcaattcaacgatgacgcgccgcccctgccgggcggcgatgtgcaacggcgcaagaccctgttcgcgcatgttggccagatcgggacaatcttcaagaaatcgcttgacgccggccacgtccccgctgttgagggcggcgctgaaggcgctttcggtggccggacgcaacaatgcggccacttcatcgttgttcgagtcctgtgcgattttcaagggcgtgcgcccctcgctgttgcgcaggttgacattggcgccccgggacatcagcagtttgaccatgcgcacatgaccctgttccgccgcaatatgcaagggcgtgaatccgttgatgtctgcggcgttgatatcggcgccttcgccgatgaacacctgcacggggccccaatggccgtcccaggccgccgcgtgaatcggagaacgcccgttgcgatctttggcgttgatgtcggcgccgttggccaccagcaacttaaccaattgcacgtctccgcgttgcgcggcgatgtgaagcggcgttcgttgtgaaatgtcggctgcggtgggattggccccgtgtgccagcaggagttcgccgatgccgagacatcccttttccgcggccgaatgcagcggagtccattggttttgatcgatcgcattgggatcggcgcccttgttgaggagaatatccacaagatccgggtgcatggcttgggcggccacatgcagcggaatctggccgatgttgtctttggcatggatggatgcatttcgttcgagcaagacttttaccgcgcggctttgatccttttcgaaagcgctgaaaagcggggtgcgctcgttgccgtcacgggcttcgatgtcggcccccttgtccaacagaagggtcacgagataatcctgacctgcggccgcggctacgtggagtgcggtcgttccgtacttggtttttccttccaagacggcccctttttccaagagatattccaccacggcaatacgatcgggattcggttccggttcgactttttgcacccggctttgattccagatgtggcgcggcttgatccggtcctccatgacggcagtatgcagcgggctttcgccccgcttgtttcgggcattgacgtcggcgccgcgttcaacgagccgggccacggcgtcctttcgggcctcgcgggccgcgacatgcagcgccgtccatcccagtttgtcgccgttttcgaccgtcgcgcccgtgtcgcacaaaagttccaccatgtcggcgagtcccgcttccgcggccacatggaggggggtacggcccttgttgtccgtcgagaagacgaccgccccgttgtcaatcaaaaaggcggccatgtccttttgggcggcctgtaccgccacatggagcggcgtgaatccgtcttttcgcttggcgttgatgtcggcgcccagcgaaagcaacaaggggacaagttcgcggtcgccgtttttcgccttgatatgaaggatactgtcgccggtggcaaaaattcgctggccgatgtcggctccccgttcgacaaacagtttcaccacttcgccgttattgtgcagcgccgcgatgaagagcggggaatttccttccacgtccacctgggcgggatcgacgcccgcgtcgagcaggtattcggcgatttccttatggccgaacatggcggcggtatggagcggggtgcgtttgatggcgttttgttccgtggcggcggacggcttgtttccgacgatttctttcagcgcggcgagatcaccgtaggcggcggcggcttcggcggaaacatccgccccgaattcacgcagcagttttgccgcatcgtattgcttggcctgcatggcgatcatgaccggcagcgacagcttgttttcgtccgcgtcgagatccaatcgagcaccgtagtccagcaacagttcaagcatgggcagattgccggcctccgctgcgcaatgaaccgccgtatatcctcgcggatcccgtccgtccaagtcttccagacgcaaaatatggttttcggcatccgccaaatcgcctgcctttaccgcctcgaccaacgtaggatatttgggaggcggcaaattgtccggaggggtggccggccgtgttttggatggcatgcgtggtggttttgtgagcagggtcggcgtgggaagcgcaagcccttcgtcgccggattccgtaggggcgggcgcttgtggttgaaaaggcgtctgtgccgggttgaagaactccggcagcgtgcccgtcgccggagttgctcccaagggaagaaggcctgttgtggggccctggggacccgagagaggggcggccggcggttgggcagcgccggctgcgcctagcggaatgaagacggagccgtctccaccgcccgggaattgaatatccttgacccagttcatgtttgccggcggggtagacgagccggtcggtggcgttatggatggaaaggccggcgcgggtggcgcaggcgcaaggggaatcggggactccgggagagtggctgggggcgcgctcgtaacgggggccggttccgcttgcgcgggttcgggaagggccggcgatgtttccacgggattttcgggcgcggattccgctggcgtttccgtgattttcggttcagaaaggggcgcaggggcagcttctgtccggatctccgaaaatggttcgggtacagattcgacagccggagcaggcgcgggagtttcggccgccgggggaacccgcgtttccgcaggcgccggtgtgggatgaatgggcggcgattccggcgtttccgtgggcaaaggttcttcgccgacacggacttgcaacacctggatgctggtcaatgcgccgggagcgccgggaatttggatatccttcaaccaatccatcggttgttgcgtggattgctccgtctggtctgtctgcgcgaagaggagggggggtaataggatccccgcacatcccagcgcaagaagcgcagacagccgccgggatttccaaaaggcgcttcgtgccttcatgccaatcatccttgtgcctccgtggcgtcgtgccatatcggtgatttctttggtccgctttgtgcggacaaatggtttcccatcagggtaacgaattgcgcggcccgtccggcgacatgagaggccgaaggccggctccaacttgacaaatcattttggttttcctgtcccacgcaatacagcggacggcgaaaggcggggtttttcctgcaataagcacggatggcttccagcgaagcgccggatccggctaatgcctcctcgaattcccgttcgcagacctgtctggcctcgtcaagcgccgattgcaggcgactgtaggcatgtacggcgccatcgcccgatgtttctatcgaaacgaagtgaaccgaacggccctgccgggcgcagtaggccgcgacggccggttgcacgccgtcggattgggtcgagggaaggcatccgaaaggttttacacttatgaccagatgggctttccggtacaaggcgcaatagagggtcttgccgatttccatgtggccctcgcctccgacaatgtgcgtgttgaaaaagggccttgccagtttacgcagcattgcctgcggaatttgaggatgcgggacgcctcgcagcgctcggcgcatccgttcgtagtcgcggttcaacagccatgccgtcagacgcaaaacggccacgcctttccagtcggccgcgcgcgaccgtgccgcggtgtccctggtctgcttggtcgtgccgccgcgtccatggcgaaaacgttgcgccgcgacgtcaatcaggtaattgacccatgtcatgaccggttcggcggccacttccgcgccttcggattcgagaaactcgaacaggcggtaattgccgtcgccttcggtaagttgcgcccaaaactcgccggtgactttgcaaaggggcttcgggcgcgtgaaatccacttcgatttcgcgatcaatcaattccgcgcagcgtgcgagcgcacttacaagcgtgtcgtcgaacaaccggtgcgcaatacatcgcgccgaatcgcgatccagccccgggattcggcgacacagcgcgcctcctatcagcgccgtcagccagcgcccgcgtgttggcgcggccatggtctgcctgcgaagcgcatcgcatacgatttccatcactttcccaaacgtgcgttccgtttgtccggggacgatttcatacggacggatgcgcatggcaaggtcgttgagcagatcccccaccatgaggcatgtgatgaagcgttcagcgaaccgggcgttgagcggaatcgcgtcctcctcgccggactgtttcaggccgcctttctcttggaacaaaatgacccggaatccttcgaatccgctgttgcgcagtgcaagcccgaattcctcctcgtacatgccaaaccggcacgggccgcacgatcccgccgtgacgaatacataggcatcgttgatttcgcgcggcgtaagaccggtttcgtcccgcaaccggcgcaagcggtttaccagtgcgccaatggtgaaataggccgggttgcacatgcccgggttgcccagttcgcgcccggttcgataatccgcattcgtcggcgtgggcagggcttccgatcggtagccgagcggcgcgaacgccgcgcccagcaacacgccgtgccgctccgtcaacccgccgtacaagacggtgacgcgatcccgttccgcgcgcgtgaaaggacggcattcgctccttcggtaatgtgcagcatgtgtttgatttgcttgcccttccatcatgcgggaatgatgccatattgccccgtttcggaacaatgacgccatatccccttgtcttcttttcctggcctcattgctgtccaaaagaattgtaaaaaaccacaaaaccgcaaggagccacgttttacctttttattccgttcatcggttcgatatctgcgactatctgcgtcatctgcggaaaatcacatgatccacagatggcgcagatatacgcagatggaaaacagggcacggatgttcgggccaggcgattccgaactcaaatctgcatgtcagagcggcccaaaatacgattgatcgggaacacttcttcttcatcgcgaagaaaaggtgtcccacgaacgctttcccggaaaaaacgttgtctatttactcaaaatggctttctgcaagccgacatttggacagagatgtcctggccgaaaaaagcacgcctaatccggaaaaatcttttattgccgccggacgggccttttcaagtatgatgagggtgtgcgcggcatgcgcgaatgattcggccacaaacggagggagagttcgatatgaacaagacaccggtatcacgcagggattttttggcggcgtcaagcctggcgctgggcgcgggagcgatgtggcacggttcggccatgggcgccaacgaccgtatcaacatcggcatgatcggtacgggcgaacgcgccgggtcgcacatcggcgatctgggcaaattgcaggaatcgcacaatgtgcgcatcacggcggtttgcgacgtgtggcggctcaaccgggaagccgcggcggcgagggtcaagaaattgtttggcaagaagcccttcgagacgtcgcgctttggcgaagtgctcgcgcggagcgacgtggatgcggtggtcatctcgacgccggattttgggcatacgccgattatgatcgaggcgttgaaggccggcaaggatgtatacgttgaaaagcccatgtcgctgacgatcgaggaagcgaatgaagcgttggatctcgcgcggaaaaacgaccgggtcgtccaggcgggcacgcagcgccgcagcgagggctgctggaaggccgcgcgcgcctttatcgcgtcgggcaaactcggccaagtcacgcgaatctcagcggcgaacaatgtgaacgagccgcgctgggcgcgcaagttcgacgattgcaaggaagaagatgtggattgggacgcctatttgttcaaccggcccaaggtcccgttcgatccgcgcctgttgcgccgctggcacttgtacaagatgtgcacaaacgggatttcaggtctttggatgagccatctcgtggatgccgccgcaatccttatgaatgcgtcctatccgaacagcgccgtcgcgctgggcggtctctacatgtggaaagacggccgggagcatacggatgtcttccatgctttgctcgattatccggaaggattcttgttcgattggtgcatgggcctgacgaattcagcggggaatcattacaccgttcacggtcgtaacggcacgctggagccggagaaactggcttattccggagacggcggggccggtgatcaaaaactcggggagggcaaactcgaccccgtgccgaatgaagaccatgtggccaactgggttgactgcatgcgctcgcgaaaacggcccaatgcggacattgaatttggccatcagcatgccgccgcgacgatcatggccgccaacgcgctcgagaccggccaacggatgcggtatgaccgcgaaaagcgaacgatttatcccggttgacaaaccggacaagccgtaacgggaacgggcaggattcggaatcgggaggcggcatggaaacgcaggcagcggtgcggtttcttcaggaacgcgtggcgcttttcgatggctttgacgccgggcgcttgggcgcgcttgtcgaaaattcacgttttgtttcctttgaagagaacgaatcaatcatcgaattcggcgaggaaggacgcttccttggcattctattcgacggcgaggccgaaatatcggtcatgaacgatgcgggcgaccgtcgcacgctggccctgctcgagccgggtaatctgttcggcgagatatcgctcatgaccgggggcaaaaccattgccgatgtcattggcaagacccgttgccgggcactgctcgtcccgcaggaggcgttcgcgcggcttatcgccgtcagtccgtccgccattcaatacttgtcgcggcttattattgatcgtacccgcgcatcggcctacgaggagcagaagtcgcagctgaatgctgccgcgttgcgccgcagcgaagatccctatggcctgcgtcttgccacggacaagccgatgaaactccttgtggtcaactgcggtagttcgtcgcttaaatacaatctgttcgacacaacggacgaggcgggcaatgcacatggcgtcatcgagcgcattggccaggaaggcacgcggcatcgccgtcattccgcgcggggcgacgacgagacggcgttgcgggccgccggtcacggggaagcctttgcagccatgatcgaagcgctcaccgcgccggatacgggcgtgctcaagtcgctcgacgaagtgtcggcggtgggccatcgcgtcgttcacggcggcggacggtacagccatcaggaaatcatcacggacgaggttctcgccgaaatcgagaaggcgtccgcgctcgcgccgctgcacaatcccgtcaacctgatcggcattcgcgaagcgatgcgccttttcccaaatatcccgcatgtggcggttttcgacaccgccttccatctcaccatgccgccctatgccttcctgtacggccttccctacgagtatttcgagacgaagggcattcgccgttacggttttcatggcgcctcgcacaaatacgtcgccatgaaggccgccgaatttctcaagcggccgttcaatgaactcgaaaccatcgtgtgccacctcggaaacggcgcatcggtgtgcgcggtggatcacgggcgatcggtggacacttcgatgggcatgacgcccgccgagggattgatcatgggcacccgttgcggcgacattgatcccgccgtcctgattcacctcatgaaaaccgagggccttgacgcggccggtcttgaaagcctgattacccgggaaggcggtctcaagggcctttcgggcatctcgaatgacatgcgcgagatcgaagcggccgccgatcagggcgatcaccgcgccctgctcgctctcagaaccttcagttatcgcgtgcgcaaatatatcggtgcgtacgcggcggccatgggcggacttgacgcgcttgtcttcacgggcggcatcggacaaggcagcgttggtgtgcgaagccttgcctgccaacatcttgccggtatgggcatccgcattgacgagcggaaaaaccgggaagccgacggattcacgcgtgtctgcgacatcggcgcagacgattcacgtgtccggattctggtcattccaaccgatgaagaacgcatgatcgcacgggaaaccctgcgcgccatcgaacgccggtacgttaccgaaatcatccgggcccagaggcccatgccggtccccatcgaggtttcggcccaccacgtacatctcgccggggaacatgtcgaggcgctgttcggccaaggccgcacccttacgccgaaaagcgatctatcgcagcccggacaattcgcgtgcgaggaacgtgtggatctcgtgggacccaagggccgcgtggcgggcgtgcgtgtgctgggtcctgtccgttccgaaacccaagtcgaaatcgccctgaccgagcaattcaaactcggcattgacgcgcccattcgcgaatccggggatttgcgcggaagcccgggtgtgaaactggagggtcccaacggatccgttgaactggagcagggcgtcatctgtgcgctacggcacatccacatgacccccgaagacgccttacgcatgggattacgcgacaaggacgtggtctgcgtgcgcgtggagggcaaacgtgaactcgtctttggcgatgtgctcgtccgcgttagcccgaattaccgccttgcgatgcacatagacaccgacgaggccaacgcggcccacatcggcgccggtgcgacggggttcgtggacgccatccagagcaggcgatgacgcagtggcgggcgcgtgttttacggccttgaaccccaagacgacatggcctatcataagcgtgtaaaccggtggcatgggatccaaaaaagccgggcgcgtgcgcccgatgctggggagtagccgatcgatgagtcagaaaattcgtatcgaattatccatcatgatgttcatccagttcttcatctggggcgcgtgggccgtcacgatgggaacctacctcggcaagatcggctttacgggcgcggacattggcaaggcgtacagcacgacggcgtgggcggccgtgttgtctccgtttttcattgggatggtcgccgaccgttttttcccggcgcaaatcgtgctgggcgtgatgcacctgcttggcgcggggttgatgttctgggcctccaccgtcacgacgcccggcctgttcttttgggtgctgctcggctatgcgttgtgctacatgccgacgctggcattggtcaatgcgatttcattccatcagatgaccgatcccgccaaggaatttccctcggttcgcgtgcttggcacacttggctggattgccgtggggtgggtgatcagcctgatgaaggtcgaagacacggcactgccgctgcaaatcgcggcgggcgcttccttgctgatgggcctgtattccttcgcgttgccccatacgccgccgaagtccgccggaaagaaaatttccgtcagccagattctgggtttgccggcgctcaaactgatgaaggagccgtcctttgcggtgttcgtcgtcagttcgttgcttatctgcattccgcttgctttttattatagtttctgcaatccgttcctgaacgaaaagggcatgccgtatccggcgctcaaccagtcgctgggccaggtgtccgaggtcctcttcatgatcgtcatgccattcttctttgtccggctgggcgtcaagaaaatgttgctgatcggcatgctggcatgggcggtccgttacgcgtgttttgcctatggcgcggcgacgatgccgttgatgggcctttattacatcggcatcattctgcacggcatctgctacgacttcttctttgtgaccggccaactttatgtggacaagaaagcgccggaggaaatccgcgcgaacgcgcagggtttcattgcgctggtaacgtatggcgcgggcatgattatcggatcgaatctttcaggcatgattgtggacaagtttacgacgttggatgcggccggaacgctggtggcgcgcaattggcagtccatttggctgattccgggcggcatggcgctggtcatcgtggtgttgtttgccctgctcttccatgagcggaacggcgccaaggcggagaaggcgtaaagctgagttggcgagagcaaaggacgaaaaggacacaaaggacacaaagggctttcgttgtcggtgaggagtccttttggtccctttcgtccctttcgtccttgggcgtccggccttgaaggcgcccgttccagcgagaacggcagggaaggaatggtcttatgaaagcggcaatcaaccaatgggcatttccgaatgacatgcccgcgcaggaagcgctggatcgtgtgaagcgcgcggggttcgatgcgttcgagatctgcggcgggcccggcgggccggtcaaactcgatgcgaccgaggccgaaatggccgcgattcggcgacatgcggattcgattggcattgggttgaccagcgtcgcgtcgggcgtcggctgggactattcgctgtcgtcgcccgatccggcgatgcgggaaaagggcaaggaagcgattgcccggctgcttcaaatcgcgaaatggctgggtgtggataccctcctgacggtgccgggcgcagtaacgccggacatatcgtatgacgcggcaatcgaaaacgcgctcgatgccatccaaggtctcgtacccgtggcggagcgcctcggcgtgtgcatcgccatcgaaaacgtttggaacaagttcttgttgagtcccgtcgagatgcgcgatttcatagaccaattccagagcccacaggtcggcgcgtatttcgacacgggaaacatcgtggcatacggctatccggagcagtggatacgcattttgggcgatcggattcggatggttcacgcgaaagactttcgggcctcgaccggcaacatggacggctttgtgatgttgcttgaaggaaacgtgaattggccggctgtgatggcggcgtttcgcgaaatcggttacgacaaggcgctcgtcgcggaatacggcccatactcgcattcgctcgacgcgatgctcgcgcatgtacgcacaagccttgggacgattatcgaactttgaaacagccgtgacccgaagggcataaaggccaaaaggacctgaaggattaggaagacactgcagggtgggtgacgcgaagcggaacccaccaaatgattggggagtcgtgagaaatgaatgtggcgatagtcggatgcaacggaatgggccgtcatcacgcacggatggcggcgaattgcgggttgcgcatcgtggtgtgcgcggacgtccagaagcccattgcacgggcgctggcggatgcccatggggcggattcgatgaccgattgcctcgcggcggtggagcggcgcgacgtggacattgtcgccgtcacgaccccaaccccgacgcatacgttttacgtcgcggccgccgcgagggccggcaagcacattttctgcgaaaaaccgttcgggcgcacggtcgaacaatgccgggaggccatggccgccgtgcaaaaggccggcgtcaaactgttcgtcgggcatgtggtgcggtatttccaggaattcgaggcgatgcgcgcacaagtcgaggccggtaaggtcggcaagcccggtttcgtgaaattgtaccggggcggaatctttccgacgggcgtaaacggctggtttcgcgattattcccagagcggcggcgtcgcgttcgacagcatgattcatgacctcgattggctgcgctacgttttcggcgagccggaacgtatcttctgccaggccatccagcgcagcacgccggaacatcttgactatgccatggcgaccgttcgcatgaagagcgggctgatcgcgaaagtcatcggaacatgggcccatccatccggtttccgtgtcgaggcggaaatatgcggcgacaagggcatgattcagttcaatagcgacgaggcgccgttgtttgtggcgcgacgcaacacgggagggggcgggccgggcatgatcgtgccggccagcccggtgccggtcagtccctacgaactcgagtggcgtgattttctgtcatggattgaaggcaagtccgccgcgcgcgtgacgccggaagacggactcgcggccgtccggatggccgccgccgcgctcaagtcagtcgaatccggcaaaccggtcaatctctagggaggatgccgtcatggccaaagtcggaattatgagtttcgcccacatgcacgcctatagttacgcggcgtgtctaaatgaacttcccgaagcggcgctcgtagccgtctgggacgatgacacgaagcgcgggcgcgccgccgcccgccagtttggcgcggcgtttgtcgcaaacatggacgcgtttctcgcgtcggacattgatgcggtgattgtgacgtccgagaacgtgcggcatcgcgaaatggtcgaaaaggccgccgccgcgggcaaatggattttgagcgaaaagccgctttcgccggacgtttcggattgccgcgcgatgatcgccgcgtgcaagaaggcgaaagtgggtcttggtacggcgttcccctgccggtattcgccgccgctcatggaagtgaagcgaatggtatcctcgggagactacggcgccatctatgcggtgtcctgcacgaacaacggacaatttcccggcggctggtttgcgaggcaggccatggccggcgggggtgcgacgatggatcacacagtgcacgttgccgatgccctgcgctggattaccggaaaggagttcacgaaggtctattgcgaaaacggtaatctgctgcgcgaaggcattgacaccgacgacatcggcagccttcacatggagatggaaggcggaattcaagtttcgcatatcgcgtcatggaatcgctcgaaaagttttccgacatggggtgacgtgacgcttgaaattgtcgccgaaaaaggtatcatccgcgtggacgcgttcaatcagaagatcaacgtctataatgacgaggccgtgcgggcggaatgggcctactggggcggcaatcccgatttgggacttgtacgcgacttcgtcgtggcctgtgacgaacgccgcgaacccgctgtcacgggtctcgatggcctgcgcgcggtcgaagtgaccgtcgcggcctacaagagcgcggcatccaatcgcgtggccgccgtgtgaggcggacaggagcacaggagatcggatgatgaaacatatacaacgggttacgattccgcggatggctgtcgaatacaaggccgaggtctacaaacaggactcgtttttcgcgccgtttgtcgcggccggcaaactggtggcgcttgtcgcgggggcggtcttcggcctttcgtcgctgctttccggattccgaaccgaattgtaacgcccttgcccgaatataaaggaaatggccggaagaaatcggatcttccggcccatttctcagcgacctcttgcgccattgagatcacaaaaaatgatggcagcccgctgggcgcggggcattgccggcgtcaggccaaggcggattttcccgaggatgccttgtcgcggtgatcgctttcatacaccagcagcgggtcttcgtgattgagtatcactccgggcgtgatgacgcattcgcgcacgtcgttgcgcgagggcacgtcgaacatgacgtcgagcatgatttcttccagaatggatcgcaatccgcgggcgccggtgttcttggcaatggcgacatccgcgatggcctcgatggtctcatccggaaaacgaagtttgaccttttcgagttcgagcagtttttcgtactgcttgacaagggcgtttttgggttcgaccagaatgcggatcaggtcgtttcgattgagttcgtgcaaggttgccaccaccggcagacgtccgatgaattcggggatcagaccgtatttgatgagatcttccggttcgacctgctcgagcagttcgccgatgttgcgctcgtttttcggacgaatatcggcgttgaaaccgattacgttggtgcgggtccgccgttcgatcaccttgtccagtccgttgaacgcgcccccgcagataaaaaggatgttttgggtgttgaccgagatgcattcctgctgcgggtgcttgcggccgccctgcgggggaacgttggcgacggtgccttcgaggattttgagcagcgcctgttgcaccccttcaccggaaacatcgcgtgtaatcgagggactgtcgctcttgcgggcgattttgtctatctcgtcaatgtagacgatgccggtctcggcgcgggtcggatcgaattccgacgcctgcaagagtttgagaatgacattttcgacgtcgtcgcccacatagccggcctcggtcagcgtggtcgcgtccacgatcgcgaacggcacatcgagcatccgggccagactctccgccaacaacgtcttgccgcagcccgaggggccgatcaacatgagattcgacttctgaatctcgaccccgccgatgacgccccccgccgcaatgcgcttgtaatgattgtgcacggccaccgaaagaatgcgttttgcgtgttcctgaccgatcacatactgatcgagaaacgacttaatctcaccgggcgtcggcacctttaccgaacgcttgaccttgcgctggttgcgttcctcggccacaatctccgagcagagattgacgcattcgtcgcagatgtttacatcgggacccgcgatgagcttattgacttcgtcgtggcgcttgccacaaaaagaacatgcgggaatctcgttgcgccgatttggaggcattcgattctccttctaccaatggaactatcggtcatggtatagcacttttcggcgtttttgtcaagagttttctttccgccgattaccgtaaccgcctatattgtgccagccgacggggttgcccgtcaagaaagattcgggcatccacaatctgcacgctacgggaagtcggcatccttgccgaccggtatttacgcaaagcccctctgattttgccggtcaacccgaagtggcgcgcgaggacatgcgccactcccaaccatcaagagcctcgcgatcatgtctcttctactgaaacgcggccggtacggcatgaaacgcacacagacgcatcttacgtgcggaccgcggacaatcccgctttccatgaaatgggatccccgccgtgggcgagaagttgcatcaatttgacacgtccagttcgttccgcaaatactgctgcctcaatcaggcaaccggcaaggaggaatggcgccatgacggatttcacgaatggcaatggacgcgtacccacgcttcatgtggtgggtgattcaattccgcaggcctattttcgggccatgaaagccgtttgggaaaacggtttggccatccggacggaatacgaccgcaaggacaattccggttcgtatattgatccgccgagccgcgatgcccgcgttttgattgaagtgaaggatccgtttgcgcaaccgcgttttcctccgatttcgttttgcgaaattggcgtatatatcgccgaaatcatgggactcaaggattaccgggtcgttccgttcgacaagcttcgcgaggcggttcatggggaattgtcggcgcaggaatggccgtacacctatcatcagcgacttttcgcgcatccctgctcggatggttcgacgcttgatcagatggccttggcgatcgaacgcgttgtaaagacccctcattcccgccgggcggttgcctcgaccgccgtgccgacagtggacccgtttttacgggaggatatcccatgccttcgcgaggtccaattgcgttgcccggaagacgcggacggacgtcttgtattgaatatgaacacgatgtggcgatcccgcgatctctacaaggcatggggggacaacgtcattgcgattactttcctgcagcagacgattgcgcggacaatcgcggcggcttccgggcgggaggttcgcgtgggcagttatgcggactacagcggcgcgcttcacatctacggtcaggatttcggcgcggtcgggggcgacgcggagcgcggcctgcacagtttcttcgagactttcgacgaggaggcattcatcgcgcgatcgctgaccagcgagatggcccgcgacatgcttgtgctaccgcaacttcaaaacctgctgacggatcgtcagcgggaacaatggggatttcctcctgaatccattgcgctgctcgaatcgctgattcgcgacatcgaaaacggcgattgcatggtgtagcggcaggcaattgaaacagtggatggttccagacggggttgttgcgttcaagggcggttgatatcgcgattcagacgtcgtttgggtggcttttcgcgaaaacgatgtagcggctggcgaaaaaattgaagatgagaccggccaggatgcccataatcgaagcgatctgcggaatgagggcgggccagagcgacaacgcgccgagcgttacgccgtaattgaccacggcgccgaccgagctggccgcgataaagccgaacatttgccgccaaaacggcccgcggccggcataggaaaacgtgaagcggcggttgagcaggaaattcgtgatcatcgaaacaaggatggccacggccacggccgccttgaggggaaccccggcccataactctacggtgagcacggccaggttgacgaccgtgccggaaagaccgaccagcccgaattgaacgaaatgcgaccagttgccataacggtaggtatagagccgccggacgtgttcgagatagcgcaattgttccttgaacgaaagtttgctttcaccgtgggcgcgcttgctgaaatggatgggcacctcgcaaacgtttttgcatccgcacttgatcaacagttccagggcgattttgtatccgacgggattcagggcgtccgcccgatcgaaggtctcgcggcgtatcgcgaaaaatccgctcatcgggtcccgcacggaggtcagcggcagggcgaaccatgtcgccacccggctgtttatccagcgaaacaggccccattggtcgtccgtcgaaccgccggggacgtaacgcgaaccgagcgcgaaatcatggccggcatcgagcgccgcgatcatttccggaatcttttcgggcgggtggctcaggtccgcatccatcacaagcagcgtgtcgccgcgcgcttcgcggaatccgtcgagcaccgccggactgagtccacgattcgccgtccgaacgacaacccggacccagggtttgttcagcgcggcgacggcctcgacgatgccgtcacggctgtcgtcgtccatgaaaacgacttccaaatcaagcgcgcaggtctcgcgaacgcgttcgatacgcgcgatcaattccggcacgttggccgcttcatgatacgtcggcacgatgacggagagagtcatggatatcccttggcaggctgtggtttgaagactctaggcggatcgacatggaggaagcggatagggcggcgcgcatcatctcttgcctttcagccgtatcattcacccttcatccttctcgtcttagcggtcgcgcccggattcggccctgagcctttcgacaaacggtgttgaaacggaaccgcccgcggcttcgatacggtgcagttcatgccatgccgcattgtaatcctttgtatcgaataacgccaccatgaaggggcgccatgcgccaagaaaaacaggatccgccgcaaaggccttttcgagacgggcgcggcactccgtaattttgttctcgatgagatccacaatggcaaggcataggtgggaaagcgcatattggggatccaatcgcgcgcattcctcgaacgtttttctcgcttcgtcgttccggcccgaaccgagttgtccgagacctgaaagaaacagatccattgccttccgggtcggggcgggatcgcccttttccgcaagcacctgggcgagccgcccataacgtatgcccagatccggattcaactcgccggcacgccgaagcggcgcgaccgccgtatcgaaatcatgggcatcggccaacgccatgccccattctgaataggcgatcgcatagccgggatcatggcgcgtggccttctcgaaagattccgcggcggcgcgcaactggttgttctggcgatagccataaccgtccagcaaggcccggatcgccgcggcgggtccggatatctcgttgcccgattcgatggcgcgcaagagatttccatagatgtcgcgggtaggcgatccggccgatccgatgcccggaatgcggtggagggcctgtcgcgccgtgtcgcgatcgccgtgttcggccagcgccacggcaagattgccatatccttccatgaaatccttcggatcgggcgggcttttgccgtccacgaccggcttgccggtggccgtgatcgcgtaggccaggacatgttcgataccctgaaattcctttaccctgtaccgcagatttcgcgcggccaacagcgcgtcgagttgtttgtgtggtcccgaatcgaaatagtccaacacgaccaccatccagaccgtccgctcgcaaggacgcgacgcgtcgccgcaaccgtaactattcagcaaaaaagccgcctgatccacaagcgtttcgatggtttcggcggaagataccggattggcgcagcctcccatgttgaacagcaacacgtccttccagatggaaacttgcaccaaaatcggttcgccgggcttggcctcgtgtttgagaaatcggcccgccgacagccagtcggtgcgctgaggtcctggaaaaagcattgcggtctggcaggccatcagggccgcacacgcaatcgttcccgttgtgcgcatccaattccggggcagcgccgctatcgcgcctccgatcagcacgtaaagccccagcgaactatagaccgtgtaccggggaaaaatgcacggacgccatgcaaggcttgccgcatacaggatgaccggcggaagcagcaggaacaggataaacaacagtgttgtccggtcgcgcggtatgcgccttgcgccccaggccagcgccgcgcccgcgatcgcaagccatgccagatcgaacaacggatggagccgcgcccatgcgcgcatttgcgcggaggggcgcatttggtaagtcagatggatcgcatcgtccgcaaaaacatcacccaggaattcaagaaatccgggcgtcttttgccaggaagccgtctgttcgggcgaccagaattggatccctgcgacgtatagcaggagcggcgccaccatgatcgcatgcaagccgcaccatacgaacaggcggttgatcggctgccggtgggcgagcaggagataaacgccttcggcaaacggcgccagtaatccgaaggtatggctccacatcagcaggatgttcaggagcacatgcgccgcccaccaaggccactgtcccccgcgcaaaattcgaagcagggtgtagagcgaagcggaggccagcaacgccaccagtccgtacatgtggatttcctgtgaaaaatgccgatgaatcggagacaatgccacgagggccgccgccaacagccccgcaaccgggccaaaggccagcgatccaatcgcgtacatgaccgcaatcgtcgcaatgccgaaagccaccgatgccaggcgcagtccgatcggcaaaggacttatgaatcggccccaaaggtattcgaaggcgtcgtaaacgggcatggtcgccgggtcgagtgtatggttgatgcgcagaaatgcgggcaggcttggcgcgtcgagatacttcaggctcgtgtattcgtcccaccacaccgattccgcgcgaatgccgtacaggcgcaatgccagcccgcccagcagaataatcgccaggatcaggcctgtgtatcttcgggacgtttgttccatgtcgccaagatccgtgtttgccggacagtataggatattcgggggcggacaacgaattcggcgggccggggatgcctcgactcgaatgcgacattcagtcccctttcgtgctcgcgctcgtgcccgtaatcgtgctcgtaatcgtcatcctaacgcggctcagccgcaaggcctcaatcaaggatatgatttctttgtccgcaacttctgtgtcccatgcacagaagttgcggacaaagaaactaaggctcttccggttttggcgatcttcagccccccttcgataataggcgccctctgtagtagggtcattgtggcaacaccatgagattcgacacggcaggcatcctcgtcgggaatgggcagcttctgtagcggggatggattcatcgcaagacgccgcgagtattccatttccccggaggggaaaaacacgaatagccgcgggtgataacccgcgggacgggatcgtggaagatgaccctgaaagggtcgaacgtgaaagggtcctccggtacctaattgttcaacccgttccgggttgaccgctggatgatccggttccgtgggttgacacccacggctattcacgtttcggcccctgccggggccgggggccaccgtcaatcgggggcgttgaaggaataggggacgtctcacgtcatgaggccggtccggacacgcccgttcaaccggatcagaaaagatcggaaaaagcggatgagccgaaactaatcgaagatcgcggatccaagtttttgttcccaacaatcaaggaccgatgacggacagacatcggctacccgtttgatcttgtctcgttcgaatcagtgggatgcgagcagcgcacgagcaagacgaggcgcacatacggaccaaataggttttgagatttccggcacaacaccggacgcaatccccctgatccctatacgtgatacgtggcgtgttgatgcagtgcggcattcaaggtattatgaattgcggaagataaccatggattctaaaatcaaaatcgtgatccttgtatgtgtactcgttcttgcggcggtgattgacgaaacggggcatgcggaagaaggcgacgccggaaaagcgccgatggcgctttggacgttcgaggagccggtggaagcgcttcagttccatggcgcaccggataagacggtttggacggccaagaccgatcaggcgatcgtgcgccgcggaggcgtgcggggctatgcgctggatttgcgaggcaatcacgcaatccgggccggcgctttcgatcggtcccggatgtccgctctttccatcatggcatgggttcgcccgttggaccttacgggtttccgcgaaattttccggcaggagagcgacgaccgtgtgctgttttcgtttcaagatagcggaaacatcctgtcgctgggcttgaatgtaaacggttatgtggaatgcgacgcacgcatcgttccaaaacagatcctcgacggcacatggcatcactgcgccggaaccttcgacggccacaccatgcgcgtctttctcgacgggaaggaaatcggcgtcctcgaacggccgggattgatcgcgttgtcgcccggtttgccggcgttcattggttcaatgggcggaacaaacgagcattttcagggcggcctggacgagttgcgcctctatgacgtcgcgctgggcgcggaagaaatcatggggcttttccgtcaagggctggcgtccatttcggaaaattccaaacggctggacattgccgccgggaaactctacgtggaggcgccgtccttttccgaaaccgtggccaacacgcgcaagaacctccgtatgcgcggtcccgcggccgatccggacttgacggatgcgcttggggcgagattgcgcgccgcatttccggacgaatgcgccgcctttttcgagtggaccggcacaaccgccggcgcgcttctgtcccaggacgaatcgtcgaacgaagcgcaggcacggcggcttatcgaactcatgctcgaatataaaccgctgacggaatatcagaagcaaaagcagtcgccggaagatcgcgcgaaatgggacgaggcggagcgtatccgcgatcggtttgaacggttgtcggcacagggcgagtcggctcaaagttccccggaatggttcgatctgatgttcgacgccgggcgtcgaatcgcatttcgtccccgcgtgtacgagcccgtcgcaccctatgtaaaacccgaaacgcccgaaacgcgaaacttgaccgaagacgaggcccgggtcgcaatcgaaagcgactggatgcaccaggccgatcaaaatccgacaccggaacgcattcgcgatgaaatccgttgggcgcgtgaaatggctgcgcatatccaagtggacgtttccgaaccattggcccgattggacatgctggcgaaaaagattccggggaaaaccgccacggaactttgcgatttatatctggccgtgcggatggcaaaacgcgaaatcatgttcaagaatcccgtgatcgatttttcgcggctgctgctggtggacatgccctatccgcagggatccgaatggcagcacgagacgcgccatcgtctcggttacatggccgtgcccggcgcgcggctgatcatcctcgatggactccatccggcgggaaatgtcacgcaactgatgccccaaccgccgttgcatggatcactctggcggcccgacgtgtcttttgacggcaaaaaagtcctgttctgtttcaaaccgcacaatgaaaagtcgtttcacatttatgaaatcaactgcgacggatccggcctcgtgcagttgaccgatggggtctacgatgacgtggatccgatctatctgccggacggccatatcatgtttgcgacgacgcgcggacataattacgtccggtgcatgccacccaccaattcgttccaacttgcacgggccgatgcggacggtgggaacatttatctggtttcgtacagcaacgaacccgactacctgccgtccgtaatggacgatgggcgtgtcgtctatacccgttgggagtacacggacaagcccctgtggcgcgcgcagaaattgtggaccacccatcccgacggcacgcaggtggccacgttctggggcaatcagagcgtctggccggatgtcatgaaagacgcgcgcaatattccgggcagtcgccgcgtgatgttcaccggcagcgcccatcacgattggtttgcggggtccgtgggcattatcgatcccgacaagggcctcaattttcccaacggattgaccaaggtcaccgccgatgtcgagtggcccgagtgctacaacggccccgtcgatcccgtcgagtcgccaagttaccacgtctcaggcaagtatccggcatactactcgccctacccgctgagcgagcgtgattttcttgtatcggcgcaacgcgacggaaagttccggctctatctgatggatgtggacggcaaccgcgaattgatctatgagggtgtccacaacatttttcatgcgatgccgctcaagccgcgcgcgaaaccgcatgagatcgtggaccgcgtggcgtggccgtcccgcggggagcgcgataatcccgcgccgggcgtgctgttcagcaacgatgtctacaaaaatgcgccggaagaactgcgcggtaaggcgcggtatctccgcatctggcagatagacgccaaaacgtacacctactggcacaagcgtccgtacatctcgaccggccccgtggtgtccgccgtgcagtccgaaggcgtgaaacgcctcatcggcaccgtgcccgtcgaaagcgacggatccgtctcatttacggctccgtcggggcaggctttgcactttcaattgctggacgggcattttcgggccttgcagacgatgcgcagtttcgtcggcgtgatgcccggcgagagccgggggtgtctgggttgccatgaatcgcacagccgcgcaccgggactcggtgaaaaatccatcgcgggcagcgcgccgccgcgcgcgattgaaccgccgccgtggccggacaccaccgtcagttatgcgcgttatgtccggcccgtgctggaccggtactgctcccgctgccacgagggggacggcgaaggccgcaagacctttgatatgaccgaacggcccagtccgccggtgttttccgaaccgtacatgacgttgatcgggcgtccgacgtggggtgcgccgtatacgccgccggaaaagcccgtgccgggcttcggcatcgccggggtgctcatggtcgaagcgttcgatcagcgcgatccgaaggcctatgtgacgccgaaacccatgacgagcctttcgtacaggagtccgttgattgaaatggtgtccagcgggaaacaccatggcgtcgttgtggatgagacgagtcggcaacggctcatcgcgtgggtggatgccatgtgcccctatctcggcgacgaggaagtacgggccatccccgatccggaattccagggcgtggactggctggccatccggccccggatcgcaacggcgcccgttgtcgtgcgtcccggtccggtggatgaagacgccaaaccgcccgcatgaccgtcggcatgatgaaaaccccgtgagaagacaacgattgacgattacgataagccggcacgataaaggaggctgcccgtgagtttgattattggatgtctggtatgtggaatcggcggcgcgacgacgccgctcgtggtggtgtcgttcaacttgcgttacggcacggcgctcgatggcgaaaacgcatggccgaaacgccgggaattgatggtcgaaacgatccggacaatgaatccggacatcatgggaacgcaggaatgccttgagtttcaggcgcaatacctcgccgaggccatgccggaatatgcctggatcggcgtggggcgcgagacggacggcaagggtgagatgagcgcgctgttctaccggaaagacgcgttgacggctgaggaatcgggccattactggctttccgaaacgcccgaagtgcacggttcccgttcgtggaacacgagttgcacgcgcatggtcacatgggcgcggtttcgccatgccgggacaggggcggctttccatgtgctcaatacgcatttcgatcacagaagcgaagaggcccgcgtccaatcggcccggctgattgtccagcgcttgttatcgctgccgcgggaaatgcctgtcattctcacgggcgatttcaacgccaacgccgaaacatccgccgcatggaaaatcctcgttgagggcggattcaaggatgcgtgtctcctggccggggaacgtctcggtcccgacgtgacgtttggcggattcaaagcgccgcccgacgtaaaacagcagcgcatagactggattcttgtccgaaatgccggcagtgtgcagcggtatgaaaccgtcacgttcaacaaggatgggcgctatccttcggaccattatcccgtttccgcggtcatactcattccggggacgccgtgaaaccgccacagacagaagatttcctgccgcgcggattgaccgaagcggaagcccggcggcgtcttctccaggaaggccccaacgaactctccgcctcgaaaccccgcggactggcgacgatcgcgttcgaggtgatccgcgaaccgatgtttctgttgctggtcgcatgcggcgcgatctatctggcgttgggcgatatccgggaagcgatgatgctgttggggttcgtgttcgttatcatgggcattacgttctaccaggaacgcaagacggaacgagccttggaggccttgcgcgatttatccagtcctcgcgcgctggtcgttcgcgacggcgttgaaaagcgcatcgccgggcgtgacgtggtaaggggcgacatactcgtgttgtccgagggcgatcgcgtgcccgccgacgccgtcgtgctttcttgcagttacatgtcggtggacgaatccctgctgacgggcgaatccgtgccggttcgcaaagcgccctggcacgaggccgcgaaacgggaatccgccgggacggaccggccgggcggcgacgatcaggctcttgtttattccggaaccttggtcgtgcagggcaaggggcttgccgaagtttgcgcaatcggcatgcagacggaactgggccggattggcaaggcgctgcaatcggtaacggtcgaaaagacccgcctgtccgtcgaagtctcacaattggttcggaatgtggccattcttgccgtttcgttttgtgtggccgtggtgttgatttatggattgacccggcaagattggcttcaagggtttctcgccggcatcacgctggccatggcgttgatgccggaggaatttccggtcgtattgaccatcttcctcgcgctgggcgcgtggcggatttccaaaaacaacgtgctgacgcggcgcgtgccggcggttgaaaccctcggtgcggcgacggcgctctgcgtggacaagaccggcacgttgacacagaattgcatgacggtgcggcgaatcctggctaacggccgcgactatacggtggattatgcctccaaggagccgctgccggaagcctttcacgaaattgtcgaatacagtattttggcgtcccagatcgatccgtttgatccgatggaaaaggctttcaagcaattgggggaacggtacctgcacgataccgagcatttgcacgtgaattgggtgctcgagcaggaatatcccctttcgcgggaactgctggccatgtcgcatgtctggcgcgcgccggacagcgacgaattcgccaccgccgcgaagggcgcgccggaagccatcgctgatttatgtcatttcgacgaagggcaacaggccgccatgacggcggatgtaaaaatactggcgcgcgacggtctgcgcgtgctgggcgtggccaaggcccatttccggcgaaagaccatgccgggcgagcagcacgatttcgagttcgaatatctcggcctgattggctttgaggatcccgttcggcccgccgtgcccaatgcggtcagggaatgccatgcggcgggaattcgcgtgatcatgatcacgggggattatccggaaaccgccctgtgcatcgcgcggcagattgggcttcattccgccgacgaatgcatcaccggcgcggaattggacaacatggacgatgcggccctgcgggaacgcatacggacggcccatattttcgcgcgggttgtgccggaacagaaactgcgactggtcaatgcgctcaaggccaacggcgaaatcgtcgctatgacgggcgacggcgtcaatgacgccccggccctcaaatcggcggacatcggcatcgccatgggcgggcgcggcacggacgtcgcccgcgaagcggcgggactggtcctgctcgacgacgacttttcatccatcgtgcaggcggtgcggctgggccgccgaatcttcgacaatttgcgcaaggcgatggtctacatcctggcggtacacgtgcctattgcgggactttcgctcattcctgttctcttcaaatggccgctcgtgctgtatcccgtccatatcgtctttctcgaactgatcattgacccggcgtgttccatcgccttcgaggcggaaccggaagaggagggcgtcatgcggcgtccgccgcgcaatccatccgcgctgttgttcgggcgcgccagcgtcgtgttgggcctcatgcagggaatcagtgtgcttgtcatcgtgctggcggtcttcgccgccgcccgctatcgcggccacagcgccgaggatgcgcgaaccctgacgtttgcgacgctcatcgtcggcaatttgggcctgattctgaccaatcggtcatggtcccgcacttttttctccatgttttcggtgcgcaacaacgccctgtggggcgtaatcatcggagcgccgctgtttctgggattggtgttgtatgtgccgtttctccgcgaactgtttcactttacgccgctgcaccttgtggacatcgttttcgcgcttgcggccggcgccgccagtattttatggtttgaaggcatgaaggttctccggcattcggcatgaacaaaacaggccaggcagtggtttcatgagcaagcgccgcaaattcaaaatcggacagcgttccccggacgagatcaaacggcttcgccggcgtttgctcagcggcacgctcgccgaaattcaccaaatccgcgacgaatggcacggtgtccattaccggtggtggatcattacgctgtccggcgtgctggccttgttcgtgctctcgtatttctcctacacccaactgggctggtacgcggaccagcgcccgctgccgacgggcagcgactggcttctccggcgcattccggcggtcaatgtgctgcccatcctgtcgtggggctggtttgctctgcacctctatgcggcgggcgcggccatcgccttccatccgcgccggatcccgttcctgctgttcatgctcagcgtgttcctgttcatccgcacggcgttcgtgtttctttcccccattggcccgccggtcgaaatgattgacatgggcaaactcgattatctgttctcgcgcctgatgggaacctataccttcaaaaatgaattcatcttttccggccacacctgcatcccattccttttcttcctttttttcgacacaaaaggcctcaaactgctcatgctctgcggctcgatcaccatggcgatatgcgtccttctctcgcacaaccattacaccgtggacgtgatcgccgcctaccttatcgggtattccatctacgtgctgtcggaaaatctgttctacggattcatccgtcccctgttccaagtcttcccttcccaggcgagatattgatgatgaacgtttccgcatggctcgaacggctggaccatccgcctattgaattcaaacgaaccctgcgcgcggtctatgggtcggacgaatccgtcgtcgcggcgcgcctgcgcttgctgcggcgggttttgggacgattccgggaacgcttcggcgacgggcccgtacgcgtatttcgcgcgccgggacgcatcaatttgcgcggcatgcacgtggacacccacggcggctacctcaacctgatgacccaccagcgtgaagtgctggcggccgttcagtcgcgggccgacgcggattccgttttcgtcaacaccgatccgcacttcgaggaaaccgtcattcggaccggtgatgcgcgggccggcgagtcgttccgacgatcttggacggagtacatcctctcccccggcgtccgaagggaggtcgaggcgcgccgcggccattggtcgcattatctggccggcgcatggctcggtatccagcatcgtttcccggatgtgctgctatgcggcatgaatgccgcgatcgggagcgatttgccgcggggcgcttccttgagttcgtccgcggccctttgcgtggcggtatgcagcgccgtgcttgcgctgaacgggaaggaactggccccgctcgaattgatcctcgcggcgcgcgacgcggaatggtacacgggatcccgttgtggcctgagcgaccaggccgcgattatcctcggtgggcaaggcgaactagtcaatttggccctgttcgcgccggatctgaacctggcgagtctccggcgcatggcatttccggaaacgctgcgcatcctggttgtcaactcgtacacggaacgcagcctgagcggcgcggcgctcgtggcctatacgcgcaatcgcttcgcctattcgttggcgatggaaatcctccgtcaggagatgcggcgacagggattccccgaacctttcgtcgccgaaacggaccgcttgtcgcgcgtgacccaagaacgcatcccagaccttccgcgcatcctatgcgccatgccggacgccctttcgctggccgatttgcgcgcgcgctatgccttgccgggactcgacgaagcctaccggcaatacttcggaaccgttcccgaggatcaaagaccggacatgatacacttgcgcgggccgctccttttcggcatcgcggaatccgaacgggcgcggcgctttgcggacgcgctgacggacggcgactggggcggcgccggacgactgatgtccatcgggcacgatggcgaccggctcctcgatgcatccggacggccgtaccggttcgacgtatccgacgggacgctggccgaaatggccgcccaacacacgcccatcgaaatggcgcccggcgcctacggcgcgagcgcgcccgtgctcgacggtatcgtggacgccgcgatcgccgcgggcgcattgggatcatcgctcacgggcgccggcatggccgggaccgttctggcgctctgccgagccgaagacgaatcgcgggtcgtgcaggccgtccgcgattggctgggatcggacgaatatgtaaaacgagccgggaaggaacttggaaaagaccaactggacgacgcggttcacgtcaacgccgcgcctgccgccgccgccgaactgcatggcgaatagcgagcgattcggcggcaggctctaaagatctacggcttatccagtgggcgatagggatgttatggacgaaaaaggcccaggaagcggttggttcccttcgcattcttcatccccggcgaaagcggctctttcgacaacaccacgatggccgtcgcgagcacgaggagggcgatgggtgatgcggcgggaacgctgttgggtggaagaacgttcagaatgtagggccgggtgtattggatgcttttcgcaccgtcatcgaaccggcattcgtagacgccggcgtcttcgggaacgaccgggctcagggtgatcgtgcgggttgtcgctcccgtaacgcggggcggggcatccacgatatccgcgccgtccttcttccattggtaattcgatccgtccggcgccgtcaacgagacgaccatgccttcctcaatccaaccgttggggtggggcgtgatggcggttgtgcgggtccgcgcgcggagattgtcttcgcgatgcgtgtcgagcaatgcctgtagttcggcggcctgttcggggtatagcgaagcgaggttgttcgtttcgccgggatcgttttccacgttataaagcgctcttgcgccggtcgagaggttgtgaatcaatttcatcgaaccccgccggacggtttcgaggttgacccaccgcggcgcggcgccgccccgcgtgtaggcaaagacggggccgtctggatcgcgcgttccgaacagatctttcccttgccacgcgggccgcggcggcaatccggccaaggcggccagtgtgggcagcaggtcaacagtcgtcacgacggaagggacggttgcaggggccaaccccggcccattgacgatcagcggcacgcgaaagaccggctcgtagacggtaaggccatggcccaagtggccatgctcgaacatgtgttctccgtggtccgccgtgaccacgaagatcgtgtccggatgcgtttgcgcaatggacaggatcagccgcatgacttccgtgtccgtgaaccggcagtcgccgtcgaaaagggtccacacggcgtccttccccgtggcggacaattcggcataggtacgtgcgggtatcaggcccagcgtgtaatcaatctgatcgaacaggtaaccgtaaaaattctccgcgatggtctgttccgccgggagcagccccgggttgggatagccgaaaagcgcgcggtagacctccggcggccagaagggcagatgcgggtccatgtaatggatatacaggaaaaacggctgcccggcggtttcaatgcgcgcgatggcgttgttcgtcaactcatcggcgggcaggatgggcgccgaatcatcgtcatagatgtcgaagccctgggcaaacccattgtcaaaggtcaagtgattattgctctgaatgccaattgtcgcatatccggctttgttgaaaaaggtggccatcgtttcgatggcgcttggcagcgtggatgtgcctgtatagacctgatgcgcatccacgtgcagcgacgtaaacaccgaagccatagccggacgcgtccatgtgcaggccgtggttgcgttggtgaaccgcaccgaatgcgacgaccaatcgagcagggcgggcatgacgccctgcccaccgcgttccgcgtcaagccggtcggccctcaacgcatcgagcacaatcagaacgatattgggcggggggaaggccgtcgccgcggtgtccatggccaagaacagcgccgctgaaagcagaaaatatttgatcttgctggtcaaaaagttgcttcaagctcgaccggtggcacaccatctttgtcccatccgcgcttttcgtaatacagcgagagcattttctcgaactcgtgttcatcgagtgttttccccgcgttggggccggtcagcacgggggctttggtcactttgaacgggagcgaatcggccttgcgggtcgcacccagccggatgtttatgcgccgcgtgaggttgtagacccgatcggacagttcgagcagttcttcgagcgtcatcgtcttgcccgtgacataggtgtaaaacttctcgtagtggcgttcgttgaggccgagttcgatccaaggcaagcggcagacgccgagcatgtcgaacagcggccgaacggcttggtggtacatgacaaggtccaccttttgctcggcggaccacgacgcgccctcctcgatttccttggcgatggtccatgcgcgggcgtggtgcgcgccgatgtccgacgtggcgtaggccagccccatggacgtgccgacccggctgtcgtaggctgactgttcgagcccttttacctggagcaggatcttttccatttcgggccactgtttgatgatgcgccgcgatccgtccgcaaggatatcgcccacgccctcccgatgggcgatgcggtgcatcaggtcgaggatggcgtcgtcgtcgttccatgcgatgcccttgccgtcgagatccgccagcgagatgacgcccttttcgtagccttcgatgacggcgccgatgatgctgcccgtcgagatggtgtccatgccgagttcgtcgcacaatttgttggccgccaagacggcgtcgaaccgctcgacgccgaggttcgatccgagcatggcgcaggattcgtattcggggccttccgtgacggtgccggcgtatttgccgttctttacgagacagatgttgctgcagcacatcgggcacatgaagcaggcgctgtcgccgatcttgtaatgttcgagcatggtttcgccgttgatcttgtcgtgggcggcgaaggtggtcgccttgaagttgtacgtcggcaggatgcccttcgagttcgcgtattcgatgacgttcatcaggccctgctgctgccacagccggaaatacttgtgatccgtcatgtatttgacggccttttgcgtttcctccacaagtccgttcatgtcatggaccggcagatccttcgtgccgcgcacgacgatggccttgaggtttttcgatcccatgatcgcgccgatgcctgtacggcccgcgttgcggctccaatcggaattgacgcaggcgaatcggacgcggttctcgcccgcgaccccaatgacggcgatatgaaggttgtgcgagccgagcttctccttgatgatgccctccgcttcgaggcaggttttgcccttgagcgcgggcatgcggatgatgctggtgtgttcgtcgtcaatgaacaggatcgaaagttccggcgccgcgccggcaagggcgagataatcgtggccggtctggcgcagttcgacgccaaacccgccgccaatggacgaatcgccgtaaaggcctgttgccggagaaattgcgacaaatgaatttttaccggacgacggcacgtagcaaccggtcaacggcccggccgccacaaccagcagattctccggaccaagcgggtcaatgtggaaatcatgcgccttgaggttgtcccagacgagtttcgcgccgaatccgcgcccgccgacatagcgctcgatgaaatccccggaaagatcgcggcgttcgatgacgcccgtggtcagattgacgtgcaatcccttgaaaaaatagccgcccttgagattcataactgctcctttccaatttcggcgtattgaagcgtcttcgtctcgcccttttcgacgaattcaatttccttcatctgggtgtagcccaggacgttgttgaggcgcttgctttcgccgagggcgtattcgggcacgagccgaatcgcgtttttggggcaatgcttgacacattcgggatcgtcgtcgcatagatcgcacttgatcggatattcgcattcgtcgtgcgcgtacatcgcgccgaacgggcacgattcgacgcaatgaaaacacgagatgcagacgcccgtatcgaggctcaccacgccgtccctgcggctgatcgcgtccaccgggcacacttcctcacacggcggctttttgcactggctgcacacaatcggcatccgaaccaccggatgtgggtaggtgatgagcacgcgaatcgcgctcttcttggggttgttgacgccgaaatgcttgatcgcgcacaccagttcgcacatcttgcacccggaacattccgcgggaataaccgccagctttcgcgacatcctctgcctccgagtagcccgacttcacaaggcaggagccggaatattccgagttccacgcactgcgaacgactacgacttccgcgattccggcgtgcggcatccacaagccacgcgccgtccatcgcaaacccccggtatactaaggcccgagcagcaaggaatcaagtggaaagcagcgccgctgtgtatcggcaagcggccccaccgttatttcagtctgtaaggcgttatgcgacccagtagttccccgatttcgtcgcggatattgaggagttccgaagcgtcctgcgtatgcgcgttcggggccttggcgatttcgtttcggacacgttcgagcagggccttggcggtttggcggtcggcacggggcatgcctttgggcggtttcttggcgaaggcttgcagcatatggaggtattcgaagtcctccatgccgttgcggatgtcttcccagcgcatgcttgaacagatcttgtcgcgtccggggtacacgatgaacggatcgccggccggcaggggttggcgatcggcaacgtagatgctgccgccggtcgcgtccatccacggcgacacgtccaccgccgccgggacgggatcccacgtcttccaatgcgcgtatccccagtgcaggaatcctttgaggtcgagcgaccacgaaagccaaaacaggatgcggttgcggatgagcggataatcgaggaatcggttgggatactcgccctgtggatacaggcagacgtaactccacgtggcctctttgggattctctttgcggccgggtttgatgtgctggatttgcgggacgcggatgtcaatgaagccgtcaagcccttcgtgcatgatcgcgtccacgatgggtacgccgggcagccacccgcgcaccttgcccgcgcgttccgtccatgatttctcgttgacggggatcggttcgtccgcgatgtgctgaatgtatcggcccgcccaacccttttcctttaggtgcgcccagacgcccttcagaaaggcctccatatacggctcgaattcggcctcggacaacgtgccggtgtcaagcggtttgccgtccgatccaacgatgttgaagcgcgaccagacaaattgactttcccacccgccgcagcgccccgcgacgtggccgccctcgatccacgtgacgcccgccttcttgaacatttcgacccaccggtcgagcgccgtgaaatcgaacgcaaacgcgccgtccgcctgttgcgtcatgcagacgagcatcgtgaagggcgtgaggatcgtatcctgccggtggcggcccatgtcctgcgcgacgcgatcgatccacgtccagcaggcgtcggaaaagagcggaatccggtagtattcggcgagattggcggggaagaaccactccgtttgatgcagcgtcggttcgtcgggcagcgtgaatgcccaaacgtgaatggcaacgggcacgtcaatgtgctgcccgtcgaggtctatgcccagcgtgccggtgtagtcgccgggcggcgtgtctttcgggaccgtcacggacacccacagcggctgcgtccattcgtcgcggatgcgcacgaccggttgttcgagaaatccgtcgggaaagaatcccggtgcggcgcgcaggaaggttttcggatccttgttcgcgggcgggttgttatggacgtaggtataccatatccaatgcgcgccgagatttgacttggcgatgattgcgccgtccggcccttgtagatccggcagcgagaacgacgccttcgcgactgtcagacccttcggggtgcgcagcagaacctgcgcgtcttcggtatcgtttcgcgctgctttcaacgcaatcgcttgcggcgcgtttgccggcttcacggaatccggaaacgccttgtccagtgaatgtgtcgtccaccagtcaatgttttccgcgcgcgcggcggcggaacctatcaggaccgcgcacaccgtgcaaccccataaaaacgtccccatcgcatccatgatcgcatcctcttccgttgaaactttttagtgcgtccaattcgctcgccatcataatcgaaggggcctgtacccttcgaatagatatcgaaggcgtgccggaagcggtttgaaaacgctttcggggggctgatacgataatcggcgatggggatggagttccccgtaatcgccatgtggctgataactcctgtcgaaaaaagagaaggcgataggaggttgcagcatgagagatacgaccgcgagcgtcgaactcctggggcaaatctgcgcgcagtttcatcttcagaatttgacgccgcagctcaatgcatgttccgagaccctccgaagcggcgggagggtggaagtcgccgtgctcgggcaattcaaggcggggaaaagttccttcctcaacacgatcatcggaagcgaaatcatgcccgtgaatgtcctgccggccaccgcggtaattacgcggattgggtacggccctacggatcgggccgtggtccatcggttatccggcgaaatcgaggaaattccgttggccgaactgcccgaatatgttaccgaacaacgcaatccgaggaacgaaaaacgcgtggccttggttgaggtggaactggcgtcgctggcgccgtaccgcggtatatgcttcgtggacacgccgggccttgggagcatcttcgcccacaacacgcaggcgtccatggactggttgccgaaggtgggcggggcaattgtggccatcagtgcgaaccagcccttgggcgaacaggatctgcgactgttgggtgaggtgttcaagcataccccggaggtggtgatccttcttacgaaagccgatctggtttccgatcgcgaacggaaagccgtcatcgaatttacgcaatggcagattgcccagaataccggggggcgtcaactcctcgtccttccgttctcgaaccggccggattttgaacggtttcaaaacgatgtacgcgaatacctcctcacgaacgtggcggggcgccatgaggagttgttcgtgaaaatcatgggacacaaactctccgccctgatctcggaatgccgggcctatctgatcctggcgcagacggcggcccagtccgcggaagcagcccggtccgagttgcgcgacatgattcggcgtgaacgggagggcttggattcgttgggaaaggagattcacgtattgacccgggatttgaaaacgcgcgtacgcacggcggccggcgagcgattccacgatcttcacggcgaattgaccaagcggctttgcgcatcgctgaaaaaagcgatgggcgcatggacgggcagccttgcgaaaaggacccaggcgtttcaggattgggccgcaagggccttcgaggaggaattgggccgcgtttcggagcatggaaaaggatatctcgaagaatacctaatcgaggcgcaagtcagttttcatcgcaccgtgcgggcttttcaagaccggttgtcgaaggaaatcgagcgggcgctgggcatctcgttcgaaagcgcgcggtttcacgccgaaatcgcggcgcccaggaagcctgacgtgaaaatgggccaagtcttcgacagccatatcgatctcctctggttcgccattcccatgggcctttttcaccggcttttcgagcgtcatttccttcggcttatcccttgggaggtggagaagaatctttcgcggctggccagccaatgggcggacgccgtaaacgcctcgatagatagtctcgcccggcagtccatggaatccatacaaaacgaactggcgaccatcgaagggctggtttcgggtgtgggcgatcagtgtagcgccatcgaaacggcccttcgccggctcgacgaatgttccgaatgcttggcgattccaaacggaagaggagacgcggccgcccatttcggaaactgttagttccggaggccggcggtcccgctaccagtaccgggaatgcggaaagatggcgaagcaaccgatcgaaacaagcccgaaccacaagcgggttatcgctatcacgcttagaatggttgacgagtttctgtgcgaatgcgaactatgggcacggggccgcgaactgcactcggttctctatcgggaggaaaattcgctcacatcggaacagcgtgagcagattttccataaagtggaatcccttcgctctgttttgatggaaatgcaacagacactcggactgaagaccatgataaaagaacccgcgcgcatcattcgtgcggcctgttttgccctttgggaatccctgatcgaactgcaggggaagtatatccgcgcgtatggcgaaccctctggggaactggtggcatatctcgatccgaagagcgaagagattatcaccctgctccaagacattttgaagatagtcgaatctgacaagccttccacgaagagttcagcatagatgcatgggctgttgtcatggctaacaagaagaaacttcgcgcgctggacagcgccgaaaaggaacgccgccgggaaaatgcgcttcggcccaatccctatcttgggtacaaccacaatgcattggccttgtatcttttggaacgcgaagcgtacgccattgccgaggctgaactgaggcgggcggtctggctcaatccccatgaaccggtgttcatggccaacttggcgtggtgccttttcaaacaggggcgtgatgaagaggcgtggaaatgtctgcgacaggctgtcggaaaaaatagccataacccgcggatagaccaaatcgctgcttggatgggactgtccggcggccgtatcaaggagggcagcgatgcgccacaagaatgaaaaacacacggcctacttcgatgtgctggatgcgctcgtgaagacggcggagtgcgccctgtgcgcgctcgaatccgtgtccctgaagcgctacttcgacgggctgctttacgagatggtgaacgatccgaaggtccggagcgaacttgcccactccaagggatattgccaccgacatgctcatatgttgctcgaccaatccggcgcatttggaacggccctcctttaccaggatcagattgaggcgtttagaaaatgcctggaaggtttttctgtggcaaggtcgaggtacgtcgccggaaggggggaacgttcctggagcacccatgccgggtgtccggcgtgccgcattcaggacgaatcgcgaaaacggaacctatccgttctttgcaagtggatcgcggatcccgacatgcgcgccgctttccaaaaaagcgccggtttttgcgtgccccatttcttcgttgcggtcgaatttttaaaaagaccggaggattgcgagttcgttgttcaggtccaccgcgaaaaatatgctgatcttgcacgggagttggcggaattcgaacgaaagcacaactaccaattttccggagagatcatgggcaaagaatgcgattcgtggcagcgcgcggtgaagatgattgtgggatcgcgaggcctgttttagattgccgtgaatttgctcttacggcccggcgtggcatacaatagaatacatggggatggagttccccataattgccaagtggctgatgactcctatcgtgtcgaaggatgcggtaggagtttcgtgtaaggaaacccccgcccaaagggatggtccctatccttccaatcgcgtcagttcatacgaggaactgatgaatggaggttttttatggaatcggcatttgcggtagcggcgttatggatggggctggcggtcgccgccacttcgctttcgaatcatttgcggatatcggtcgcgttgattgaaatctgcatcgggatcgcggcgggattcgtggccgatcggtatttcggcgcaggcagccttggcggcgacctgccctggcttcgttttctggcgggcacgggcgcggtgctcctcacgtttctggctggggcggagcttgaacccgccgtgcttcgtaaaaaatggaaagaggtgtcgatcgtcggcctgattgggttcgtggcgccgttcgttggctgcgcagccgtggcgcactttgtcctgggatgggatgttcgggcgagcgggctcgcgggagtcgccttgtccacgacctccatggcggttgtatacgcggtcatgctcgaaacgggcttcaatcaaaccgatttcggcaagggtattctcggcgcgggctgcttggaagtgccttgccgttcggacaggtttaccgagacaatcgaaccgttgcgcgtgtctggacaggacattgtttccgctttctccgggaactcgcatcatcagaacctcctcgatgatacccgatgccgggtggcagccgccaatcggacgcgcgctacggtttcttctcttctttcttgtcgtccttcttcttgtcgaccacgccgtcgggacagcgaatctcgatagtctcaaggcacttgacactacgcccgacccatttgtcgccgggcaggatcagacggaatttgccttcaaggggcggcagaggttccgcgttcttgtcgatggcgatcatgacgcgcttgccttcggtcgtcatggtgagctccgtccaggaagccagcgtctgatagccgtccgttccgcggaacaggacgtacatgttttcgcggcgatactcgctcgcggcttcggcggctttggccttcttgaacagttcgctcaagcggacacccgaatagtcgaagatgccgatgaaccccgaagagtgtcctacgcaaatcaactcctcttcgatgtcgacgggcattttacgcagatccgccacggacagagggatcttcgtgccgtccaagtcgacgattgtcagcgtttccgaggagcgcgcagggccttcagcccacgctcccgccgcacttatcacacttgccgccaatatacacacactccatttcagacaagacatcatactcgctcctgtttgttgttgtcagcacggcttgctgtgaaaaccaaggggactcaagggacaacggtcacggtggcgggatcggtcggttcggtagggccgcccttgccgagcttgtcggccagattgcttgtacaggggtaggtgttcgggtccggtgtggtcgagttgggatcgtgagcgatatagcgaatccattcggcatgggcatcgagatagaggcagttcatgccgcccgggacgtggttgaactggttccccgtcccgcttggattctgacataccatgtcccagatgaccgggatcgtgctttgcgccatggcggtagccgcgggattgttgatgtccgtgacgaagaaacgttcgacgccttcacgcaaacgataaaggcgcgtcgtttcctgtgtttgcgtgtcgatatactcgatatcggtggtcacgaagttttccggcaagactttcttgctatcgcgggcatccttcgatgcgttcttctggatgccccaatcgtcgtcggaacgtgtcgcccacccaatgtacatgtatgaataatcgcggaactgctgcggcagttccttgaagcgaaggtctctcagttggtcgatgatgcccttgattcgccccgcctggggatcggacggacagaagatgatgttgtagtccgacatgtattccggatagacggcaggcccccaaaagaatgtatgcatgggtacggggtccgcgccgtcggcggggtagtagcccggatactggggcggaaaattctgggcgccggcctcgtttgcatacatcttgaataccaggccgagctgtttcaggttattctggcacgaagaacgccgtgctgcttcgcgcgcgcgcgccagtgccggcagcaggatggccgccagtatgccgatgattgcaataacgacgagcagttctatgagcgtaaagccattccttcgcgtcaacattatgcagtccctccctgtgtttatggatcgttgtgttggatgcgagcctattcgatatgcaccgcgaaacataacgatagcataccacgtcttttttcgaatgtaaagtttccgtaattactcctgcccgattggatctttccgcttctcgataagggcgatttccccgataatcatccgtttgtccacggccttgcacatgtcgtacacggtcaacagcgcgacgcttacggccgtcaaggcttccatctcgacgccggtcttgtccgtcgcgacggcttcgctctcgacggcgactccgtccgattcgagcatggcatggacacggacactgccgatattgaccgtgtggcaaagcggaatcaggtcgcaggtgcgtttcgcggcctggatgccggcgatctcggcgatggcgagcacatcgcctttcttgatgtggttctctcggacgagggttattgtctccggcaataaatgaatgcggccgtgtgccctcgcaacacggcgctgcacgggtttcccgctcacatccaccatccgcgcgcggccttcgttatcgagatgggacaactttttcaccttcatcctcctatgctgttaaaatggccacggctcgtctggccgcacaagggtttctccgccacggcgcgcagaatggcctcgcgcgcgcccagttcgcggacgccgaattggatgtcgttgaagaggcacgggcggatcatgccgtcgcatgacaaccgcaggcgattgcagcgcgcgcaatccccgccgcttccgccgatcacgaccgagaaatccccaatttcgagattcatccgccggatatagcgcacctccagcccctcctgccgggcataggccgcgacaccgcgcgcatcgggttcgtcgggtgagtcctgaacgacgcaattgagcttgatgggggccagcccggcctcgcgggccgcgcggatgccttcgagaacacggtgtacgtcgccgccgcgcgtaatggccgcgtaacgggccggatcgaccgtgtcgagactgacgttcacgcggtgaagaccagcttcgacaagtgggcgcgcgaattcggccaggcgcgtgccgttgctagtcatggcgaagtccgcgatgccttccatgcggctcagcatttcaatcaacgcgacgatgccgcgccggacgagcggttcgccgcccgtcacgcggaccttggtgatgcccagttccacggcggtccgggccacttcggcgatctcctcgaagcgaagcatgcattcgtgtccgatgggagggacgccctcgggcggcatgcagtaggtgcaacgcaagttgcatttgtccgttacggagatccggagatagtcgatcttcctattgaatcggtcgaacacggaccaacgttccttcctgcatgacggttgttccaatgggcaacacgatcaatccatcggcatcgcacaaggcattgatatgggccgagccgtgatatgcgccggcttcgacgcgtccatccggcgtgagcttgacgggcagccatgtttcgcggtccgttcctttcgtcttgatgggcgatgccagcggcaacatcgaatgaaacgggtgaaaatcataccccataatcttgtagagaaaaggcttcacaaggatctcgaactggatgaatgtcgagacgggattgccgggcagtccgaagcaatagatgtccggagagacgccaaaggtggtcggtttgcccggttttattgcgatggaatcgaaaaggatttcgacgccgttttccgtcatgatgtccggcacgagatcgaagtccccttttgacacgccgccggagagcaggattacatcgttttccgctatggcccgtttgagcgcactatcaatcgcgggttttgtgtcgcgcgcaatcccgtagtacgttggaagcgtgtccgcggtaagcgcctgcgcgtacagttgatggctgttgctcgtgcgaatctgcgaaggtccggggtactcggtgggctcgaccagttcgtcgccggtggcaatgatccctacgcgcgccttgcggtaaacgcgcgggtacgtacaacccacggtggcgaggaccgccacatgttgtgcggcgatccgcgatccgtgcagcagcaccgcatcaccctcgcggatgtcttcgctctttcgacagatgttgtctcgtgtcgacgcgccattgaagcggacaacgttctcgcgcacctgttcggtgtactcgatcataatgacacaatccgcgccctcagggagcatcgcaccggttgtctggaccgatagcacgacaggcgggtctgcatcgtaggtgcgaatgagcggcgcggaagccgagttgggcgatcccagcgaattgaaggcgacgcccgccggaatcgagacggctatcacaacggttccgcccgacggaatcaggtcgaaggaataggccgcgtccatgccggtgaaatggtccaccgaggcattgtccacgacaatatccgtggcgtcgaaatccatgacggattcgctgaaggtggccgttaccggaataggggctgcattcgttggattgggcgctatcgtggccagaacaaccgtcgggctgggcgattcaaaggtgatgccgagggatcccggcgtattgggattgccggctgtatccgtggcggcgcctgcttccaccgtcgccgtaaccggtccattcgacatgggatacagattgaacgagtagctgtcgcccgcgccgacaaagtcgccgacaatggcattggacactcccacatccgaagcgtcgaatccaaggacggattcgctgaacagcgccgtcaccggaatgggtgtcgtgccggtggggtctgaggcagtcgtttgcagcagcacggtgggcggcgtattgtctatcgttacggtatcgcttggacccgcattcggagcctcgttcccatcggcatccaacgccgttcctgccgcgatggaaatacctaatgcgccatcgccggagatccccgaaatcgttactatccgctggactgctccgctcccggaaatgccgatggttcccgatgcggtgccttcgatattcagaactacatcgtctggaatcaggctgatgctcgtcgcatccgtatagataagaacaaactccaccggcccgatatttgttatgggaatcgaaggtccgacgatggatatgcgggggcccacatattcgtaggcgcccatgtcgaactcggaaccttgaggacgcacgacccccgcgaggtccgtcaggggggcgtttgcggcggtccccgcgtcaatgcacggcgatacagcccggagcctgaaatctcccgctgcgggattccgcaaggcgggatccgcatcgagattgccttggccgggccatccgccttggatatccgaatagtctgccgtggcgatcccgccgttgtccacggcgatttccccgttgccgtcgttccacaggatgcagtttactatcgcgcccgttgaaccggtgcgggtaaagatgccgccgcacgtgtccgccgtattgccatacacggtgcaattggtgaaagactgaatgccgcctccttcattgtaggccgccccgcctgccgttccggagatgttgcccgaaaaaaggcagttcacaagcgagggagcgcagtttcccccgttgtaaatgccgccgccttttactgaagaggcattggcggtgaaccggcatgccgaaaaagattgtgtccccgcactgttgtaggcccctccgccggcattttgggcggtgttggcctgccaagtgcaattggctgccaccaaaatccctccggtggtataaatgcctccgccgtccatgccggcggtgttggactcgaacgtggttgaagtgatggtggggcctgcgccgttgttgtacacaccgccgcccgacccggtcgcgttgttgaaccccaaataacaggaaatcaaccgggggccgcctccctcattataaacgccgccgccatcgcgcgccgtattgtacaggaacgtgcagttggtcaggcgatgggaggcggccttattgtaaatgcccccgcccatttccgatgcctgattgttgaaaaataccgtgttttctacaatcgccgaagcgccgagacaattgtgcatggcgccgcccaagaggccgtagttgccatagaagcggcagttggccacggaaactccgccgccatgattgtacatgccgccgccatatcccagactttcctctccgtccgcacgcccgccggtaatcgaaaacccgtcaagggtggcgcgattgtttccctcgataacatgataggccggaataccggggccgcggccgtttgaaccgtcaataatggtcgtgcgcactgcccagtcgcgctggttgcgttccgtctccgttcccgcgaatcccccgtacagatacacgcggcgctgggttatcatcaggctaccgttcggactgggacgggtttcgtcatagatcccttcggccacccagatttcgtcgtcccgtgccgccaaatccagcgcgggttggatggtttgaaaagccgtggcccaactcaagccatcttccgttccggacaaattatccctgtcaacgtaccatacccctgaaatagcaggaagggaacagagcattgtcagcacgaaaaaacggtctttttcataattcgtagatcctccctggcgcactaccccgctttgttttcatttaattaaacttccctcacatttgaattttacacttatcatagaaaaaagtcaaaaagttttttttgtattattaacttgagagtaccatgttctcgaagttgggaatgtaacgccgatttccaaatcggcttgttgaaacgcgacatgccgatttggaaatcggcgctacaaagcagccattttcaatttcaacacaagatctcgttgcctgatccgacatgaaattgcccggaaatgccaatcttcctggaaattctcatccttattgtctcgaatccgctgaaagaccgcgttggcgaataggtgttccttgtctgaaagggggccgatcccgtataagggttcaggcctattggaggaaacgggcgatgggacgcgtgaaggcgttttacgggaccgtggcggttctgggcggctttgtattgattacttactggggcatgatggttgtttggggcagcgggtcctggctgcatgggacgcgcagtcttcgtctcggccccatttatgtgccgatgttgctgttggggctggcgacgttgattgtcctgccggctttcctgttgagcgtgtgcaggatcatgcagactcgcggccgtttccctcgatggaccgggcttccgggcgccagttgcgcgatggcgtggcaggcgttgttgcttgcggcgctggtgctggttttcgacacgccatggtccggtttgtttcgcacggattgggccggggtttttcgcaatgcgggcaagccggcggttctcgaattgggcgacgaccacctgaattatcctgagctaccgcttcagcccgtggattattatgcgtggtccgtttacgatctcgacggacgggaagtgccgatggcgtcgttccgcggcaaaacgcttttcctgaatttctgggcgacgtggtgcatgccgtgccgttccgaaatgcccagcgtgcagcgtctttacgacgcggcgaaggataagggcgtggcgtttgcgtttgtttcgcgggaagaggcggagactgtccgcacgtttatgaaagcggaagggtacacgctgccggtgtatctggcgaaagaacgccccccggcgttcatggccattaccgggatccccgcaacgatgatctttgcccccgacggccaactggcatttcgccacacgggcgccgcggcgtgggacacacccaagactcttgagtttctcgcgaaactaaccggcgttccgtgaaatggacagtcccgtgaatgaaacgaaaccgcttggcgggggtgatatccggcgattgcgcgccgattttccgctgctgaccgattccggcgttccggtcatctatctggacaatgctgcgacgacccagaagccgcgcgccgtcattgatgcgcttacccggttctatgcgctacagaacgcgccggttcatcgcggcatttaccggcttggcgatcaggcctcggccttgtatgaacaggcgcggagccgggtgtcgcggttcattggagccggaagcagcagcgagatcgtgttcacgcgcggaacgacggaaagcatcaatctcgttgcgcagaccttcggacgtcggagactcgggcccggggatgaaattctcgtgaccgaaatggaacaccatgcaaatatcgtcccttggcaaatcgtctgccgggaacatggcgcgatcctgcgatggatacccgcgggccgggcgtgcgaagtgcgggccgatgaattggcgcggcgcctgggtccgcgcactcgcctgctggccgtcgtccatgtttccaatgtgaccggaaccgtcaatcccatcggctccctcatcgaaatcgcccatgcgaaaggggttcccgtgttggtggacggcgcccaagcggccggccatttgccggttgatgtgaccgcgctgggctgcgatttctatgcgttttccggccacaagatgctggggccgatgggcgtcgggatcctgtacggacgtggggatctgttgcgagacatgcccccgtggcaggggggcggcggcgcgattgcgcacgttggccgcgattcgtccaccttccgcgaaccgccggcgaaattcgaggccggcacgccgcccgtggcggaggccatcgccttggccgaggccatcgaatacatcgaacgggccgggcgcgcgcgcctcgcggcctatgagcaatccctgattcatcaggtcgagcgcggtctgaaagccattccgggcgtccggattcatggcgatcccgccgaacgggccgcggcggtttctttctctttggagggtgtgcatccgcatgacgtcagccagatgctcgatgaagacggtatcgccgtgcgcgcgggcaatctgtgcgcacagccgttgatggatgcgctgggcgttccaggagtcgttcgaatagcgcccgccttttacaacacaccggaagaaattgacttgacgatgcaagcgctggaccgcgtgcgcgggatttttcgatgaacctatacgaccaagtcctgctcgaccataaccggaatccgcggaatttccgccccatgcccggcgccacgcattccggcgaggcggataatccgctgtgcggcgatcgtatcgccgtttttctgcgcgtcgaggacggcgtcgtggccgaggcaagttttcagggcaaggcgtgcgccgtggccacggcatcggcctcgctcatgaccgtcgccgtgcagggggaggttgtggaggaagcgaaaaaaatgtgtctttccgtgaaggcttttctcaatgaccgggcggaaccggcgccgaccgcttcccttgccatgcttgaacgggtccgcgattatcctgttcgcatcggatgtgccgaattgccgtggacagcggttgccgccgcgttggcgacgggggaccgacagccctaaagcggatcgattggcaattcggggcaatctttttcatcagatggtattgacaatatgagaaatcagcgatatagtagtcgcgacaagtgatagcttgtgcagtttggcggcgaatagagaagtttgcgcgtcggtaaatgcgacaaaaacatgagaaaggagatcgttggggacgtttacccaagcaggtgatggccgaagtgtaagggcagttttccgaactactggcgaagtccaacacaaagggttgtcacatgaaaaagcaaggttttacgctcatcgaattgctggttgtcatcgccatcattggcatcttggcggcaatactgttgcccgcgcttgcccgagcccgtgaatcagcacgccgttcgagttgccagaacaacctgaaacagcttggcgtggtgtacaagatgtacgcgaacgaaaaccgcgcccagaaatttcccatgatggccgcccggttgtcgtatcaggtccagaatgcggaggtcatctacagttcgtacaacgaatgcggatacaacaatccgtatctgccgccgacggcgggcggcgacgcggaattcgtgccggacgggaagtccatttatcccgaatacctgacggacgtgaacatcctgatttgtccgtcggattcccaggcgaaaaaggcccagcagtactggtttatcaacggcaaggtggatccgtgcgcgattacggccgaatcgtacatgtacgtgaattgggccctgacaggacgcgacggcgaaggatatttgaaatccggcgcggatcccaatccgggcaatatgcccttgggcgtggcggcgattggcacgtatctggatcttggcttcatcaccaaggtcaacacgcttctcacgcagcagtcggccatcgatccccccggctcgcaaaacctgtatgacaccgacttcaagttcacgaaccaggacggaaaagaaatcaccatctatcagatgcgggagggtatcgagcggtttttcatcaccgacatcaacaatcccggcgcaacgacgcgcgcgcaaagcgtcattcccatcgaatgggatcttgccagcacgaccgccgatgagttcaaccacgtgcccggcggatcaaacgtcatgtttctggacggacacgtcgagttcatcaagtatccgggcgaatttccgattacgcaggcctttgccgtcatgacgtccatgttctagcgtcgtgagtcgccgatgcaagggacaaacgaccacagcaagtgaacaaaagggactgacccgcttttcgggagtttgatcagcggatcagtctttccttttttcgcggcctttctttcatccttgcccggcttgccgaaaaagaactcgatgcgaagatgtgggaagaggcgaagcattgcacccgcatcccgcattcaagtttgaatcgcttgcatcgaacatgtaggtctttttttcaatctctgggtatctgcgtcatctgtggaagatcggaagacggtccgtggatgccgaaaaaaggaagtgggattgtctttgccccaatcgcctgcaaagaacttgacgcaaagggctggaaaacgggactcctgaaaaaagcgcggttattccggtttctcttccacggccgggtccgggacgaaaaaggccagggaagcgaaactgatggaggttcgggtgtcgcccgttttgcgcgcggaaatgtcatgggccagcaggcggccggttgcggatttcggcacgatccgcagcaggatggcgatggcgtttttcgcgcagattggattgcgggtatcgtcgagatagcggacaaagccccggaaatcccgcgtgagaatgaggcggaacgcctccttgtccagtgcttcgatggattcgatgatgttttccttgaaagggcggtaactgaagttgttgccgtaatgcgtaaagtcggaactgacgaccagcagggtccgatcatccatcagggggtgaagcgatttcgcgacggcttcgatcgcgtccacgtcggtcttcttctggtaatcaaggaaatcgccgactaggatggggatcaagcggaacgttccaaggcgttcctggaggaagggcaacgtcgcctcgattgaatattcgatttcgtggacttgcacgcgggacgaatcggcctggtagttgacgctacgcacttcgatgagcggcgaaagatccaactgccggatgctttggccatccaacggaatgctgcccaagggggtttggtaaaactcgaccgacggaatcgagcaaccgcggaaggaactccggtgcgacgcccccagcacgataacgcgatcgtattgtcccggctgaagcattcccagcgcggcgcccgcaatggcgccggatgtctggtacggcgcatgcggcacgatgcatgccgccattcgttcgcccgccgggggccgcgcgtctttcatgcactccttcagggccgattccagcgctgctttgtcggctggataccagacacccgcggcgaccggcagggcaaaacgcgttacagcttcggacaagccgctccacagaagcgtcaggcagatgccgtaaaaaatgtggcgccgcatcgcgcgttgtctcccgttgtcggaacgtatctgaaaatgtatcgaatcggctgcaggattgtccatgtgaatggttgaacaaccgagcggccgtttagggtatggttcgatggttcattgctgttcaggcgcaatgcttgggcatgggcagggctttgccggccttggatgatttttcggcggtggcgatcaccgcgatgacgcgccgggcgctttcgggggtcacgacaagcggctcgccgagcatgagatgatcggcaatgttgcgataataggcgtgccagtcggactcgaagtacttgagcgtcgcctcggatcgcacgccgtcgcggtaactgatgacagtaaacttgtcgtcatcgtagtcgaggatgccgcctttcgtacccaggatgcgccatcgcggtttgccggccgcggcgatttgcgacaattcgatgaaggcgctgcatccgttcgagaagcgcaccgtggccgagcaatggtcctcgttggtgacatcgtgccagacgcgtttttcctggaaatagccggagacctcgacgatttgcgccggaacgagtccgagggtccaatcaacgacgtgtgcgccccaatcgtagaacgcgccgccgctgatctttttttcggaccgccaccagtaactcggatggccgtatccgcccatgcaggcctcgatatggaaaacctcgccgatcaggccgctggcgatcgcgtgtttgatggccatgtagtcgccgtcccagcggcggttgtgaaagacgctcaacatgcgcctgttcctgcgggcggcggcgatcatcgcatcggcttcttcgatggtgatgcagaagggtttctcggtgatcgcatggacgccggcattcaggcattcgatgacccgtttggcgtgatcgttgtgctcggtgatgaccgtggcgagttccacgcctgatttttcaagcatttttcgtgaggaggcgtaggtcggaatgccgggaaagtcctcctcggcctcaatccggcgctgttcgacaaggtcgcatgcggccacaatttcaaaaccggcggcgcgcatgctttcgagatgaagtcggcccatcttgaacgattttccgtatccgatgacgcccgccttcatggatttgatctctttgcgaccaaaggtccagtccacgcccctccggatcattttctggacttcggggtgattcagcgagcgttcgtcgtggcccagcgcgaggaaaaagacccggcctttgccgtgggtccgtgtgtatgccatgggctgcggcttgccccgccacatggccgttgcaaggacttcgcaggaatccgcctggaatttgtcgagcagatacagttcgtccgtcacgcggaaaggttgtatccgccgcgtgatcatcgaatccgccgctgtcggcgtcacgggaaactcgaattgcgcatcgtgcccggcaaacgtcgagccgagcatgtccacataagccgcatttttcgtgaacgaggccgccgcgccatgcaatccgatgaatgcgccgccattcttcacgaaattgacaagcccattttcctgatctttccgtagttccccgccgtcggcataaacgattgccgcatcaaaacgcccgatatttcccgcgcgcagcgtgtttaggtcgtgcgtcggtgtgaccagataccgcccggtgtcttccagaagtttttttacaatttcgccgcaccgatcgaggggatgatattgtccccccagtaccatgaggatttttttcatcgtcgccattccgcgtcctttctctgctataattacacggtgtcaaagtgcattgagtgcgattttacgtacataacggaggaataacaaatcgccgcgggcggggaggcaatgacgaaaatggatggggaggcgaaagtggttgcctgtgccgcatgcggtcatgtcatgaaaattccgccccagtatgccgatacgccggggcggtgtggccggtgtggcgccacggtaaacgatcgcgttttgatacccgccattgatctgtccgatctggggccgccatcccccaaaaagaagacatctgcggccgtccagaattcagaaaccttttcgactactgttcgccgggcgttgctggcggggttggccggtgctttggttggggggggtgtcgtaggcgctttctttactattcgtcgcacggaggggcaggccatcacgccgggcactcttttcgcaaacgccaacacggggctcgtgctcggtttcacgatatgttcgctgtttttctttgtcaagcatttgaattggggaccgttcagggcggccggggctggaatgctcagttgtgtcgtgatcggctccgtcatgtttctcttggaagcccgtttggttgccccgccggacataggtttgtttgcccaaatcgcgatggccgccatggcgggaggggtcgcggggttgatcatgggggccaaattgaacaacgaagactgaccgtatgccggagacctcggccgccatcatgttccaattcataaggagatggcggatcacacattgaatctccgccattgcagccgttttttggggcctatcccatcgcgtgtgcgcgggccgctggggttcgtttttttgaatcatgttattagggaggcatatacttttttcgatcgttgagggaacgggaggtgagcgatgcaaagagtgagtgtgttggcttttttgctgttatggtgtggggttgctttttcggtcgagttcgtgtttgaagaacaacccggatcgtgcctgttgaaaggcgatggaaaaacgtggatggccacgatgatggccgctttcgatccggcaaaacgcgatgagacatacaaagtctacacacatatccacgattttcagggcatcgccccgattaccaagggaccgggcgggaaatatccgcatcatcgcggtatgttcattggctggaaggatgtcgtggccaacggtctccacttcaatttgtgggaaatggcgaatacctcgcagcgccatgtggcgtggctggaacgcaaaggagggctggactccgcgcggcaatcggagcgcatccactggtgcgatccggagggaaaagtgcttatcgaggagacgcggacccttgccgtccggcccggtcccggcggcgtgcgccttttcgattttcagtctgtgcttttggccccgtccggcgacatccagttgcgcggggatcttcagcacgccggcatgcaggtccgcatggcgcaagaagtggcggaccatgaagattcgacgaaatacattttgcccgaaggcgcccaggaactgccggacgacaaggtcgtgggtgcatggtgggtatgttgcagtccggttgtgcgcgatgtgcgctattgggtcgttcatatgacaccgtccggtcatccgttgggtcagccggtgtattcgattcgccggtatgcgcgattcggtgcgttttttgagccggacttgcaggccggaaagccatcggcattctcgtttcgcattgcggtatcggacaaggaactggaccgcgccgcctgcgaatcgctgtatgccgattattgcaagcccgccccctgattcgattcggagacttacgcgtgcgcaagttggcggtcacattctacggcatcattcacggatcgttgatcaaggaatgcgccgtcgtgccggaacagcgcgcggaactgtgcatggaaggcgacccgtggctggcgacggtttcgacgccctacgatccctccgcccattcggatacctgcaaagtctttacgcatttgtatagtccttgcgacgggctgccgattacaaaaggggcgggcggtttcgattcgcatcagcgtggcctgcatatcggctggcgacgcacggaagtggaagggcggaacttcgacacgtggcatatgacggattgttcccagcgccatggcggatggctggctgaaccggggcatgtggccgcccacgcgttcatcgtggattggtgcgacgcgggggggcggcctttcctgcgcgagtttcggtccgtgttgtgccgccgcgcgcgatatggcgcgcgcatgttcgatttgcagtcgcggctggccgccgtggaccgtcctgtcgccctgcgcggggacccgcaccatgccggtgtccagattcgcctggcgaatgaagtttgccggcggccgtggggcacccggttcgtgctgccgggcaatgcacaacgccggcgcaacgatgtcgtgcgcgatgcgctctgggtttgctgcctttccactattcgagacaagcgccatgccgttttgcacatgacccatcccgccaatccgggtctcgaacatctagtctatgggatacgcgcctatgggcgtttcggggcctttttcgatgcggatttgaagcccgggtttcccatgcgcatgcgtttccgaatcctgtggaccgagggcgaattggacagagatgaatgcgaggctctctatcgcgagtacacctcatccttctgaacattacaagcccggcaaggcaatgataattcccgccttgtgggcaggatgaacgatggggaccccatggacttgattcggcgcctgatatcttatcgtctccgccgcggtccacggcgtcgctggtgtggacgtttacggtgggaactgtcgcgctggggttcgcgggggctttcgggaacccggatcgtctcggcgggaatgtaacgggcgagtttgtcttcggtcgagttgtaacagtcgcagcggggacaccttgaaagccgttcggcctgctcgtcaaggtagatatatccgcaaaacgtgcaccgccagagaaactgtttggttaggaccgcctgtattctccgggaaacgatttccgtatgcgtccagatgacaatggccagcgcgcacagcagggcgctgtaaaaaacgagcgcggaggtaagcgaaatctggatcatgatgatggcgcccctgctttttcgtgatcatccacggtctttgccgatggccgtttgccgttcccgtcttcctttccgggtgtcgccagcgtgaagagtccggcttggggcgtcatgggtatgtgccgcattgcttccctcatgatccgccctcgacctcgacgaataacgtgccgcgttgcaagtggacgttttcaatcggttcgaattgaaaacggggaagcacagtttggagttccgagacgacgccggtggcgtcttcgatggaagtttggacgttttccacttttcctttttcgttgacgctgaaaataatcgaaatgggagccgtaagccgggccggttccaggcgccacagggaagcgatcggaggaacaaacagggcgcggcgatcccgtggatcggacatccattcgacgaacagcgcaattccgggcgccggacattccaaccgcacgcggttgggcgttgtttgatcggttcggggccatgcccattgcgagagcgcggggccgattccgcgcaattcgctggtgaaccgcgcccatgaatcgggcgtgtcggcctcgcgcgtctcgaagagttcgctgaactgggaacgaatcttaagactttcttccgggctgcgcaagaccggcagggacgacgcgagccggggtagttcgacgggtggcagcaagtcggtatccgattcatcggccaacgcgagcagattcgggtaccgatcggtcggcatcggctgatcgctgtccggggttgggggttggacaaggccgatggtaaattgccgtgtttcgggttttggcagaagaatcacgatcgaaaaaaccgataccatcgaaagatgaaacaggaccgagacggcgagtgctatgttaaaagcggatgcgcgcggcatgacgcgttaccgttgcggcggcccggcgggacgggcggcaatcgtgcaatggcggatgccggcgtcgttgaccagtccgagcacttcgatgagccgcgcgctttcgatgcgggcatcgggccggattacgacggtgatgtccgggcgttgcgcatgcgcctctgcgagaatgcgcgaaacttcgtcgaatccgcccacctgctcctcattcacaaaaatcccgccctcatgcgaaagcgtgattgacaagtctttttcctcgtatgcggacggcccggcggcctcggcggtcttgatggtcacggggaactgcgtggcgaaggttgttcccagcatgaagaaaatcaacaggttcagaacgacgtccatgagggccgtcatatcgatcgtggggcggatcctgggcttccgttccttgcggaaccgtatgaggcgtttatccgccgccgcttgcatcatggggcctatccgtcctcgccggttcggtgcattgtcatcaattcaacggcttccgatgcgccgacttccatttcaacgatcatggtgtccacgcgcgtaacgaaataattgtacgccaccatggcgggaatgcccacaacaagccccgcaaacgtcgtgatcagggcatttccaatgccttcggcgagatcggaagggtttaccatgcctcggcggttctcgatggccgcgaagcatttgatcatcccttggaccgtacccagcaggccgagcaacggcgcgacttgcgcgcaggttcccagtccggcgagataacgttcgagacggggtatttccagccgtcccgcgtcttcaatggcctcgcggatatcggttttggtgcggttgtgcttgaccaggcccgcttttacgatgcgcgcgatgggcgcacgggtttcgtcgcaggtttgcaacgcctcctggacgcgatcctgccgtagcgcggcgcggatcagatccatgaattcccgcgtgacgactgtgatgcggcgcagcgtgtagaagcgctcgatcgcgatggccaacgcgacgatcgagcaaacgaaaatcggccacatcaccacgccgcccctgccgatcaattcgtatgcggtgttgtatcctgccggtaacatggcttcaagcctccggtaagtctaaagcgtgacgagcgtgcccacgcccttgtccgtaaaaatttcaagcagaagcgcgtgtggaacgcgtccgtcaatgatgtgggtgcgcgatacgccgtgatccagcgccttgatgcatgcgtccactttcggaatcatgccgcccgcgatgattccctcgcgcgtcaactgggccacctcgccgtgccgcagatggtgaatcagcgaatccgggtcgtccttgtcgcgcagcacacccggcgtgtccgtcagaaagacaagtttttcggcctgaagcgccgcggccacttcgcccgcggcggtgtccgcattgatgttccacgtgcccccctccgcgtctgtcgcgagtggggcgacgacgggaatcatgcctgccgcgcagagcacgttgaggatgcgggcatgcacattgacaatctggccgacatgtccgatatcggcgccgtcctcgaactcgatctttcgcgcgtgcagcagattcgcatccttgccggaaaggccgacggcctgcccgccggcttggttgagcagcgtgacgatgtccttgttgaccgttcctgccaggatcatttccacgacttcaatggcggcgtcgtcggtgacacggcgcccctgatggaacttggattcgatggccagccgtttcaacatgccgttgatggccggtccgccgccgtgtacgacgatcggattcatgccgacatatttcatcaacacgacatcttccgccgtgctcttgcggatgcggggatccgtcatggcgctgccgccgtacttgataacgaccgtcttgccctcgaacttccgaatgtacggcaacgcctcgaccaacaccgatgctttttgtataaccgcttccatttttctccttctgtcgtgcccgcaagcgcctcgggcggcaactacgtcctgtaatctgcattgatttccacgtagttgtggctcaaatccgatgtccagaatacggtttttcccggtccatttccgacttccacgcgaatgcggaattccggcttgcgcatgcaggccgccgcgtcttcttccttgtattcggccggcatcccgttgcgcatgacttggatatcgtcaatccacatgcacagtttctccgggatgaacgatgcgccggaatagcctgcggcgcaggcgaaacgcccccagttggggtcttgcccaaaaaaggccgtcttgcacagttgggatgtcgcgatggcgcgcgcgatgatctttgcgtcgttgtcggaagaggcgccattcacggcaatttcgacgaattttgtcgcaccttccccgtcacgtaccagcgattgggccatgtgaatgcacacgtcgcgcaatgctgcggcaaagcgcccgaagtcgtccgtgcccggctgtagaaccggcgtgcccgatgccccgttcgccaaacagatgaccgagtcgcttgtgctcatgtcgttgtccacgcatatttgattgaaggatacctcgacggattcgcgcagaatcttggcgagcggctccggttcgatggcggcatccgtggtcaacaggcagaacatggtggccatgttgggcgcaatcatgcccgcgcccttcgcgatggcgcccagccgcaccgtgccgcccgaaagcgctagttcgacggctgtttctttcgggacggtatccgtggtcatgatggcggcggcggcatccgcgctgccgtccgcgcgcagcgatgccaggcattcccgcacgccgttcgcgatacggtccatcggcaacgggaggccaatgactcccgtgctcaacacgcagatctcctcggatcgtgcgccgatgccttcggcaaccatttttgccgttgcctgggcatcggcatagccgcgatcgcccgtgcaggcgtttgcgttgccgctgttcgcgaaaatcgcccgcgcgacgccgcgcgtgcatacgctttcactccagcgcaccggaggcgccttgaataggttgcgcgtgaatgtgccggccgctgtcgccaatcggtcgctgacgatgagcgcgcaatcctttttggtcgaattcggcttgatggccgcagcgacgcctgttgcttggaagccttttgccgccgtcacgccgcccgggatggtcgtcatggcatcatccccgccagtttaaggccggtcgtctccggcagcccgaacatgacattcatgcactgcaccgccatgcctgccgtgccgccgacgaggttgtctatggcgctgacgataatcaggtttttggtgcgtttgtccacgacccaaccgatatcgcagaaattcgagccacgcacataacggatttccgccggtttgccttcgccgagcacgcgcacgaacggctcgtccgcgtagcgttcatagcaggccgccacatcgaagatttccttgagatgcacggttatcgtgctgagaattccgcgtgtgtaggcgcctacgtgcggcgtgaactgcaccgtaaaggccttcagcagctcctgttcgatttccggcgtatgctggtgatttccgatacggtaggccttgacgttttcattcatttccgggaagtggaaagcctccgccacggcccggcccgcgcccgaaagacccgaaatcgcgtccacaacgattggtacatccttgtcaatgggagcgtccacgagcggtcgcatcggcaagatcacgcttgcagggtagcaaccaggcgccgccaccaattgggcgtctcgcaattgatcgcgataatagggaacaaggccgtacaccgcttcccgcacccattggcccgccgtgtgctcgaccttgtagtattcggagtagagacgcagatccttgatgcggaagtccggacccatgtccaccgtgcgaacgcccgcctcgcgcaatgccgcgcccaacgccatggacttcgtgcccggcaccgcgatgaacaccacgtcgcacttcttcgccaacgccgccgggtcgaatttttcgcataccacatccacgagtttaccaaaggccggcaacaattcctggatggattttcctgcctcgacttccgccgcggccaccagtttcgcctcgggatgcaaattcagcaggcgtatcaattcacgcccgccgtaaccaatggcgcctacaagacctacacgtatcatgaaatacacctccgtgggatggattggaaacagccggattatagtccgctgtcggcagggcaatcaaagaaagctcacacattcgacgaattttctactgcagcagccacgcgacaccggcgccgcccaggatgacccaaggcaccttggcgcgcaggagcaaggccgcaaacgccgccgttccgactgcggccaacgatggattccagggcacttccatgccgagcatcgcggtggtggcaagaaggaggccgacgaaggatgccacggctccacgaagcacgcaccggactgcgggacggcggcgcaggcggtggaattccggggccagcgccagcagcaccagaaacgagggaaggaagatccccatggtcgccgcgcaggccccggccagcccttcgcgcatgtagcccacgaatgtggcggtgatgatgatcggtccgggcgtgacttggcccagtgcgatgccgtccatgaatgtccgcgcgtccagccaatgccgggcatccaccacctcgtgcagcatgatggggagggcggcgtatcctccgccgaaggcaaacaggtcaatccgcatcatcgtgaaggccagattgaaaagcgagcggtccacgaagaaaagcaccaccatgccggccaacgctgcggacacgacaagcgcggccgcccgccatgcgtttctccgttgcgtaaagggcgcgggcgatcgcggcgattcttcgtcgcccacacgccggtaaagccaaaatccggccaaggccgcgacggggatggcgatatacggaacgccgccaagtccgagatagatcgcgacactgaaggccagcagtacgtcctgccgatacttcacaaattcccggccgaaggaccacgccgcatgcgccaccaaggccacgaccacagcctgcaatccgttgaacattgcaagaatagacggcaaattgtgtgtccggctgtacacggcggacagggcgagcatgagtagaaacgccggcagtccaaaacccacaaaggccgccagcgccccgcgaatgccgccgatgcgcaatcccaaataccccgccatctgcattcccgtggcgccgggaatcgcctggcacagtccgatgccgtcgtcgaatgcctcggcccttacccagccgcgactccgcacgagatcttcgcgtagatgaacgatgatggccggtccgccgaacgccgagcacccgagaatcaaaaaggtccggaatatttgccacaggtttggattcggcatgggtcgaatcggttgctggtttgtttgcatgtcctggatgatatcatttttcccgcatccaattttggtattgccgggtagggacacctctgtcctgtactcaatccgctcgtatctgcgtcatccgcggaaggccatgcggtcaaccgaggacgcggctattcgtagatgctgaaaagatgaatggggaatcaacgcaagcccgatttcagccagccgcttgtcacgcctcgacggtttgccgtttggggagacgcaccacaaatcgcgtgttcgaggacgcggcgtccaagaacaagtcgccgtggtggttttcgaccatccggcgcgaaatgctcaaaccaagaccgatgccgccgatggtctgtttcgtggtgaagaaggggacaaaggccatttcctgaagatccctgcccaagccgtgtccactgtcggttatggcaaatcgaatagtcgtcccttcatcttcgacgtcgagccgtatccatttttccggcaattctttgacggcgtcgtaggcattgttgatcaggttgagcagcacttggcccaattgggcagagcggcattcaatatggagttcattcggtatgggcgacaccgtcagtgtgatgccggcgtctctacagcgcgccatgcacacttccagtgtttctgtgacgatggtggcgaccgattcccgcacgaatgcgtcggacgagccgtccctggacaaattccgcagtccttggacaatatgttgaacgcgcttgacattgcgcacgatggtcttggtcacgtttgcccggtattcgtttgaaaggcggggatcgtcgagacttcgttcgagttgttcggcgccgaccgaaataatggccatgggattgtttatctcgtgcgcgatgccgcttgccatcgtgcccaaggccgacaggcgcgccgcgttcagcatgagcaactgctgttcgatgattaggcgctgcgcctttacgcgttcggtgatgtcgtttccgatgcaaaggatttcttttatgcggccgttttcgtcgcggatcggccggttggtccacgatatccagacgatgtccccgtttttccggcagttttcgttttcattgcacagatactgttccgggtgttccccgatgccctttatcattgcctcgtgggcgcgcccgtcggaatcttccgggcgcaggatggttccgatgacattgcgtccgatgatttcctcctcggtgtacccgaaaaattcctgcgcgaaatgattgaagaaaaggatgttgccgttcacgtccatgcgcatgatgacgctgttggcgctctcgaccagttcgcggtatttcgcctcgctttcgcgaagggcctcctcggcttttttgcggcgatcaatatcgcgtgtgatgccctgaaatccgagcaatttgccttccgaatcgaacaggggcgccgacaccgtttcggtccaaatcaaggttccgtcctttcggatttgctccagttcataggtcgcgcttcccggattgattccctgttccatgagtttcaaacgctcgctgaattgcgccttgaacgaggcaagcgaccgcggggttataaattccaaaacggatcgcccaatgacttcttccgctttgtatccccgctgccgttcgtccgccgggctgacatacgccgcgcgcagatcgggtgtcaactgccaaaaaacatcgtccacgctttctatcatgaaccggagggattcctcgctttctttcagcgcctcctcggcctgcttgcgttccgtgatgtcgcggcccaccgactgggtttcgatcaggcgtcccgttttatcgaagaagccccggttgacaaactgcatccagcggatttcccccgtgccggcatagacacggttttcgataacaacgacggggttgtccggcgacatctttccgagttgctcttcgatgatcggacggtcatcctcatgcgccaggggttgccagggtttttcaatcagatcgtttcttgttttattgaaaaagcggcaaaaaacgtcgttcacaaacacgaatgtgccatcgggccggaaccggctgatgatttccgtctgatcctccaagacagtccggtagcgttgctcgctgtcgcgcaaagccgtttcgatgaggcggcgttcggcgatttcttgttccaattgccggttgatccgcatcagttcggcggtgcgttcggccacgcgattttcaagttgtgctcgcgtctgctcaagctcctcgaacgctttccgtttttcctccatctggacacggagcgtttcctgttcgacttggagccgttgcttggcccggtgggtttcatacactccccagaagaggccgccgatgaacaatacaatgccggtgctcatgagcggttccttgaccagatggaacggcctcacgaccggacgcacattgccgccgaaagatgagatgccatccatgacattgatgatctggccggccaagataagggcgatgccgatggccgccagaaaagtgatcggccgtacggcatacacgacggacaagacaaacgtggtcccaatgcccaacagaagtagactgaaaaaagtaatggtatcggcgataaaaaaactataccagccttggtaaaagcccacacggcccagtaaatgaagggaaagaaccagcgacagtgaaatgacgacataccacgcgacgcgcggcggcaaatcatattttgtcgccggagatgccccttgatcggcttccgccttctccggttcgttcccgtcacgcctcatgaaatacccctgccctgttcgggccgttgctccctgctcctacctttcccgtatgccggtttcattgtactactttctcgccaaaattgaaaggcctctgtttgaaccaccgcgtaaagcgtcgtagactatattccgccaagtgcgagaggagaagcgccgatgtcggaaacgaagaagtttcgcgtgggggttatcggggtgggttcgattgcgcaggcgtgccacctgccgggttatctcaaagatgatcgggcgcaattggtggctttcgccgaccccgaaccggagcgccacaaggagatggcgctgtcctatggcgagatgcggggctatgcgcattaccgcgacatgcttgcccgggaaaaactcgatgtcgtcagcgtgtgcacgccgaacaagtatcatgccgaagccgtaatcgccgcgctggaggcgaaatgccatgtcttgtgcgaaaagcccatttcaacgacgctgcaagaggccgacctgatgatcgccgccgcgagaaaagtccggcgcaaactgatgattggcttcacgcaccggcttttcaatggcccgaagaaatgcaaggaactactcgaggagaagacgctgggaaaaccgttcatgatccgcgtgcggtttgcgcatggcgggccgtttcccggctgggccaagagtgattggttttaccagaagaatctggcggcaggcggcgcgatgctggacatgggcattcatgcgattgatttatgcctgtggcttttcggcccgatcgtggccgtaagcgccaaggcggcgacgctcgtcaagaaaatcgaagtggatgacaatgcgttgttgctgctcgaattcaaaagcggcgcgctcggatacatcgaagtgggctggaccagccgtcccggattcagcggccttgaaatctacgggaccgagggatccatcatctgcgactacacgcggggcgtgtatctggtggggggcaaggcatcggcggggcgcgacggcaaacacgaatggaaaacgctggacaaatcgcccacggaagggggatggtccacggagatgggctactggctcgatgtggtcacgggggtggaaaaactgaccatggacggcagggccggacgggatgcgttggaagtggcgctggcggcctacaagtcgagccagaccgccaagcgcgtcaccatcgaataagccgcctgcaacctttcgcgcggcgcgggtatatcattgagaaggagggttgccatgattcgcgggctatttgtttcgattggcctttccgtgctggttcttgttccggatactgcgttggcgcaacgcgagccaagggctttccgaaccatcaacacggatcaatacgaggtggccgttcacaagaatggcctgattgacattcgggtgaaccggatcgaaaccattgccaccggtctgtatccgatgatctggattgagggggaggccgcgccgaaaccttttcccgttgatgcgcgatacagcaaccgcgctcccgtgaacaaccgccttggagaaggacaggggatgtggttcaagaaggggacgctggattggattgtggagacgtaccccacaaaacctttcatgacgattcaagtggcgttcgaaaacacaaccaaaaagcccgtgacgatcaaggcgctgattccatgggcgcttggaggcgagaaaaagggttcgctcaatctggggttgggttccggcgggtccgttattcttgaaaacggccgccatctgggtttgaccgacgaagttccccaagtcgtcgccgggaagacgcaatgtctaagcaattgcacggccttcaatccgaccagcggattgtcgttgacggcgggttttctgaccatgcggcatgcgtacggacgaatcatgcttgaattggatgacgatccgacgagggccgtcatgcgcgccgactgtatatttgatccgccgatcgaggttccgcccggaaagcgcctcgaatcggagattttttatgtggcccttactgaacgaaaccccttcgacgggttggagcatttcgggcaggccgtcggcgcgttcaacgatgccggcccgcaaggtttccggttgccgcacggttgggattcatggaacaccgccctcaagagcgacatcaacgaatcgaacgttttggcggcgttggatgtgttcgatcgcgatttgaaacgttacggttggacgcattttgcgattgggggcggttggcagcaggccacgggaacctgggaaccggattccgcgaagtttccgcatggcatgaaatggctggccgaccagatccattcgcgaaaaatgacggccggcctttggttggatccgtttaccgcccatgtaaacagcgccgttgcgcgggaacatccggattggttgcgccaaccggccgaggcgtaccgttccatgctggacccggatgatcgcatcatagatgtgacaatccccgaggcgtacgcgtgggtgcgggatctggctgtacgcgtcgggaacgattggggattcgacacgttgcagcagggcgattttgcatgccggttgctgtatgcggatcggtacgccgcggtgggtgttacgcgcgtggatgtgtttcggatgggcgtgcaagccttgcgcgaagggctaggcggggaatcgttgattacctctttttccccggcgcaggtcacggcgccggtttggcgtcgggagacaggccggaaaccttggggatgtgtcgaggcgatgacgaacgccgcccggcgctattattttgcgccgcattgttggatagccgacacggactgttcctattttgggattgattccacacgggaacggtggagtgtgggccatagacctcccttgtccgccgaacaggcgcaggcatggctgacggccgccgccctgaccggcggcgtgatcaaaatgggcgattggcctccggacctcgacgccggacagcgcgcccttttgacacggcttctgcccaccattggccgctctgcgcgccctgtcgatctctttgaaggcaaaacgcctgcgatttggtcgcttccgattcaatgcgccgtgggatcatggcatgtcgtcgccgtattcaactggaacgatgccgcccctgccaagattcccctcgatttcacaaacctgggtctcaatttcaaccgctactataccgtctatgatttctggcgcgacaagttctatggcctcgccaaggggaggctgatgctcgacatgccgccgggcagcgtgcggctgctgggtctgcgagcctatgagggccgaccgatgtttctcgccacggatcggcatttcacgcaaggggccaccgatttcacccgcctcgaatggaatgcgcaaacccgcctcttgtcgggaacatttaccggcattgcggagacggattataacctgcgtatttttgtgccggacgaatatgcggtgaaatcgtcctattgttcggcggaagcgcccaaaacggaacaggacgggaaagtttacaaactcggttttcgctgtatcgaatcagcaccggtcaactggaacgttcagttctgaaccgcaaggcggtggatttcccacgcgatcgcgccgtttatcaggcccgacgcggcgagcaagggcacgtcgtagccttcgaggggcacgcaggcgtcgggccaatcccacatgggatcaatccatataacgccgcgatcatgagcaaaatcgcgttcgtgccggagcgccgtgaaagcgacacgggcgccggccggccgtgccttgcggaggagatcgtccggcggctgctggtatccgatgagcacaatcatgtcgccgggacgataaacgtcatcgggtttcggcgacgtgcggaatcccgcgttccacacgtccgaatgaaacagttttccgatgtctgttttacccacttcgtccggaaacaggtggcccatgctgtacatgaacaattgtgcgccccgctttctcgccgctcggcaccatgcgcctgttttgtcgagttggcggcgttgttcgcgatccacgcgatccagcatggccttgattgtgttgatatagcggttggcgatgacacccgctgccacgggggggacttctttatcgtcgtgaaaggcaatatcgccgttcttgtactgcgtgatgcgcgggatgccgctgtatgagccgatactttcgtaaatgaccggcattttgccgagccgggtcaacgcggcgatcgtttcgccggtaaaaatccatgcgggaatggcgtttgccagcgtgggggagatgcctgcctcttcggcatgattcggaaaaaacggccattgatcatgaaccggccttgaaccgaaggtcactacaagcgcctgcgtgtttttcagggggtcaggcatgccggcgccgatttcgggcgtgtacaaaaccacatcggcgggatcaggcggctcgcttcccagtgcgcgaatcatcataaagccgccggcgcgtccgctgatttcgctgacgagcgagggctggcccgccgcccatagtttccctccgttggccagagcggcggcggcccgttcggcaaccggctgcatggcggataggtcgccccgggcacattcgatcgcatgcgccacgcgcgccagatacgaaccgttgatcggggcggccatggccgcactcattatgccgataatcgccgtcatcatgcgcggaaaccctttacttgaaagacagtcggaacccttttcccgaaacgactatcggatccaccgtgggaacatcgcccgattcgggcaatagaatccgcatgggggaaaaatccagaatatctttcctgatgtcaatgccgggcacgatacgcaccagttccataccgcgcggcgtcaactggaaaatgcccacattggacacgtaaagcactttcttgcccgtggcaagcgcttggcgtccactgaaggtaatttcgtccacattggcgatgaatttcggcttgccgtattcgacgatgcgcagggcattgccttccagacgaatctttccacccagcatccaactactgacgaagataatcgtccgcgccgcggtcgtgaagtcaatgaatccccccggtccgacgtaattgattgcgccctcgccgcgtttggaaacgttgacgtttccatcgctgtcacattgcagcatccccaggatgctcacatccaggctttcgtagcaccgatggaaaatttccgcgctggtaatcatctttttgggacatatcgcagcgccgaaaaagacgcccggcgctggcaatccaccaatgacgccgctttccgtaaacagggtgatgtcctcgtagagtcccgcctcgtacagcagccggcaaacttcttccggcaggccgacgccgatgttgaccaggctgccccggcgaacgttttccgcgaaagccgtcgcggccaagcgcgcaagcgaatcgtccaccgctgtgcgtctcggcgtgatgcgcagagtttcgttggcgtacttgagtttggcaacgctttccgcgatcggcatgtcgctttcggtagtgaacatcggccagtgtttgcgatgtttgacggaacccgtctgttccgtgcgggggtagacaacgaccgcgtccacatccgatgccggcagaaagatatcgtccgaatttttttcgacgacgtacccgacattgacgataaccaatccaccgtttgcccgcgcggcctttgcaatttcgcgactctccgcgagcatggccgtgtgcctcatgtagatattgccttcgcggtccgccgatggcgcgttgaacatcgcgaccgttatcgggggaagccggtagcgcaatttgccgttttcaaccgcaacccattgttccccggcgggcggtgtcacgggcgatccgcgccccacgcgcggatccatgaatgtgccgatgccggtgcttgtcaacagggatgtttccccgtggccttggccctcgatgaggaacgccataaccccttggggaatgcattggagttccagttttccttggtctgccagacgaagcatcgccttgaaggtttcgagatgtccgctgaaaaaacgcgtgcataagccgggaaggccgagttcttccagcgatcccggcgcgcggccccgagcgcccatgcccccaatcgccatgacggtcaaatcgcgcgggtggcccgtttcctgaaacaattcccgaatggaccaatacaggatggacgcccattgattggcgcccaaacccgaagcggccacgacggcgccgtcggggatcaatttgacggcgtcacgcggtcccatgaatttcggattgtcgggaatcgtgaaccgataatgcgtgtcgcgccggttccatgtcagccgccatttgagaacgtgatacaatacggaaatcttggaaaatagtgtcatgaggggtacttcctctttgaatccgtgacgtaagatagccgcttcaagaccgaaaagcaagagatatcggcgcggccactttacatggccgattccgttgcgctaccgtacccgtcaaaccggaacgaaaaaaaggatcgaagtatgaaagcgcctgtcgggattggggtattgagttttgcgcatggccatgtcggtgcgtatgtggacgtgatgaagaattttgccgatgtgagactggtgtcggcatacgacgacaatgagcaacggggcaagggggtgtgtgacaatgcggggatgcgctacacgccgcatgtcgaagatgtcttggacgatccgaatgtgcaggcggtcatggtgggcagcgagacatgccggcacgcagaattgtgcgtcgcggcggcgcgggccggaaagcacatcctctgccagaagcctatggccctctcgctcgaggattgcgaccgcatgatcgcggcggcggaaaaagcgggcgtgatgcttgccgtggccttccagatgcgtcacgacccggccaacatccggatgcgcgagattgtccagtcgggcgaattgggccgcatcgcggtcattcgccgccgccactgcatcggcgtgctgctcatggaatcgttcgtcaacgggccgacgcattggcatatcgaggccgacaagaacatgggcatgttcatggatgacgcgacgcatcccgccgactggttccactggatgctcggcaagcccgtcagcgtgatagccgaaattgacaatgtaatcacccatgtcgcgcccgacgacaacggtgtggccgtgttccgtttcgcacagggggaaatggggatcgttttcaacagttcgacggtcatggcgtcggaaaacacgaccgaaatctacggggagaaaggctgcgtgattcaaaattacggggacgcgccgtcgtgcgacacgcggctgcctggcgggatagccgtcaagatgttcaagtacggcgagggcaagtggcaggacctcggcgttccgattcctcccggccacggttgccggattcaagccgtgccgaggccctgggtggacagtcttgtgaacgagaccccgccggccgcgacgggacatgacggccgcgtggccgtcgagatgatcctcggcgcctacaaggcggcgcgtgaaggccgccgggtaacgtttccgttatgaaaggatccatgacgggattgcgggctgtttgtcgtccgcaacgggaagcgttgatgcccgtcatggggaaaaaggcagtatgaaggaattcgatctcgacacgatggtggatgtgggttgcgccacgatcctggaagtgcagcagaagatccagggcatggtgatagacaatccggcccgggcgctggatccggtcattgtcggtgcgcggaaaaaggccgcgttgcgcgtggatgtcttcgcggaggattacaccgaggccgaactgcgcaagaaattgaggaaataccgcccccgcgtgatcggggaagagagtcttttgaaggaggatctcgatctatcgcgcgaggatcgcctggtcgtgctgctcgacatgctcgatggcacggatttgctcgagcggggcttgtccaactggtgttcggcgatggtgttctattatccgcccgaatgcaggattttggcgtcgttcgtcggcattccgaacgatgccgtctactttgcgatcgaggatcgatcggcgccggtgcggaaatttctctggcatgtccgccgcggtcagccgcgcgtcattgacgtgaccggcccgtcgtccgtcacggccttgcaggaagcctcgctgtcgttctacggccagcagcccgccaatttcatgtccgttgcgggaaacaggcgttttgccgcgaaactggctgaattcgaaaccgtcaaggacgactcattcaagcgcatgcgcatctataatttggcgggcaatccgatgatgatgaaactcattgacggatccaaacgcattgacgcggtgttcgatttgctggggcaattgccgcacgacatggcgcccggcgcctacatcgcccgccgcgccggcgcaatcctgtgcggcctcgacgggcggcccattctggaagaagatcttgcgcgcatgttgataaaacccgcgcacggggcatcgaaaaggccgtatctgctggccgccaccgagggattgaaaaacgaatttctcgccctcttcggaacggatgcgtgccgggactgagaagtcccgatcctttttttgcatcaatggcgtgttatgcgccggccgcttcgcgcaaggcccgcaggacggcctgcgcggcgccgggggccggatcgctgagcaccggcaggaaaatcgtccgggccatcgcgcgttcggcattcgggaaatcgccgggacggtagccggcatagccctcgctcgcgcacaagggaccgcgattgcgcgtaaaaatatcgaagcctttggcaaacagcggcaagtcgtgcaggttcggatacggcgaaagcgacgcgcccacgccgcgcgccttgatccgctcgacgtaatccgcggtggacagaccccccatggcctccggctcgtgaatgattgggaatccataaaaaccgccgcgctcggcgccctcgtggaccgtgatggggcgcaatcccggaatcgaatccagtccggcctccacttcggcgaaatacgccgcgcggcgccggttcaattccggcagttttttcaattggaccgccgcgatgccgatgcccaggggatgcgcccggaacttcatgcccagtccgagcggttgaagctccgcatattttgccccgaccaaatcaatgcccgcgatgcggttgacctgtccgacaaggcatgcccgctcgaacacatcgaggtcgtccgtggcgatcatgcccccttcccccgcgctgaccgccttcgatccctgcaaactccatgcgccaacatggccgatcgcgccgcacatgcgccctttgtactttgcgccgtgcgcgtgggaacaatcctcgaccacggcgacgcccgtctcccgcgaaacggccatgatcgcgtccatgtcgcagacgtttccccaaagatgcacggcgcacaggcaacgcgtccgcggtgttattttccgtttcatgtcggccggatcgatcagaagcgtatccggattgatgtcgcagaaaacgggccgcgcgcccagcagcagggccggcgcgatgctgcaaatccaagtattgacgggacaaacgacctcgtcgcccggcccgactcccagtccgaaatacgccgagtacaaggccgatgtgccgttcaccaccgacacggcgaacttcgtgcccatccacgcccgccacgcctgttcgaattcgcgcaccacgggcgttccgcccgaaagctcgtttcgacgaaccatgtcggcggccatcgcggcctcgtcctcgccgatttgccgccaccggtcaagctcgcccgccgcccgcgccgtctgcacgaacgcacgcggaccgcccggattgacttccacgtcgagcgccatgttctttcccgatcgcgtgatgtgaaccgctattttttagcggcgtcttcctttggcacgaccttgtcgaaattgggctccgtgccgtccgttccttcttccatcaaccacatggccgcgtccacgatacttgcctggaacgtcggattttcccaaagatcctcgcgatggccgagggcgctgaaatacaccttgcccttgcccaacgcgctgcaccaaatcaccggatacggcgcaatgcgatacgccgcttgttttgcccctgcctcgcccgggtccagcaacgccagcacatgcatcgtttccgtgttgaaatttttgaacagataccactcctcctcgaaactccaatccgccggaatgctcgccatcgccggatgcgccggatccacaatcttcagcgtgcccttgaactgcgcgccatgcgtgacgaattcggcgcccaccatcttcaaatagggcgtcacctcgccgccggccggcgtgtgaaacgtgtccgacgcggaatgaaagcccatgaaacgcccgccgttccggacccactccaccagttcggcctggcccttttcacccatcggcgcgccgccgtccttgctggggcgcgtcaagtcgccctgcgtgtaaaaacacaccagatcgtagttcttgagattgtccgcattgatcaggctcgcatccttcgtgctggtgaaaggcgacccgttttcccgcgcaagccgcccgagaatcgtttccgccagactcggctgatcgcccttgacggccaccgggctgtgctcgaacccttccgacttgctcaagaacaaaatccgcggcggcgtgatatcctgcgccacggccacgaaagccacacccaagagaaccgctgtcgcccatgccgtccatgcaaccattcgacacatcgtcctttcctcccatgcgttttccatcgcgttgtccaaccggcgtagcataccctcccccgcggcgcgggtcaattcgccgcatttgtagtgtattcctgcacatgaaatttggaacgagcacgcaggtaatggtatatagttcgatatgcgggcaagctgaaggattctaatcgacaataggtttttcagtgcttcagaaaggggttgttgattatgaacgagtataatttgctggatgaatcgtggattcccgtactataccgaaacggctgcttcattcgcatcggcatccgcaaagccctcgaagacgcccaccgcattcgaaccatcgccgcaagcaatcccatggaccgcgtcgcaatccttcggttcctactcgccttgctgtattggtgcaagggcaatccaccggatggagcgaacgcaaacactggcgatccgtttccaacggattggttctcgatgcttgatgccaagagagactgctttaacctcctgggtgaggggaagaggttctatcaatacagaaaggctggttctggctcggaaaagaagcttgccgcaaactatttggcacaagaggtgcccaccggcacgaacaaatggcatttccggcatgcgacggacgagaaggatggcttgtgtcccgcatgctgcgccatgggcttgctgcgactcccactattcgcaacatcagggggacgtggcaagccgccaggcgtcaacgcgaaaccgcctctctatgtcataccggtcggcgattcgctcgcaaagaccttgcggctctcgtggaagccaatgcccaatctgggaacaccggcttgggagaagccggaaatggaacttctaaagacgggggagttgcccttactgatgggattcacttggatcccgcgacgggtctggctagataatcccgacaaacccgaaacaccctgcatatcatgcggtcaggtctgccgattgatccgcctcagcgtcttcgctcctatcggaagcaccaaaacgcaggaaggcggtgtaggtcgcttctggcgcgacccacacgttctctattccacttcagccaatgacgaagtaatctcgctgcatgccgccgacgtgcgcgccgctccggacgccgcagcgggacagtgggcaagaatcatcgctggcaatcagaaagtgcggcaagcagatgatcgaatcgggacttggattgttggtttctcgacagtgaacaacgatacgtatttggaggcgaccgaaagccttgtgcgtgacccattcttacccgaacagtcggaggccatcattgccagactggaacgatggcaaaaggaaggatcaaaacttgcccgcaaggcgcgtcccccgaatgagaaggttgcctcgcgaaagcatgtcgaaatccttccaatgctcgatggggttcgtccacatgtcgaaagcaaggtgttcgcggacgtaggcgagttgcttgtgggagacgatgaagcatgggagcaggcggcggctaagtacaggccaatgatgaggatggtagcccgatcgcttgcgcccggcttcacgaccgaggccctacgccgtcgccggaccatacaattcattgtccccaatatgaaacccaaacctgaaccggtcaagaaagatacccggaagaaagggggcgcgagcgaatgacgcctaccgagatgttcatcaaaaccctgacgaacctcaaaaccggcgacctcagcctcctgcgcacgcacgcaggacaaggtctcgatgagtcgctggaaggattcgacctcttcaccggaatctggtggcccttgcgcgagaagaatcaagctgcaccgcgccgttcagtggcatggctgatcgcgaagctctacgcgttctgtcccatccaccaggagcggggatgcgcgctcgccgcgcaattacgccgttgccgacccagcgaacagttctttaagaagtgtgacaggctgctcctgttgccgaacgaccggttggaaccagctcttcaatgggcaatcggaacccttgcttcaaataaattgcggctcgactgggtgcaactaacggacgatttatccatttgggaacgtgaaacaacccgcctcaggtgggcggaacaattactcgaaaacagggaggagaaatagacatgttgatcgaaatccacgccatccaaaaccacagcccggccaacctgaaccgggacgacctcggcgcacccaagacctgctacttcggcggcgtgctgcggtcgcgcatctccagccagtgcatcaagcgcagtatccgaacaagcgagcagttcaaggccttgtgcggcggaatccgtacccggcagttggcaaaattgattgctgaaaaggtaaccggcaaggccgatgtgaagaagcgcgcggcaaagatcctcaaggaatgcggcatcgctccaaaagacgaagacaagagcgacatgctcgtttacacgacgcaagaggcgatccaggagatggcggcgcttctgcaagatggcgacggaaagaccgatgaacaactggcgcaggccttcggcaacctaatcgctgatcggaccgccgtgcctgatatggcactcagcggcagaatgctcgaaaccggtgtcctgaaagacacgaccgtagaggctgcgttgcaggtaggccacgccatttctacgcacgaggcgcgcccggaagtggactactatgtcgccgccgacgacatccccggcgatgacgcgggagcgggttatgtggacgaagcaatgtttgcgtccgcctgtttctacaagtatttctcgatccactgggagacgctggtcgaaaatctgaagggcaacgaggagttggcggcccacacggtcggcgcattcattcgcgcggcggcattggcgaatccgacaggcaagcagaacagtttcgccgcccacaatccgcccgacgcgctcctcatcgagatcaaagataccccggttagctatgccaacgccttcgccaaaccggccgcgcaaggcgaacgcgacatcatcgcgcagagcattgctcaattggcgcagtacgttcacgacctcgatgtcggatatggccagccgcgacagcgattctggttctctcccaatctccgctataccttgagcgccgtgcaggataagaaggagatcgcactttctgaaaacaaccttcgagcgctcgacgaattgattcctgccgtgattgccgcaatcggccatgactgggaggaagtccagaaggttgtcgcaaaccatgaggtggccccatgagcgctaacaccctctttcttcgcctcgaaggtcccttgcaggcatggggcgatcagcagtcgaaattcgtcatccgccggaccgccgaagcgccgaccaagtccggcgtcatcggtatgctctgcgccgcattgggcgtatcgcgcgccgatgcccccgccgagtggctgccgaagctcggcgcgctgcgcatgggagttcgcatcgatgtgccgggcattcgatggtgggactatcacacggtcggcgcgggcatggaaatgcgcattgccgaagcagagggaaagaccaaacccggcgcgatgctcacgcggcgcgaatacctctgcgacgcgtcttttctcgtcgccctgcaaggcgatcccgctctcgttgccgaactggaagcggccctgaaagcacccaagtggacgctctatcttggacggaaatgctgtccgccctcgcgtcccgtgatgcaacatccatccggttcctttgaagatctccgttccgcgctcgcgtccgtgccatggcaagcccgactcaaaggagatacaccgcctaagtgtgtcgagtgtctcgttgactgggaatccacggaggaacaacctgaagcgcccgacgatgccctcgtctggtacgacgtgccgttgacattcgaaccaccggcacatcgcccacgattcgtcattcgcgagcaattgtccgttggcattgatggcgtcctaagcattgccgagacccccgcacaacggtttacaccgccgccgccgcgtcctcgagccgattatggcaacaaggaatacaaggatcgacgtaaagcccgcctcgaacaagaccaccatctctgcgtcttctgcaagtcgcccgcaaccactgttcagcacgtcacctatcgccgtgccggtggagacgagcagatagacgatctgcgttccctctgccgcctgtgccacgacgccgtcaccatgatcgagtacggccttggcatgggcctcgaccgtatcaaccccgaagaacaacgctggcgaaacaagatcatcgagaaacgcgacgaaatcgtcaaattccgttcgctggagacaaggcggcggcgtctcagcccagaggaggtcgaataatgttcctgtcccatctcttgatcgataccggaggcaatcccgaccgcccaagacccggcaggaaatggctccgcaacgtctatcacgtccatcagcgcctgtgcatggcctttccttcaaacatgcgtgtgcaggacgatccggagttcctcaagcccttcaagggagaagatttcccgttgcgcgggaacgcgaacgcggatccgcgcaatccccggcacagtttcctgttccgcatagacaacggcatcgagagcgatgccccgcgcgccatcatcctcgtccagtccgaactgaaacccaattgggactacgccttccacaacgcgcgcgtctttctcgcggccgacccggaaacccgcgaatacaaccccgcctttaccaccggcgacacgctccgttttcgcatccgaatcaacctaagcaagaagattcagtccaatagagaaggtatcgatcttcgaaaaccgcgagtggggatagacgccaaaggacgtcaaaaagatcaaagcaagcgagtggctctcacatggaacgacgatcagaagccggaagacgtaatcgtgccgtggtttgccgagaaaggcgccaaacgaggctttgaagtgaaaggtgcggcccttcttcaacttggctggtcgtcgggatttacggcggaaaaagaaaaggggatgaaattccggtccgccctgctcgaaggcacgcttgccgtggccaatcccgtgctcttttcccaaacgctggcgtcggggattggcgcggcgaaagccttcggattcggactcttgagcgtcgcgccatgcaatgtgaacccgtgacatgcgcacacacgatctgcacgaattgccgaaagtgagagacaaactcggttatctgtacgtcgagcattgtcgcatcgatcaggaagacaaggcgatcgctttgcatgatgaaaccggcgttacctccgttccatgtgcggccctttccctgctcatgctcggacccggcaccagcattacccatgcggccatactcacgctggccgacagtgcctgtcttaccgcatggtgcggcgagcaaggcatccgatactatgcctccggctccggggcgacccgcgacgcgtatgccctgctccggcaagccgccctttgttccgatgatgccgcccggctgaaagtcgtccgaagactttacgaggcccggttcaaagggaaaatcgacccctccctgacgcttcagcaactccgtgggcgtgaaggcgttcgcgttcgcgacgcctatgcccatgccgcgcgggaaacggggattcaatggcaagggcgaaactacgatcgcggcaactggaacgccgccgatcccgtcaatcgagcgctttccgccgccaatgcctgtctctacggtatctgccaggccgccatcattgccgccggttactccacggcgctcggttttatccacacgggaaagcaactttcctttgtttacgacattgccgatctttacaaatgcgacatgaccgttccactcgcttttcatgtcgcggccggccatcccatcaacttggagcgggaagtccgaatacaatgccgcgacgtgttcgcggaacaacgccttcttcaacggatcgttgacgatatcgcccagatcctcgatatcccacctgacgaagatacgcgtttggatgaggatccggccctgcccggcgcactctgggatccccggcaaggatcatgtccgggcggcatacaatacggtgctgatgactccggagatattggacatggtgatcatgattcttgaatccgtctcgccatcccttcgtggacaactcacgcggtggctgctcgaaccaaaatcaggcgtctttgtcggatccatttcggccatggtccgccaaaaactttgggaaaaggtttgcaaggaagcacgagatggcggcgccatcctcatcttttccgccaagaacgaacaaggtttcagaatagacttctggggaaaaacaacccgatggattacaaattgggaaggacttcaactagttaccaaaccaaaatgccaataaattcaatgggtattccccacgcacgtgggggtgaaccggatcgcaagaatgaggcggcgcagcaccgaatgtattccccacgcacgtgggggtgaaccggcggagatggtaagggagaaaataaaagaggggtattccccacgcacgtgggggtgaaccgagcaatgccgcgtatgaacaggccgcgcacaagtattccccacgcacgtgggggtgaaccgatccgccggtggccgcgccaagcgcgaatccggtattccccacgcacgtgggggtgaaccaagccgcccgactgatcgccgaggcgcgggcgcgtattccccacgcacgtgggggtgaaccgatttttgggatgctgttggtgccaaagtagtagtattccccacgcacgtgggggtgaaccgacgtattataactcgcccgcgggccgaggtacgtattccccacgcacgtgggggtgaaccagatgcaaaagagatggcggcgactaccacggcgtattccccacgcacgtgggggtgaaccgtatgtctcggaagaacagaaaacggccatagcgtattccccacgcacgtgggggtgaaccgaccgcgagtacattgaagaacatgccacagaagtattccccacgcacgtgggggtgaaccgtaacaaataaagcgtaaagagaaagcaaatacgtattccccacgcacgtgggggtgaaccggttcttgctgttgaagtgtgtggaacggtgacgtattccccacgcacgtgggggtgaaccgtttccatgatcttttcataatcgggatcttttgtattccccacgcacgtgggggtgaaccgagcattgaggtttcgccgcaaagcggcgaaacgtattccccacgcacgtgggggtgaaccgatcgaatcagggaaatgacacacacagatgatgtattccccacgcacgtgggggtgaaccgtcaacctcacgcgcatataacaggatccgcacgtattccccacgcacgtgggggtgaaccggaattggcgcgcagaataatgcggtccaatcggtattccccacgcacgtgggggtgaaccgtcaatccccgcgcgcatgcggggcttttacctgttggagccgcgagccgcaaaggcgcaaattttttggtgttattccctttttcatgatagtcctgaattttcgaacgttgttacaggcagccattactgaaaaaagttgttttttccggttgaatgggttacagaatcgttttgaggcattgaaggcggagtttcaccgggagccgaaatcggggcaagtgtgtgggacaggctgtccagcctgtccgtccacggacagggtgtgggttcggaagcggcaaggatgctgtgtttaccgtagaagcggcctgttgccgcttttccgtttgttggagggcgtgcgatttcgtcatgtggcgtcgaattccgattgggcccacagggtatgcgcaatcgggtgtggcaggaaaagcggagcaatgaatgggcgcgcctcccggaaaaaataaaggacgcctcactgggaggcgcccagggcatcccgtaggatggcgcccgcggatcgaaagatccttactatgatttgaaggtcaatcgccgctcaggtatactaaactatattataaacattccttccgggaatgtcaagtttttggttttcgggtgttgttcagatggggaggcctgtcatgaaaaaggcaaatgaatcgctggtgctgggactggaccttggaaccaactcgatcggctgggcgctgttcggatttgacggcgataatcccgtccgccttgtcggcatgggatcgcgcattttcgaggccggaaccgagggcgatatcgaggcgggaaaagacgaatcacgcggcgtggcacgccgaatggcgaggcaaatccgccggcagggcgaacggcgtgcaaggcggcaatccaaggtgggccgtgtgctgcaagccatgggactcctgcccgaaggggatatcgatcattcacaagcccgtcacgaatatttcgtgacactcgaccggacattgcgtgcccgccacaagaaggttaatttggaagcactgccgcatgtctttccgtattggctgagagcccgcgcactggacaatccactcgaacgggacgaactcggacgggccttctaccatctcggacaacggcgcggatttttaagcaaccgcaaggcctccggaaagaaggatgaggaaaagagcgtcgtgaaacagggcatcgccgaattggccgcggcaatacatgaaaccggcgcgcgcaccctcggcgaatacctcagccgtatagacccttcggatcccgaacagcgccgcatccgcgaacgctggaccgcccgccaaatgtacgaagacgaattcaacgccatttgggacgcccaatcgaaacatcatcccgaagtgcttacaccggaatggcggaaaatccttcataacgccctcttccggcagcgaccactcaaactccagcacgatctgatcggggcatgtccgcttgaaccggatcgcaaacgggcgcccatggccctgcccgccgcccagcgatttcgtgtacttcaaaaggtcaatgacctccgcgtcatcgcgcccgactattccgaacgcccgctcaatcccgaagaacgcaccctactgctcgacgccctcgaccgccaagaggaaatgaccttcggcaagctccgcaaactgctgaacctcaaagcgtacgtcttcaatctcgaaaacggcggcgaagaaaagctcattggcaatcgcacatccgccaagatgtacggcattttcggcgaacgctggttccggttcacgcccgcccaacgcgaggccgtcattcaagacatccgttgtttcgaaaaagacgccgcccttgctaagcgcgggcgcgagcactacggactcgatgaagagacggcaaaacgtttcggggaaatcgaactcgaagacgggtattgttcgctctcccggcaagctatcgaaaagctcttgccgctcatggagaaggggatcgcctataagacggccgaaaaagaagtctatggcgatccgggaccggccatcgctgtcgaaatgcttccgagtgtggccgaggccgtccgccagcaactcatgcccgtcctgcgcaatcccgtcgtcaatcgtgttctgaccgaactgcgcaaagtggtcaatgcgatcatcaacaagtacggcaagccggacaagattcggatcgaaatcgcgcgcgacatgaaaaaaccacggcaggagcgcatgaaaatcagccgaaaaatgcgggacaacgaaaaatcccggcaaaaggcggccaagcgcatttttgaggaaataggcgtgcagaatccctcccgcgacgatatcgaaaaggttctgctggccgaggaatgcgaatggcgatgcccctataccggcaagacaatcagcatgcgcaccctgttgggcgatgcgccgcaattcgatgttgaacacatcatcccgttcagccggtgcttggacaattccttcaacaacaagacgctctgctaccacgaggagaaccggagcgtcaaacgcaatcgcacaccgcacgaggcctatggcggcgatcccgcacgctatcaggagatcctcgatcgtgtcgctaaattcaagggtgaaggccgcgatgccaaactccgccgcttccagatggcggacctcgaggatttcgaggatttttccacccgcatgctcaacgacacccgctacgcctcgacgctggccgcgaaatatctcggactgctctacggcgccgagtaccgaaaacacatccaagtcagcaccggcgtcatcaccaagtacctgcgcgactgctgggggctcaacaaggtcctcggcgacggcggcgagaagaaccgcgaagatcaccgccaccacgccgtggacgccgtcgccatcgcgctgaccagcccgaaaaccgtcaagatgctcagcgacgccgccaagcacgccaccgaggaacgccgccgccagttcggaaaggtcccgcctccgtgggaccgtttccttcaggacattcaggaagccgccggtcaaatcgtcgtttcgcaccgcgtcgcacgcaaagtcaacggccgcatgcacgaggatacattctacagcccgcaaccctcttccgatccggccaaaccgtgcgtccatgtccgtaaacgcgtcgaggcactgtccaagggagaaatcgaggccatcgttgatcccatcgtgcggcgacaggtcaaacaacggctcgacgaactggacagcgacgatcccaagaaggcattcgccacagccgaaaaacatcccttcatcgaaaccggcgatggacgccgcctgcccattcacaaggtccgcatccgcaagaatgccgccacattcaagatcggcaaagagcatcgggtgcgccatgtcaccaccgattccaatcatcatgtcgaaatcatcgaaacgacggacaagcgcggaaatgtgaagtgggagggatccgttgtaagccggtacgaagccatgcgacgactccaaaaccgcgaacctgtcatcaagcgtgatcacggcaacggaagaaagttcctcttttcgctggcgttgaatgaagtcgtgcagatgaaggacacggaaggcgttgtacggcaatacagggtagcaggtgtgtcacagttctcaaccggccaaatagtaattgatgtccgcgagcttagcgatgcgcgtcgtgcggttgatgttcctcgtgaaggacgtacccgttcgccggacacgctccgtaagtctgaatctatcaagttttgcgcaaccccccttggggagcttcgtcgggcgaatgattgagcggatcatagacttgagcacggatgccgtccggctgtccgtgaacatggagcggctgctgatcgagcggcacaattccgattcgatcacgatgtccgccgagccggttacggttccgctagacgaggtggcggccgtcgtggcgtcgcaccggcaggtcgtcttcacgcagcctgcgctagcggggattgccgcgcatggcggggcggtcgtcgtgtgcgacggcaagatgatgccggtcggcatgatgctgcccatcgaacagcatcatctccaggccgaacggttcgtcaagcaagccgaagcggcgcttcccgtcaagaaacagatctggcgtcagattgtccaggcgaaaatcgccgcgcaggggcgcacgctcctcgacttccgcaagagcgatttcggatttttcgagatggccaaacgcgtcaagtcgggcgacacggacaatatcgaagcccacgccgcgcggcgctactggccgctgttgttcgacgatccggcattcaagcgcgaacgggaagcgccggaccagaaccgctttctcaactatggctacacggtcctgcgcgcgatggttgcccgcgcgatttgcgccaccggcctccacccatcccttggcgtccatcatcacaaccgctacgacgcgttttgtctcgccgacgaccttatggaacccttccggcccgtcgtggaccgcgccgtcgtccatatcgtctattcgcgcggcaaggaagcgcccatggacaaggaaaccaaggccgcactaatcggcgcggtgaccgggcgctatcggctcgatggtgagtctcgcaccctgttcgatattctttcccgcaccgccgcgtcgctggcgaaaatctttaccggcgaaggcaaggaactcgccttgccggtgatttaggtgattcaccacgaaggacacgaaggacacgaagaagaagtcggagttgatagacaaagttgaacattgtgcggtaggatttttttgctgcaagaggaccgcgcatgcacgaattgccggatgcgcggaagacatggaaatgaaagcaatttcgtgggccgagccgtcgtcttgattggtttcttgttccttctcttccggttcgtcttcgtgcttttcgtgttcttcgtggtgaagataccaatcaaccgaaacaaggagatgacaccatggaattcgatgccctgagcaatcgggtcatcggctgcgccatcgaggcacaccgcgaactcggtcccggcctgctcgaatccacctatgaaaaatgtctcgcatatgaactgtccacgcatggcatgaccgtggccacgcaggtcgaattgcccgtacgctacaagggggtcctcctcgattgcggctatcgcatagacgtgctggttgatgaccagatcatcatcgaagtcaagtccgtggacaaagtgattccgattcacgaggcccaattgctgacctatctcaagctcgcaaagaagcgcatcggactgctcatgaatttcaacacggtccgattgaaagacggtatccgccgatttgtaatgtgaagattcaccacgaagagcacgaagggcacgaagaaagaaagagaatgccgggtggtaaatggataacaatagggttggtggtgttttgtggttgaaaaagtcggttgtgtgtgtctgaaacttgaaaaatacaatgaatatgcacactctaatttatctggacctcctaccgcctgccgatagattgtttttctgtccttcttcgtgtttttcgttttcttcgtggtgaggataccaatcaactgaaacaaggagatgacatcatggaattcgatttgtgctgtgaagattcaccacgaagagcacgaagagcacgaagaaagaaaaagaatgccgggtggtaaatggataacaatagggttggtggtgttttgtggttgaaaaagtcggttgtgtgtgtctgaaacttgaaaaatacaatgaatatgcacactctaatttatctggacctcct

SEQ ID NO: 511 - DNA, 130839 bp, Artificial Sequence
  Synthetic Oligonucleotide
tgatgagcaagggcgggtgctattgccggcctattgggcagatgaaggcacttacaaaaatggtgagcaacccggtgatttgcccggcacgattgtgacgtcgctgactggtcctccgttgacggttcatgaagcgcgctttttgtacgaccctgaaagccgatgcttgagtcctgtcaccaatccgaaccgaagcacagagccgcagcttagcccgttggattttgggtcgggctttttcttgaagggtgccgcgttgaaggcggggatggtggcaggcgtccaagctgtcggcaaaggggcctttatctcatcggcccaccaaagagttcgcacccttgcagaagggtgtggtaagaagcaaagtgcaggtggagcatacattttaaggccattcgatgtgggacaattcaacgttctacagcaggcatcaaaagtgggggatgacctagctattcatcatgttgggcagaagcacgcgatgcagcaaatcatctcaggttataatcctaatacagcacccgcgattgcggttccgactgctcagcatcgagcaattcctaaccttgtaggaccatacaacggcaatgctcgccaacttctcgcacgggatgtgaagaatttaaaaaaatacacagatgtccccattgccaaccttcgcgaattaatagaactcaacaaacagatgtatcccaacgcttttaaaaaacgatgaacactaaagaatatgtggatgctgttagaacggtggtttacattgccgctgtgcaaggaatattaacggtgttaaaacaaccaccgggaagatgtcctgacccggacatgcttaagcttagcgactggtataaccagttgaggccacaggatcgcgacaatgtggctcgaattgcggatatggcagctaagcaagcgacgtataattatttattgactttggatggtttgttggctgtcgaaccagagggggagaaaggaaaacttgagttgttctacaacgatgggaaaagaagcacgcgactcaatgatgatgagggttaccaactgagttatttattcaagaaaactgaatcttgtgaaaaataagctaacctatgaatgtgggaatgaaccgccgattaagttttcaatattagatctccaaaaaggcattgctgaggcgccgctggccatacgtgcggcgcggggcgtgccgcggcagaagctcatttaccagtacgactgggtcggtcggcgggtgagcaaggtggtgtcgaactggaccggttcggcccgggcactgccagcaacgaagtcagacgtcaaggaaaggagattatttatttaatgcggcgttccatggccgcgattttgttggaaatccagcggtttttgtccgtcaccgcctggtacatcgcgagggcctctttgtaacgcgagatttgttcaaattcctgggccaatacaacacgagcttgattggcctccttatcatcccgggcttgtttcaaattttcgcgcaacaagggaatgatgcgctccggttcattggcgttgcggtaggcggcaatgcaggactgcaccaacgcatcgggggtgaaaggcggcttgcggttgggttcgttggccatgtgccggttgggcagcacataggcctcaccaatgcgggccgccagccaataattttcaacaaggttgggagtgctgcaaagaacgccggtctgcacggccatttgcaggcctatccgttgttggttggtatccgcgcgcgacagcaaatcctccaccaccgtcagcatctcgcccacgatgacgtacatctcgcggtaagttttcgcaacattcaggcgttgccggaattgcgcggtcaaatcagtctgttgggcagccagcaagttcttctgcgcttgcaaatccctgcgcaatgcagcacgggcggtgacctggtcctggaatttcttatccatctcggccacgcttttttgccgttcagccaaagcgttgcgaagtgtctccacatcggccggaaggttcaggccttgcaaccgcgcatccaaatctttccgggccgtgtccaaatcactcatgagccgttgaatgtttgcctccaacgtccccacggtgttgatgcgttgttgcagccagcgcatggtgcggtaggcggtggccaccggagccatgtttttatcaaattccgcctgcttttcggccaactgctcctgcaacggcttgagctcgccgtctatcgtgtccagattcgtttggatttgcgctatgcgattgctggcggcggtcaaatcgtccggggtgaggactacttcattggtgccctgcatgcgcttgccgtccttgatttcctgctgcaactgggccatctcccgttgcagaggcgcgcgggcgcgcgtgcgctcatccacctgattttgcaactggttgatggtgtcccggagcggttgcaaaggttgcagaaccgggtccaccacagcagccaggttcgtcaactccgtccgcatggcctgcatgttggtgagtgtggcttccggcaaattggtcaacgctgccggcacttgacgcagcgtcagctccaaatcgcgaagacgattggtaagtatgttctggcggcggctgacctcggacaacgtgttgagtgcgcgatttattgactgtatttccgcccgcaaccggttggcattggtttcataatcggccaggtttttatccagctccgccaaccgtgcttctagcttcgccacgtcctccgacaaattgagtttgaatgtggtttcaaatttggactggccggtttgttgcttgaggtagcggtgaatttggtagcgggcataccacggtctgggcatgccgtgcaaaacatcatgaacccaccacgccaccccgccccccaacaacaagagtaacccaaagattacccatcccttccacgggaccttgcgttgttttgtttgttgttgcgccataactttaactgcattaacgcggcttttccaccatcaagcccggcaaactctgcaaatccgtccaattgggacccgcagcaggtgccattaattttggacgcatcttcccccgccgagattcaattgttgtggcggcttttttggaaaagtttgatggacaggagggaagtctttggattagataccttcatgcaagacttccagcctttatttgaagccattatcaacggccaagcacccgaggccaaggcactcactcaaaaactgattgaggccaatgccaatcaggaagccctggtcaaggattgcatcatcccagccatggccgaggtgggtcgccggtttgaatgtaatgaatactttgtgcccgaactgctcctcgccaaccgcgccatgaaggagtgcatgaaactcctctccagcagcggtcccaaattgggccgtgtggtcattggcaccgtcaagggtgacctccacgacatcggcaaaaacctggtggccgccatgctcgaaggcggaggcttcgaagtggtggacctgggcgtaaacgtcgccccggagaagttcattgaagcggtcaaaaccaaaaacgccaacatcgtcgccatgtccgccctgctcaccaccaccatgaccgccatgcaggccaccattgacgccttcaaacaagccggcttgcgcgatcaggtcaaattcctcattggcggcgcgcccatcacccaaaaatacgccgatgaaatcggcgccgatggatacagcgacaacgccgttggagccgtggccctggccaaacaagtcatgggctgctaatccttgaacgatatccaattccacgcatgcaccccaccctcgctgcgctgctctccgggcatgtcgtactgacggatggcgcttggggcacccaactccaagcccgcggtctggccgtgggggactttcctgatgcctggaacttgacgcatcccgatgccgtgcgcgaagtggccgaagcctacatcgccgccggcagtcaaatcatcctcaccaacacctttggcgccaaccgcctccggctcgccgataatgggctggctgaccaaacggcactcatcaatcgccgcggtgtcgaattatcccgccaagccgctggcaaccaggccaaggtcttcgcctccatcggtcccacaggcaaactcctcatgagcggcgaagtcaccgaagatgacttgcgcactgcgtttaatgaacaagcccaagctttggccgaggccggcgctgatgcaatcgtcatcgagacgatggccgatttaacggaagccaccctggctgtccaggccgccaaagccaccggccttccggtggtggcctgcatggtttttgactccggaaaaaacaaggaccgcacccttatgggggtgactcctgaacaagccgccacggcccttggcgaggctggcgctgatgtcgtgggagccaattgcggtcaaggtatcgccggcttcatccccatctgtcggcgaatgcgcaccgccaccgaacgccccctgtggatgaaacccaacgccggtctcccggagcttgaaggcggacgcacggtgtaccgaaccaaaccggaggaattcgccacccacgcccaagatttgattcaagctggcgcctcgttcattggcggatgttgtggcaccagcccggcattcatccaagccctgcggcaagcccttgcttcatccccggcctgagttgtctgcaggccgggtccatgttaaattggccttaaacatgcgtcgggttctaattgtagatgaccacgttttgacccgcatgggaatggttcatttcgtgcggcattgcttcggtaatttggaaatcgaagaagccgacaccgcccaggccgccctcaccctcgcccgcgaaaaggaattccatttaatcgtcctcgacattgacctccccgatcgcagcggtctcgatattctgcccgacttgcgccgcgcctgccccaaaacagcggtcttatttgtcacaggcctggttcaagaagacgtagctcttcatggcttgaaaaacggcgcctgcggttttgtggaaaaaggcagttcacccgatgagatcaaacgcgctctgaccgcggctttcaacggccagcgctatatcagcagcggcatgcgcgagcgcctggccttccatgccatcgagccggaggacaactcgcccctcgataaattgagcgaacgcgaattccaagtgctgcgccaattgggccagggccacaccctgaccgaaattggccaaaacctctctctaagcgtgaaaaccatcagcacctaccgccagcgcctgttggaaaaactcggcctccgcaccaccgcagacctggtccgttacgccgtgcaaaaaggattggtcaaatgaaatggcttcccgcacgcgcaggcggtgtcttttgggggctcctcatcgcctacccccttgctgcccaaaccggccccaaacccctggccaacccgccagcctcagaccccgcagccaccaatgccgtttttcaacgcattgatgaaaaccgctttcaagtcggaaaagtcatcctggataaaaacgcaaaaacagtctccttccccgccgtcgtgaacatgcacgaaggcttggtggaatacttttgtgtgggcgttcagggcaaggtgcatgaaagtgtcctccgcaccgaggtggaaccctttcacgttcatgtggcgatgctcctcctcggcgccaaaggggcccccgcgcaggcgctcaaagaagactaccgccaacccgtcccgggcgatcctatcaccttgaccgtttcatgggacgacaagggccaacaacgccaactccgcgccgaagaacttgtgtgggacgtggccaaccaacgcgccatgtctcgtgggccttggacttacagcgggtcacgcgtcttcgacggcacctttctagcgcaaagggaccgctccatcgttgccatcatcggagacattgatgctttggttaacaatccacgcccacgccgcgaacgcgacgacaattggctcgtcaacaccaacacctgtccgccggtgggcacggccgtgaacgtcaccttccaactgtctgcgcccacaaccactccccaagaaaagccagcccagtaaaacgacagcccagccccgatctttttacctttaccggttggcggggttctttacgtgtggtacgctttctccatgaatagcggcggattacatacgttgtttgcttcacttgccggcatcatctgcattttcggggccgccccctgcccgctacaggctgccgatgaatccttcaaaaatgaggttcaaatggccattgaccggggactggcttggctccgtgccgagcaaaagacaaatggcttctggtcaacgccggatttgcccgccctcaccgccatgagcgtgctctgtttcaagggtgacccggcgggcaaatataaccagcccgagcccgaatttttgcaacgcggctacaagtttctcctggaacaagtcaaaccggacggcggcatttatcagaccaattacgccacttacaacaccgccatcagcatgctggcgctgcttcaagccaaccgccccgaatatgaaccggtcatccacaaagcccggcgctttttggtgggccagcaaaatgatttgggtgaacccggcaaaatagatacaccgtttgatggaggcatcggttacgggagccgttaccgccacagcgatatgggcaacaccctctacgccttggaagccatctactacagccgccacctcgtgcgcgacagcggcggcaaagaacccgatttgaattacgaggcggcgattgcctttttacagaattgccaaaaccttcccaccgtcaaccgccagccttgggtttccgaggatcccaaagacctcggcggctttgtctattacccgggtcacagcatggccggcggtgtcaccaactcgcaaaccggcaaggtatcccttcgttcctacggcagcatcagttacgccggcatgctcagttacctttacgcccaactttccaaagaagacccccgcgtcaaagccgtcttccgttggttgcaggaaaattacactttggaggaaaatccgggaatgggtcctgagggactctttttctattaccacaccatggccaaagcgctgacggtggcggaggtgaacaccctgactttgaaagacggacgcatggtgccgtgggccagaatgctcgccatgcgcctgctcaacatgcaacaacgcgatggctcatgggtgaaccaaaacaaccgctggatggagcgggaccccgtcctggtcacttgctatgccttgatggcgctggaaatgatccaccccaagctttgattcacccgcggcaggcaacctggggctctgcagttaatctttgatcaagtcctggccctgcgcatccttcatcttgccggtggcaatcatgatgatgtccaccacataccagatgaaaaagccaccgcaggtgatgagcttcaagatgcccaagccggtgtaacccagataaaagcggtccacccccaagccacccacgaagatggacaacaagagagccaccaaccatttcttaccgccggttgttcccgccgaaggcgccgattgaggaggggttgcttcgccgttgctcataacactttgggcttaggttgagggtgttgtttgggacatttccatgcctggcccaagccaagcattgcctgaatgttggctacaatgagctccccgtcaactaaaaacccaaaccccgccacatccccttggtcagagggagatgatgaacaaggtgcttgcggtggcagttcagccgttgaactgcctcaatgcaaccgtggcattgtggccgccgaagccgaaggagttgttcagaatggcccgaatacgcatctctctggcggtgttgggcacgtagtccaaatcacactccggatcgggtttttccaggttgatggttggaggcgacacttggttttgcatcgccaaaatactgatgaccaactcggcggcaccagcagcacccagcatgtggccggtagcccctttggttgagttgaccgcaatcttccgagcatgttcaccgaaaaccgttttaatagcctgagtttcggcgacatctcctgccggggtggccgtcccgtgagcgttaatataatcaatatcctccggccgcaatccagccgagcgcagcgccatggccatgcaacgggcggccccttccccgccgggggcgggtgcggtcaagtggttggcgtcggctgtgttgccatatcccaccacctcggcatagatttttgcgccgcgcgccttggcgtgctccaattcctccatcaacaccaccgcagcgccctcgcccatcacaaaaccatcgcgctccgcgtcaaagggccgggaagccttcttgggctcgtggttgcgcgtgctcatggcgcgcatggagcaaaagccgctgatgcccagcgggacgatggtggcctcgctgccgccggcaaaaatcgccttggcatcgcccatcttgatggtccgccaagcctcgccaacggcatgggtggaagtggcgcaagccgagcaggtggccacgttggggccccgcagcttgtagtacatcgagaacatgccggaagccatgttcaagatgagcatgggaatcatgaacggggacacgcgccccggcccgcgggagagaaggaccttgtgctgctcggcggtggtgtgcagacccccaatacccgatccaatgaacacgccgatctcatcgcggttcaccttttccaaatccaacccggaatctttcagcgcctgccagccggcataaacgccaaactgcgcaaaacgatccgagcgcttggcctccttcggcgaaggaaaggcgggcgatgcatcgaagttcttcacctcggcggcaatctggcaatcaaactcggccgggtcaaaggcagtgattcggtcaatgccacactgcccggcaatcaagttttgccaaagcgtttgcggatcatgccccaacggggtgaccacgcccatgcctgtgatgacgacgcgtcggtcggaccaactgcttgccataaataaaaagggcagccagggcgattcctgccagccagagctgccccaaagattcccggcaggtattgttacttcttgatgtcttcgatgtacttgaccacgtccccaacggtttgcagtttttcagcttcttcgtcagggatttcgctgccaaattcctcctccaaagccatcaccaactcgacaatgtcgagggagtcggctcccaaatcgtccacgattttggcgtcgttcgtcacttcgtcaggattcacgcccaactgctcgacgatgatttccttgacccgtgtctctataggtttgtctgccatcggttttctccgttcgttgttaaatgtcttttgtctgtatgccagccgcgcccaaaccgtcaagcctgcattttgctttttccggcgcgctggtctgcgctgggttgctttcgccatcccggcgcatccatcactttgccggcgacttgtctaatggggggcggccattctgtccagcggtattttgtgaaaaatttacatcgccaaaccaccatccacggccaacacctggccggtgatgtaccgcgcaccggggctggcgaaaaacagcaccgcctccgccacatcctccggctgcccaagcgtccccagcggcacgtttttgaggatcgcctctttttgctcgggagtgagtttgtcggtcatggccgtctgaataaagcccggcgccaatgcattcaccgtaatacctcgactcgcaaactcgcgcgctgcggatttggtaaagccaatcacccccgccttgcttgccccgtaattgcattgccccgcattgcccatcaggccgatgaccgaggcaatgttgacgatgcggccggagcgttgcttcagaaaactccggcaaaacgcctgggtaaataaaaaggtgcccttgagattgatgtccaacaccgcatcccattcctcctcgctcatgcgcatgagcagggtgtcgcgggtgatgccggcgttgttcaccaaaatgtccaccttgcctgcatcggcgaggatttgttcggcggcagctttgacttcggctgctgaagcgacattggcggcatatccccatgcccgtctccccaaggccttgaccttgtccaccgtttcctgtgtgaattcaagtttgacatccaccacggccacatcggccccggccccggctaatttcaaggcaatggcctggccgatgccgcgtccggctccggtcaccactgccacctggttttccaagagttgcatagcgcccaacatcaagcctcaagccgcctcaaggcacaagcggaaagttgcctcccctacccccctggcccgactcttaaatttttttgaacatccctgcatttttgtttatcaaataccttgaaaggtcagcccgtgttccccctgggggatggaacattatgaccgcgccaagatattcataaaccggttgattcccaccatgcgcacccattccattcattggccacgcccctggggcgtgggacgtttgctcaccatggccgttgcggcgtgtttcctcgcaggagcactcagcctgccactgaccgctcaggaaggtcttttccaggcagaacgcgcgttggaaaacaaacgcaatgcggacccgaattggaagccgaaatacaaggaattcgatcttatcagagtgcccaccaaaaaaggggtcataaataatttttgcctgaattcagacggaaatctggtcgtctgcgtcggcacaagtgacgatggcaccaccaaaggcaacaccgagctggaaatcatcagcccatccggcaaagtcctcaaaacaatccctttacccttcaatccccaagccatttgcaccgacggcaaggacgccatctacgtgggagggggcggacagctttgcaaactcaattccaaaggaaaaattgaaattcagatgccggcacccgccttccagctcgccaagaaagaacaagagacctggaaagttaaacttgccgaggaaatcgaaagacaaagcaaggaactcaaggaagccaatccaggcatgaaggacgccgatattaaaaaaattatggctgaccagcaaaaagccatggaaaaacgacgtggaaacgtgacgggattggcagtggtgggcaaggatttgatggtggccacaccctccccggcggaattcggctacatggtctggcgggtggatgaaaaattggccaatccagtgccagtactgaagcggctcagtggttgttgcggacaaatggacattcgcgggcgcgacggcaaattgtgggtggcccacaacgccaagcatctggtggaatgttacgactcccaaggcaatttgctctccaaatttggaaagcatgacagggtagccgccgatggttttggcggctgctgcgagcccaaaaacctcacctttgcctccaacggtgacattctggccgctgaatccggaccgccggttgtggtcaagcgtttcaccccggaaggcaagtttttgggagtgcttgccaacccgctctataaaagtggttgcgtgcgggcaacggtggccatcagcgccgatgagaaaaagatattcctgctgaatacgggctacaacgcgattcacatctttaccctctgagcgccccatccccaagtcccacgccatgaaaccttggaaggtctttctaacatgggccgccgccttgttgcagctcggcctcctgcaaggggctgaatcccctccgccacccaaattgttgtcgcttttaatcatggacccgctggccaaagaaaatggctgcgcttgtgtggccggcatgggtcaacgtgattacgaggccttggggcgccatctttccaaggccctgaaaatacaagtggatgtgcgatttgccctaaacttctcccaagccgtcggcgcaggattgaggcgtgggccagacatcgtcattggcaaggattcccaagttgaggccgacctccggtcttggaattggcctatgacccgcatggctcgattgaccgacttgcaggggcgaacaaccctgacaggattgttcgttgttcctgcaaccgacacggcacgcaatcttcgggacttgaatgagcgtccttttttgttggggaaaccggatgaaaccgaaaaacacggcgccgccatggcagccctgcgcgcggcaggcgtggaacccggacatgtactgaaggtcttgcccgactgcacagccaccgccaacgaacttttgtcccatcaagatacccctgcaccggcaggcgtgatctccagttatgcactgccgcttttggagggctgcggcaacattcccccaaaatccctgcgggtggtggggcgaaccgcaccagtcccctttatcaccgtgtttgtgtaccgggatttggacaaggccctggtcgagggcattcgcaaagcattgatggaggtggctcaaaaccggactttatgccggcttttggaatctcgcgatggttttgttccttttgaagacccgcaacaggcgctcaaggactggccaggatggggcggcgcaatgcgctgggggcagacgagtcggctgccgaaccgtctgccccaacccctgccggtatcgtgggagcgtcccctgaatcaccccggactgggaggggtggcagccgccaaaggctatgtggtggtgagtgaccgtgaccccttggataaggctgacctctggcgctgttatgaagccgcctcaggcaagttgctctggacccttcaacagcccactcggggaccccacatggattacggcaattctccacgttccaccccgctcatcgttcaagggcgggtgtttatgctgggagcatacggcgacctgttggccgcggacttggccaccggcaaaatcctctggaaacgccacctcgtcaaagacttcaagggacgtttgccaaagtggggctttgccaactcccccctgttttttgaaaaccggttgtgggttttgccgggcggcgagaagcacttcattgcggccttggaccctgccaccgggaagacgatatgcaccggcccgggcacagccccgcctgcctacgcggccttgatggccggggaatgggatggccaaagcatggtcatcgcctacgacgaaaatggattgggcggatggagcgctcaaaccgccaaacccttgtggcgggtgacggcggctgaagagggtgatttcaatgtgcccacacccatgttcatggccgatggtctgctgctggcgacggaaaacaacggttgccgtctgcatcgttttgacggacgcggggcgctccttccggagcccgtggccgcccacaaggagttgcgccctcaaacagctacaccacttgtgatcggaaacttcgttttatgtaacggcagcgggctcatctgccttaaattcgattttagaaaacagcaattgcttgaactgtggaaaaaggaggatgacgcttgggccgaacatgtgtcctgtatgaccgatggcacactggctttgattttggggtatcacggcgatttgttgctgttggatgtgacttcggaggactacaaagaactttcccgcctgcgtttgtttgaagatgagcaggagatttacgcccatccggcgttggcggatggcaagtatttcgtacgcggggccaatgttttaagatgctacgagctgattcgctgacggctcacgtcgtaagagtcggcggggagccggcttgaaggattcgctccgcggcctgccttacggcggcagccaattccggcggttccaccacacggcaatgcccgccccaactcaacacccaacgctgaacctccgagagacctgagaggcggaatgtcacctccacgcccccatcgggcaaatcgcgcaattgctggctttcgtgccatttcttttcgcgaaggtagtctgcagcgaccggcgtaaaatgtagtaccacacggtaatcgcctgtcccctgcacgacgccaaagctgccgcgcagccagttttcaatcgaaaacttttttgggcgggtgaacgtttgtcctgtgggcacggcagactggatgcgcatggggacaaacgttcgaggggcctgccgcaggtggtcgtaagcgaagaggtaccattcgccgttgatattggccaggtgataagggtccacaacccgctcctccaccggcccgcctcccggtttgcggtattggatacgaagttgacggcgatgacttaccgcatcggccagacagcgaaaaatgtccaaatcaagcatcggttccgcacgggtgcggaaggaaatgctttgctgcaggtcctgaagggcaaccgtgatggtctcaggcagtcccgcagcgattttctcaatcgcggccagaaggggtttttcaaagggggtcccccgatattgcccaagggccttttccgcaagcaccaaagcaaacaactccccctcactgatgcttacggcgggcaaatccgtaacgggggctgtgtagtaataaccgttgcggcggggatcgaactcaagcggtaactccaaccggtcccgcatgaattccaaatcacggtgaatcgtcttggggttgacctcaagctccgcagccaactgacgtgcattggggtaacgcccgcgggcaatttcatgatgaatgcggcgaacccgatccaatggcgggcgggaatgttgcaccggccgggcggatgctttggctggggtgcgcttgcccatgaacgcagggcggccaatcttccgggatttcagccgcggtccagtttggccagcaactcgtcgttggttttgtgctttttgcaagcggcgatgagcgtctccatcgcctccacagggttgaggtccaccatcatgcgccgcaacttgcgcaccgactcaatttgatgcttcgggaagagtttttcctctttgcgtgtgccgctgcggggaatgtcaatggccgggaacagacggcggtcgctgagcttgcgatccagcacgagctccatgttgccggtgcctttgaattcctggaaaatcaactcgtccatccggctgccggtttccaccagcgccgtcgcaataatcgtcaaggaaccgccttcttcaattttacgcgccgcggcaaacatcttgcgcgggatttccagagcgcgtgcatctacaccaccagtcatggtgcggccggacccgccgtgcacgctgttgtaagcgcgtgccacgcgggtgatggaatcgagcagcacaaacacatcctttttcgcctccaccatgcggcggcagcgctcaatcatgaatcgcgaaagccgcacatgggtttccaaatcctggtcgttgctggaggccaccacctcggccttgaccgagcgttggaaatcggtgacttcctcggggcgctcgtcaatcaacagcaccaacacatgcacttccggatggttggtggtgatggcgttggcgatttgtttcagaatggtggtcttgccggtgcgcggcggggccacaatcaagccgcgggtccctttgccgatgggcgtgaccaaatctatgatgcgcgtttcaatcaagtcgggcgtggtctcgagcttgaacttctccaccgggtcaatggtggtcaagttctcaaagcgcaaggtcttgacgtattcctgaaaaggcatgccattgaccttgtccacagcgcgcagttgcgggctggtgccgcggtgcggcggttggagggtcccctccacaaaggctccctcccgaagaaaactgcgcttgatgctgtccggcgtgacgaaaatgtccgtcggcttgggcgcaaaaaagttgtctggagaccgcaggaaaccaaatcccttctccgatatttccaaataccctgaaccgtagtcaggatagtgggccgaattggcatgtgaacccataaggatattactaactatctagctttgtgttgtgtcatcaggccattgaacttccagaaacaaccccgaaatgttttgaattttgaactttcgggaaagccgctgcactccaatgaacaatctaactgttgctgtgctgacgcggccgcgcctgtgacgtgataaatgtaatgtatttcaagctctgcgcaacaaatatttttgtaagattttttcccatgaaacgccttgaggaggccaaatatggcaaaaaagcacaaaatgcccgacttctaaacgtctgcctctcaagaccttgcggcggtcaaaagaagaaaaccgcctgtccgaaaacgctttccgccagattaaaagtcggcgttcttgggagtacgcgcaaacggaatgacgtcgcggatgttggccacaccggttaaaaacataatcaaccgctcaaagcccaacccaaatcctgcgtgtgggacagttccgtatttgcgcaaatccgcataccaccaatagtcctgggggttgagtttatggaaggccatctgttcctgcaaccggtcaggacgctcctcgcgctgggcgccaccaataacctccccaatgcccggcaccagcacgtccatggccgtgacagtgcggccatcgtcattcaggcgcatgtagaacggcttgatctcccgcggatagttgaagaccgtcaccgggcatttgaagtgttcctcggtcaaataccgctcatgctccgattgcaggttgacgccataagaaaccggaaactcaaacgccttgccagacgcctgcagaatttgaatggcctcagaatacggaatacgctgaaaggggcgctccaccacaaactgcaatcgggacatgacttctttgtccacgaatttattgaagaaagccaaatcttcggcgcaatgttcgagcatgtgtcgcgccatggctttgatgaattcctccgctaaatccatgtcccctgccaaatcacaaaaggccatttccggctcaatcatccaaaattccgccgcgtgccgggcggtgttggaattttcggcacgaaaagtggggccgaaggtgtaaatgcgcgaaagcgcgcaggccagagcttcgccttccagttgcccgctgacggtgagataggccggccgcccaaagaaatcgtcctcgggtttttctccgggctgccctttgagcgtggtcacgcgaaacatttcgcctgccccttcacaatcgcttgtggtgatgatgggcgtgtggacataaacaaagtcgcgctcttggaagaattggtgaactgcatgcgccagccggctgcgggtgcggaacaccgcgccaaacaaattcgaacgcggccgcaagtgggcaatggtgcgcaaaaactcaagggtgtggcccttcttttggaggggatacgtggcatcagccgggccgatgagctccacccgccgcgcgtgaacttcccatttttgtccggctgccggtgatggcaccaaggccccttggatgaccaccgaggcgccggtgaggatgtgggtgatcggggcgttgcacggggtgccctcattaacgaccacctgcaggttggacaaacaggaaccgtcgttgatttcaaaaaatgaaaagcccttggcatcgcgccgtgtgcgcacccagccccggacggtgacgtcttcaaccggggcgccggactgaagcaaatgtttaatcatcggttgcatgcgccaaagcataaacgaggcaaagtgttgcggacaaaagaaaagtggtgttgcgaaaaagcaacagcttcatcagggcaacaaaaaacccgcgccgaagtccggcgcgggtgtcgtgtgaacttttgtgcggcccgcccgcctcaagaggcggctccagcggtggcctgcggggcggcagccttttcctcggtggccttgggggcctccggttgagcagcaggcagctccacccattcgaggatggcttgttgagctgcgtcaccacggcgttggccgagcttgacgatgcgggtataaccgccgggccggcttttttgagccggtgcaatttggttaaagaggattttgacagcgtcctcctgatggaggcgtgcagcagccaggcggcgggcatggatggtgccgcgcttgccaagggtgaccatcttctcagcgaggctgcgcgcggcgcgcgccttggcgagggtggtgatcacacgtttgtgaaggatcaggctgcaaaccaagttggccagcatggcattgcgatgctggaactggcggccgagcttggcagttcgttttaaatggcgcataaggcatcagtcgttggcaaggaggttcttgatgtcgtcgcgggccgaagaggcgccggcggcaggggcggcttcaatcaagtccgggtcaaagtgcatgcccagagtcaggcccaaagccgcgagcttgtccttgatttcgttcagggacttcttgccgaaattgcggtatttcaacatttcggattcggtcttcatggccaactggcccacggtggtgatgttggcgttgttgaggcagttggcggcgcgcacgctcagctcgatttcattgacgctcatgttgagcagtttcttgagcttggcgcgctcatcatcctgccggtccacctgttcttcaaactccacggcgttcttgtcgtagccgacaaaaacatccagatgccgctggagaatggctgaagcctgggtgagggcgtcatcgggggagatgcgtccatcagtccagatttcaagaatcaagcggtcgtagtcggtgcgttggccgacgcgggccgcttcgacggcgtacttcacccgtgtaaccggcgaaaagattgagtcaatggggatgaccccgatggcctggtcaggtttcttgttttcgtcgcccgggcagaaaccacggccgaccttgacgaccagttccatctcaaatttgcgcttcttgtcgagggtgcagattttctgcttgggattcaccagctcaaggttttggttgagctggatgtcctcggccagaacgtccccttccttgttgacggagaggtagagcacctgttcctcacggctgtgagccttgaagcggattttcttgaggttcaggacgatgtcggtcacatcctcgacaactccttcaacggtggcaaattcgtgcatggcaccctcaatgcgcacgctggtgatggcagctccctccagggacgagagcagcacccggcgcagcgagttgccgatggtgtggccgtaaccggtttcaaacggctcggcaatgaatttggcgtaggtttcggtggcggtggcttcttctttcaccaaccgcttgggcatttcgaaacggcctagacgcactggcatagttttttcctttccggcaaatttaacctggcagcatccggagtcttattcccgcaatccggacgcgcccgtatatttgccctgcccccgctaaggggcgagttatggtttagcgggaataaaattcgacaacagcctgttcattcgcgatgggctgaatttcatcccgtgtggggatgcgcaccacgcggcccttgaattggtccttttcgagcaccaaccaatcaggcaccgcccggctggtggacatttccaaattccgggtggccatctggcggctgacgttgtgattgcggacttcgatctcgtcgttgaccttcaaggtgtaagacggaatgttcactttgcgtccgttgacgcgaatgtgcccgtgggtcaccatctgccgggcagccggacgcgtgggcgcaaagcccaggtgataaaccacgttgtccagccgggtctccagcaattgcagcatttgctcgcccgtgacaccgcggcgtcgcagcgccttttcatagactccgcggaattggcgctcctgcaaaccatagtagtaacggagcttttgcttctcaatcagacccaaagcgtattcggtgaccttgcggcgcgctttgggaccgtgaacacccggaccgtattgacggcgctccaaatacttggaggggccgaagatgggcgttttgaaacgtcggctgatgcgaacgcgtggacctgtatagtgtgccatggacttcgagagttaaaaagggttgcggttagacacggcgcttcttgcgcggacggcatccattgtgcggaaccggtgtcacgtctttgatggcggtaatttccagaccaatggcctgcaaggcgcggatggccgcttcacggccggagcccggccccttgacgtggacttccacttctttcatgccgtgcgacatggcttgacgagcggcttcctgcgccacctgctgggcggcgaaggcagtgcttttgcgcgagcccttgaaacccacgcgcccggcggaagcccacccgatgacgttgccgtgcatgtcggtaatgctgacctgggtattgttgaaagtggccaggatgtgggcgatgccgctgacaatgttcttggcacccttggccttgatgattttcttggcggcaagatcatcgcccaacagctcggctgcagtaggggcggcggcggcagcgggcggcacttcggcagccggggcctccgcgggtttggcttcggcggcctttgcttcggcggctttaccttcagccgcggctttcttggacgccttggccggtttttcggcggccggagcagcagcgtccgctttggtttccttcggagcaggagcgggttttttggtctcgtcagacataggagttcaagctgttacaattaatggatgcccgccttggcgttcggattgcgcacgacaccgacggtcttgcgcgggcctttgcgggtgcgggcgttggtctgggtgcgttgtccgcgcacgggcaggttgcgcatgtggcggatgccgcggtaacacttgatggcctgaagccgctttaggttcagaccaatttcgcggcgcaggtcgccttcgatgacgtatttgccatcttggatggcatgaacaatctgcgaaagctgttgctcggaaaggtccttggcgcgggtgcccaaggggatgttggcgcggcggcaaatctccagcgccgtggtgggaccaatgccgtagatgtaacgaagggcgatttcaatgcgtttctcgccgggaatttcaacgccgatgatacgtgccataggtttttcggattaaaagtctagccttgccgctgcttgtggcgcgggttggtgcaaatgacgcgaatcacgcctttgcgtttgatgatcttgcaattctcgcacagttttttcactgatgcccgtattttcataacttcactccaaatgcaactgcactcaagcggccttggccggccccaccaaacgacctttgctcaggtccaggggcgacagctcggccaccacgcgttggccaacggcgaactgctcgccggccacggcccgccgggcaggcacaaaacccaggaactggtgtccattggccagttccacccggtagagccgctctttgagcaccgcaatcacgacgccctcagcgcgaaggatgtttgattcgtgcacgtcagaatttccggcgcgccttccgtcaccaggacggtgtgctcaaaatgggcggacagtgaaccatcctcggtcaccactgtccagccatcttttaatcgtttaacgccaggttttccggcgttgaccatcggctcgatggccagcgtcatgccgggccgcaacaacggcgaaacccggcctggctccacaaaattcggcacttggggctcttcgtgcatgtggcgtcccactccgtgcccaacaaattccctcaccacgctgaacccatgactttcgacatgctgctgaacagcacgcgaaatgtccttcacccggttgcccgcgacagcggctgcaatgccccgctgaagggccgtttcggtggcctccaagagccgcaatgccaccgggtcggtgcaaccgcccgccaccacggtccgagcgttgtcacccacaaacccatcataataaacccccacatcaatactgacaaggtccccgaaagctatccggcgcggcccggccagcccgtgaaccacctgctcattgatggagatgcaagtgtggcaggggtatttcaaatgccccacccgataccccaaaaaagcgctccgggcattgtaatgtttaattcgctccgctgcgtaatcgtccagctcgcgtgtagtcaccccgggcgccacagccgcggccacttcatccaaaacggcacgcgccacgcggcatgcagcccgcatggattccaaatcgcgtcctgttttgatgatgatcatgcccaaagtgcgatgccatccgcagtgcgccgcgctcagatgcgcccgcgcaggcggcctttcttcaagaacccgtcgtaatgccgcatcaagagatgggtctccatctggcgcatggtgtccagcaatacgcccaccgtgatgagcaaactggtgccgccaaaaaattgacccaccccgtagggcacattcatcaccttgtacaacaaatcaggaatgatggcaatgatggtcaggaaaaccgcgcccgccagagtaacccggctcatggcgtgatgcaaaaagtcgctggtcgcctgaccgggccgcacaccgggaatgtagccaccgtatttcttcaagtcatcggcaatctggatttcattgaattgggtggccacccaaaagtaggagaagaacatgatcatcattccgtagatgatgaagtatgcaggctccccgtggttgagcatggcgcccatggtacggaagatgcccttgagccccggccccacgccgggcaggttgcccaagctctccagaatcttctgcgggaacatcaggatcgcctgggcaaagatgatgggcatgacgcccgcataattcacacgcaacggcatgaaggaagtaccgccctgatagaccttgcgccctacggcccgctgggcgtattgcacagccactttgcgctgggcctgggtgatggcaatggtgccagccaccaccgcggcgagcatgatgagcaaaaacacaccgtggaagatggtgaatttctcggcaacagcacccccggcggaaaacatatcgaagagggaatgcattgcctgtggcacacgagccaaaatgccaatggtgatgatgagtgaaacaccattaccaatgccgcgctcgctgatttgctcacccagccacatcaaaagcagggtgccggtggtgagaatgaccgtggtttgtatgcggtaaaaccagcccggattctgcaccaattcctcagttatgccgggaaacatttcacgcggattttcccagacgtgggacataatcatgccccagccgaaacaaaggagcacggtcagataacgtccgtattgaataatcttgggacgcccgccttcctcccgggccagtttgctcaagcgcggaatgaccgcggtgagcaactgaatgatgatggtggcgctgatgtagggcatgatgcccaacgagccgatggcgcaacgctccatggcaccgccggtgaacatgttgtacatgcccatcaggccgccgccggcgctgttcttcgcagccaaatcctggaagtattgaaacagcaccgtgccatcgagtccggggatggggatgaccgccaccaaccggcacacagccagaatgaacagggtgaacaggatgcgggacttcagctccggaatcctgaaggcattggcgaaggtgttggcgattttggcgagcataacccctgattcccctcccgtcaggctttggctgcggcggctggtgtttcacacacaccgccaagagcctcaatcttggcccgggcggacgcactaaacgcatgcgccaccacggtcagtttcttcttgagttcaccatttcccaaaatcttgatgccgtcggcctttcccttggccaggccggcctggcgcaaaagggcttcatccacccgcgcgccgtcatcaaagcgattcaaggcctccaaattcaccggcaggtaacgggtggcaaagcgggcgttgttgaagccgcgctttggaatgcgccggatgagcggcatctggccgccttcaaaggtgggccggatggagcttccggaacgggccgtctggcctttgccaccgcggccgctggtcttgccatggccgctggattcgcccgcaccgaggcgtttacgacggtgcttggcgccgggtcggggtttcaaatcatgtaaacgcatacgctcgtttgagaaaaaatttcagacgtttagacggtagccgcagtttcagacgccgccggtgccggtgcagcttcggccggggtgcgcagcggcaggccgcggctccggtagatttgttcgcgcaaacgcaaccgcaacaaggcgttcagcgttgccttgaccacgttggcggcgttcttgctgcccagggacttggtcaggacatcacgcacaccggcggattccaatacggcacgcacggttttgcccgcgatgatgccggtacccggtgaggccgggcgcaatagaatgcgcgcgccatcgtattcggagaaaacttcatgcggaatggtggcgtccttcaagcagaccttgagcatgttgcgacgggcctgctcgccgcctttgcggatggcgtcggccacttcaccggccttgcccaagcccacgcccaccatgcccttgcggtcgcccaccaccacaagcgcggaaaagctgaagcggcggccacctttgaccaccttggcggagcggttgatgaacaccaccttctccatcaattcctcgccggtctggccttcggtaatttcagcagcctcggcgttttgacggccacgcccgcggcggccgcgcccgccaccgcgtgattcaccggcctcggcgccacgcacctcggcggcggcagggatctgctcctcagaaagagggtccaggttgtctttgttgggattttcagccacagtaacagctcctgttcaataggggttaaaatttcaagcccgcctcacgtgccgcatccgccaaggccttcactttgccatggtaacggttgccgccgcggtcgaagacaacggtggtaatgcccttcgccagggccacttcggcggcctttcgtccaataatggcggcagaagccacattcgccttcagggtgccgcgttggggcaggtctttcgcacgggtggaagccgacgccaaggtaactccgcggacgtcgtccacaaattgcacgtaaatgtgtttgcctgtaaaacagacgctcatgcggggccgctgcgcggtgccgctgattttcttgcgcacccgccagtgccggagggttgccagacgatgtttgacttcggttctcatgttgttcacgggccacggatttggccgtagccccattagttaaaaatggattactggacggtcttgccttccttgcggatgatgcgttcgcccacgtaacgaacccctttgcccttgtaaggctcgggcggataaaaggcgcgcaaatcagccgccacctgtcccaccttttggcggtcaggtccttccacagtgatgcgcgtgttttcttccacggtaaccttcacctggtcgggaagatcataattgatgggatgtgaatagcccaggttcaaagtaaccgttttgcccgcaacggaagccttgaaacccacgccatggatttccagtttcttgacaaagccttcggtgacaccgcgcaccatgttgttcaagatggcgcggctgaggccgtggagcgctttggcttgcgcatcttctccttcacgtttgacgaccaactggcctttttcaaccgccgcggcggtgcgctggggcagttcatactgcaacttgcccttgggtccctccaccaaaacggtgcggcccttgacgtccaccttgaccttgggcgggatgacgatgggttgtttgccaattcgagacataaacagcgagagttaaaggttaccacacataacagaggacctcgccgcccaggcggttcttgcgcgcctcggcgtcggtcatcagtccgcgcgaggtggaaaggacggcaatgcccaatccgccacggacgcgcggagcggaaacggcggtggtgtaaatgcggcggccgggcttgctcacccgttgcaatccttccaacacgggccggcggccttcgtatttgagatggagcttgatggtcttgaccgtctgaccggcaacggtgaaatcacgaatataaccttcgcgcttgaggatggccgccaggctttccttgagccgggaatacggcacttccacgtccggcagcccggcgtgggaggcgttgcggatgcgcgtcaacatgtcggcaatgggatcgctcataggacaaaattaccagctagctttggtgactcccggaatcaacccctgcagggccagttcccggaaggtgagacgggagcagttgaatttgcggaaatagccgtggcgccggccgctgatggggcagcggttgaccactcgcacgggactggaattgcggggaagcttggccagcccggcatagtcgtgcttggctttaagctcggcgcgcttggcggcgtatttcttgaccaacgccatgcgtttcttgttgcgttcggaccaggattttttggccatatcagttctaacaaaaaaggttaacggttttccgcaaaggggaagcccatgagcttgagcaaatcgtaggcttcctcattggtacgggcggtggtgacgatggtgatgtccatgccctgggtgcgcttgatcttgtccaaatccacttccggaaagatggtctgttcggcaatcccaagggagtagttgccccggccgtcaaacgagcgcggggaaagaccgcggaagtcgcggatgcgcggcagcgccgtggcaaccaggcggtcaaaaaactcgtacatgacctcgcggcgcagggtgacatggcagcccacgggatgcccgacgcgcagtttgaagttggcgatgctcttgcgggacttgctgatgaccggtttgcgtccggtaatcaaagcgaggtccttggcggcatcttcgacggcactcttctccaactgggcgctcacacccatgttgatgacgattttttcgaggcggggcacctcatgccggttcttgtactggcgcttggcaatgagggccggcaccacttcgttttcgtatttttcctgcaatctcggtttcatggctcggttggcggtgaaaaggatggcggcctggttcaagattcagcctgcgccgccggagctttgccggcgtgccgggcatcgtaccggtcggcccgcatcacattggagatgtgaatgggcccctcacgctcaatgatggcgccctgagggtgaagctggctgcggcctttcttgatggttttcttgagcatgcggacgccctcgacgagcacgcgttgcttggcgggctgcacctcgatgatgcgaccgcggcggcccttgtgggcgccgctgatgaccacgacttcgtcgccttttttaacgtgcaatttgggcataattcagactacctccggagccaggctgatgattttggtaaatttgaggtcgcgcaactcccgcgccaccgggccaaagatgcgggtcccaatgggctcgcgctccttgttgatgatgacgacggcgttgctgtcgaaacgcacataggaaccgtcgctgcggcggatgggccggcgggtgcgcaccacgacggcatcggccacctggccctttttgatggtgccgtccggagcagcttccttgatgtgcaccttgatgacatcgcccacgcgggcatacatctggttccggccgagcacaccaatggcggcggcgcgtttggcgccggtgttgtcggccacgtcgagaatggaacggacttgcagcataggtcaggagagtttcaggcggccgcgccggcggcgcgttcaatgatttccaccagccgccagcgtttgaggcggctcagcggacgggtttcctcaatgcgcacaacatcgccgggcttggcctcggacttttcgtcgtgcgcgtaatactttttgtaactccgcacaatcttcttgaagcgggggtgtggaaaacggcgctccacccggacgacgatggtcttggccatcttgttggaaaccacctcgccggtgcgctctttgcgacggcgggcggtgacgggggcggaaggggttgcagtggtgtcagccatagtctaaaaaatcatgcctggtttttcttgcgagcggtgatggcggtctccacgcgcgcgatgtcgcgccgcagcaaacgcatgcgcaccggattctccagccggctgccggccttctggagccggaggttgaagagttcctgtcgcaggtcgcggctcttggcctgcagctccaccagggtcaaatctttcaattcactcattttcatggcatcaatgacggtggcgggagatgaattttgtgtgaatgggcagtttggtggcggccaggcgcatggcttcgcgagccacgatttcaggcacaccatcaacttcgaaaagaacacgggcaggtttgatgacggccacccacgattccagcgggcccttgcctttgcccattcgggtttccaacggtttcttggtgtaggacttgtcagggaaaatgcgaatccacagtttgccgcgccgtttcatgaaacggctgatggccacgcgggcggcttccagttgtttggtgtccagccagcagcgctccaaggcctgcaggccgtactcaccaaacgcgacggtgttgccgcgggtggccaggccggcgcggctgccgcggtgcatcttccggtatttaacgcgtgcaggttgtaaaggcataaaacagtctcaggttaacgggcggcggcccggtcatttttggcggtttcaggcttgttttcgccgcggcaaatccagcatttgattcccaacttgccgtaaagggtgtgagcctcggcaaaaccgtagtcaatgttggcgcgcagagtgtgcagtggcacgcggccttccagatattgttccacacgcgccaattcggcgccacccaaacggcccgagcaacggatgcggatgccctcggccccctgttccatggcggtctgcacagcccgtttcatcgcgcgccggaaagagacccggcgctccagttgcagggccacgccctcggccaccagttgggcgtcgaggtccgggcttttgacttcctgaatctcaacgtaaatttccttgccggtctttttgctcagctcttctttgagcttgtcaatttcagtgcccttgcgcccgatgaccacaccgggccgggcggtgaacaaggtgatgcggcagcggttgccggcgcgctcaatttgaatcttgggcaccgcggcatccttgagtttctccttcaagtaccggcgcaattggaagtcttccaccagcagccgcccgaagtccttcttctcggcataccacttggagcgccagtcacggttgacggcgacacgcagaccgatgggattggttttttgacccataatgattagttggctccgtcggaaagtacgattttaatgtggctgttgcgtttgatgatggggccggccatgccgcgcgccttgggggtgtagcgcttgagacggctggcggtcagggcgacggcctgggccaccacgagtttggcggcctgcaattgatggttgttctccgcattggcaatcgcggaatcaagcgtccgcgccaccagccgggccgacttgcgcggcaccacggccagaacggcacgggcttccagggcggacaatccctggatttgacgggtgacttcccgcactttttgcggggacatccggacattgcgggtaatcgcctgtacttgcatagcttacttggcctcggctttggcggtgtgagcgccgtgtttcttgaagatgcgcgtgggagaaaattctcccagccggtgccccaccatgttttccgttacaaaaaccgggtggaacaccttgccgttatgcacgttgaaggtcaagcccacaaaatcgggcgtgatcatggaacggcgcgaccaagtcttgatcggggctttggacttggactccttggccgccaggatcttcttcatcaacgaggggtccacaaacggaccttttttaatcgatcgtcccataggctttcagatcaaagcagtttatttgcgtttcatgggccggccatcgcgccgaaccacaataaagcggttggaaggtttgtgtttgttccgtgtgcggtagcccttggccagcaatccccaaggcgatgtcaattgttgccagccgccaccacccttgctctttccggcgccaccgccgttggggtgatccaccgggttgcgcgccacaccgcggttgaccggccgatacccgaaataccgcgtgcgcccagccttgccccaaacaatgttttcatgatcggcattgcccacctcgccaatggtcgcatagcagttttcgtgaacgcgccggatttcaccggacggcaaccgcaaggtggcatagccttgatcgcgggacatcaaggtggcggagctgcccgccgagcgcaccatctgcgccccacgaccgggcaccatctcaatgttatggatggccatgccgatgggaatgtttttgagcggcaaatgattgcccacttccaccggagcctcaggcccgctggaaaccttggcacccaccttgagatccttgggcgccaaaatgtaagacttggcaccatccggatacttgatcagcgcgatgcgggcggagcggcaaggatcgtattcgatggcctccacagtggccacctggccatgacgccggcgcttgaaatccaccagacgaattttttgcttgtggccgccgccaatgccgcgtgcggtgacgcgcccgtagcagttgcgcccgccagtctttttgcgggtcaccaccaggctcttctccggctccaccttggtgatctcgctgaagtcggccaccgtgatgtagcggcgcgacggcgtcaaaggtctaaatgttttaacaggcataaggcaaatgtaggttaggtgaggttgatgcggtcgccttccttcaacgtgacaatggccttcttccaatcactggtcatgccggcctggggtgtgcgttgacggcgcaatttgccgcgcatgttcagcgtgttgacggcaaccaccttgaccttgaacaactcctccaccgctttgcgaatctgggctttgttggcccgggggtccgccaccacggtgtattggttgtgcttctcggcctgcagggtgcccttctcggtcacgcggacggtcttgatgatttcaaaggcattcatggtgtcaggattggctgaggcgctgtcccacctgcgccagagcagcgcgtgtaaaaacgattttggccggtttgagggcctggtaacaattcaagtctgcgccggtgaccagttccacatacggcaggttgcgggcagccaggcgaaggttctggtcaatggtgtcggtcaccaccagcacggtctggccgggagccagagtgtccagcaaccgcaccagctcgcgcgtcttgggctgggccagtttcaattcttccaccacgatgacttcactggccttgatgcgctcgctcaaagccttgcgcagggccaggcgccgggtggagtcattgacttttttgctgaagtcgcgtggcttgggaccaaagaccacaccaccaccacgccacaagggcgactgaaacgaaccggcgcgggcgcggccagtgcctttttggcgccagggtttcttgccggtgccggccacttcacccatggtcttggtgcaggcagtgccggagcggcgggcggccaggtgggccaccaccacatcgtgcacagcctgcgtgcccttgccgttttcaataatcgggaaagggacttccacttcgccctgcggcgaaccttgcaaatcttgtacggtgagcttcatgacgggtctcctcacttcttggcggccttggctttaccgcccttggccatggccttgtgtttctcgatgcgctcctggcgggccttctccaacacgcgggagcgcttcttggactcgcgaatgatgacgtagtccccctcggccccgggcatcgagcccttgatgagcaaaagattttcagcttcgcgcacctggatgatttgcaggttttgcacagtgcgccgcacctgtcccatgtggccgggcatcttcatgccgcggttaacggtgccggggaacaaacggcagccaatggcgccgctccgacggtgccagcccttggcgccgtggctcatgtcgcccccgcgaaaatgatgccgcttgaccacgccctcaaaaccacggcctttggtcacgccgatggcatccacgtagtcaccggcccggaagatgttcactcccaaggtgtcgcccggtttgacctccagttcaaagtcgcgaaattcgcggatgatccgaacgggcgagccgttgtgctttttgacgtggccctgcagcggcttggtgaggcgggactccttctgctcgccaaagcccagctgcacggccttgtagccgtcgcgttcgtgggtcttgcattgcagcacgcggttggggccggcctgcacaatggtcaccggcacgacgacaccgttggcgtcgtaaacgcgggcgtgccccagttttttgccaagcaaaccaatcatagagacttagattttaatggtgatgtcaacccccgccgggagggtgagttttttgagctcgtccacggtcttggcggtcggttcaatgatgtcaatcaaccgcttgtgggtgcgttgttcaaaggtttcctgggacttcttgtcggcatgcggcgagcgcagcaccgtgaaccgctcgatgcgggtgggcagaggaaccggcccggccacgcgggcgccggtgcgcttcaccgtttcgacaatttcgtgcgccgaggagtccacgatccgataatcgtagcctttgaggcgaatccgtatgcgttgtccaggcatataaagaacaagttaagagtttctgttttacgtccgggctgcaggcttgtttttggcctgatccaaaagttgagcggcaatgctgctcggcacctgctcgaaagtgagcggttccatcgagtaggaggcgcggcccttggaaaggctccgcaccgccgtggcatagccgaacatctccgccagcggcacgcgggccgtcaagacggtggccccgttgcgcacttcgatgtgctccacgtgaccgcggcggcggttgatgtcacctaaaatatcaccctgatactcgtcgggggtggtcacctcgactttcatcacgggctccaaaagaatgggattggccttccggaaagcctctttgagcgcaaagatgcccgccatcttgaacgccaactcgctcgagtccacttcgtggaaggtgccgtccacaatcgccaccttgatgtcaataatctggtaaccggcataaacaccggtgcggacggcttcctcaatgccgctgataaccgccggaatgtattccttgggaatggcgccaccaacaatcttgctctcgatttccacacccttgccgcgctcattcggctcgatgtggatgatggcgtggccatattggccgcgcccgcctgattgccggatgaatttgccctcgccctcggccttggtggtgatggtttcccggtaggcaatctgcggcgccccggcattggcctgcacattgaactcccgataaaggcggtcccgaatgatttccaggtgcagctcgcccatgccggcgatgatgagctgaccggtctcttgattcgtgaaaacccggaaagtgggatcttcctcggccaaccgttgcagcccctcggtcaatttgtcgcgatcgcccttggtcttgggctctatggccatgctgatgaccggttcggggaacgtgggcggctccagcagcacactgaaatcttcgtcgcacaacgtgtcgccggtggtgatgttgcgcaggcccaccagcgccgcaatgtcgccggagaaaacctgctccacgtccaggcgcttgtcggcctgaatcatcatcaaccggttgacgcgctcacggcggcgtgtgcgaggattgtaaatgatgtcgcctttcttcaacgtgccgctgtacacgcggaagaacaccagcttacccgcgtaggcatcggtccacagcttgaatgccagcgcgcaaaactgcgcgttgtcatccgccgccaccatcaatggagtgtggtcgtcgggattctcaccttgagcgggcggcacatccagcggactgggcagataatccacaatggcatccaccaagggttgcacgccgcgcttgcggaatgcgctgccgcagagcaccggcaccagctccaaattgcaggtcagtcgccggatggcagctttcagggtcagagcgtcaatcggtttttcctcgatgaccagctcggcaatggtgtcgtccttgttgctgacggcgtcaatcaattcagccagggcggcggcagcacgctcgcgcagttcagccgggatgtcggtgatggtgaagcggacacccagatcatcctcaggatcgtaaatgatggccttttgattgacgacatcaatgacgccccgcagatggtcctccttgccgatgggcagcacgaccgggtaggcgtaagcgccgagcttgcggcggaggtcgttcagcgcgttttcaaaattcgcgccggtccggtccatcttgttgatgaaggcaatccgtggaacgcgatacttgctggcctggcgccagaccgtctcggattgcggttggacaccggccactccacaaaacacagccacggcaccgtcaagcacccgcatcgagcgctccacttcggcggtgaaatccacatggcccggagtgtcaataatgttgatgcggaattcctggccggcaaaaagcttggcgcaaccgtcttccttgggtttccagtaacaggtggtggcggcggaggtgatggtgatgccccgctcccgctcctgctccatccagtccgtcaccgtgttgccatcatccacatcgcccatccggtgaatgaggccggtgtagtaaagaatgcgctcggtggtcgtggtcttgccggcgtcaatgtgcgcggcaataccaatattgcgcgtccgggccagtggataaggccggttcggcgcatcgagcactttcttttccgtcgcagtttccatgcaaaatttttaccgtatcagacaataaaaacgccccgattttcagcgcagccgacggggcgtcccagtgagcaccactaccagcggaaatgggcaaaggccttgttggcctgcgccatccggtggacctcgtcgcgtttacgaatggcgttgccctgcccctggtaggcatccataatctcggcagccagggcctcgcgcatcgccacacccttgcgggcatcggcgaaatccaccatccaacgcatcgccagagaaatctggcggtcgggcggaacttccaagggcacctgataggtggcacccccgacgcggcgggccttggtctcaatgcgcggcttggcattgtccaccgcgcgctggaggacctccagtggattgatttgcgggttcttggccaccaattggtcaaaagccccgtaaacaatccgctgggccgtgctcttcttgccccatttcatcacagtgttgatcaagcgggtgaccaacacgctgtggtacttcggatcttcggccatcggccggcggacagcttgacgtcgtcgagacataattccaaaaatcctcaggatttcgccggagcggctttcggccgcttgaccccgtacttggagcggctcacgcggcgtttctccacgccggccgcatccaaggttccacgcacgatgtgataacgcacgccgggcaaatctttaacacggccaccgcgcaccagcacgatggagtgttcctgcaggttgtggccctcatccgggatgtaggcaatgacctcatacccgttggtgagccgcaccttggccaccttgcgcatcgccgagttcggtttcttcggcgtacgcgtcatgacctgaatgcagacgccgcgccggaacggcgcgccctccagggccggcgccttcgacttggtggcgacctttcggcgtccaaaacggacgagctgattaatcgtcggcattattgtaaattccgtgttgtgctttcttcaacgtccttccccgggagaggaaaggagcgcggatattagcaaagcattttcaggttgcaacaagtatttcaaaaaaatttttttcttgacaacttattctccatttccggagtcctccgcagccgcttccccggccggagcttcgcctgccgcggcagccggctccgccggcgcaggctccagctccaccagcggcttgagctgcacattccgatgcgccggataacccgtgcccgcaggaatgatgtgccccatgatgacgttttccttgaacccgcgcaggtagtccacacgcgaagtcgtggccgcctcggtgagcacccgcgtcgtgtcctggaatgacgccgcgctgaggaaactctccgtttcgagcgaagccttcgtgatgcccagcagcaccggctggcactccgcaggtttgccgcccagtttctccacccgctggttttcctcttcgtgctccagcttgtccacctgctcgccccacaggaagcgggtgtcgcccggctcagtgatgcgcaccttgcgcagcatctggcgcacgatgatttcaatgtgcttgtcgttgatggtgacgccctgcaggcggtacacctcctgcacttcgttgacgagatgctcctgcaactgctgcgcgccgcagacctcgagaatttcgtgcgggtcaatcggtccttccgtcaactgctggccgcgcttgaccatgtcgcccttgaacacgatgacgtgcatgccgatggggatgaggtgctcctccttctggccggtcatcggatcggtgatgatgatgcaccgcttgccgcgcaccgtcggaccaaagtccaccacgccgtcaatcttcgaaatttcggccgcatccttcggccgccgcgcctcaaacaactcggccacacgcggcagaccgccggtgatgtccttggtcttgctcaccttgcgcggggtcttggccagcaacgcgccagcctcgatgatgtcgccttcctccaccacgatgtgcgcgcccgaaggaatgccgtagctggcaatcacatcgcgaccgtcttcatccaaaatgatgatttgcggatgcaaatcttccttgtggtcaatgataaccttggcctgctgcccggtcgcctcgtcctcctcctgcttcatcgtcacaccttcaatgatgtcgtggaagcggatgcggccggctttttccgaaatgatgggcacgttgtacggatcccattgcacgaaggcctcgcccttcttcacccgcccgccatcggggacggaaatgaccgagccgatgaccagtgtgtgactctccagctcgcgcccatcctcgtcctgaacgatgatgctgccgtttttgttcagcacgatatggttgccgtcctgcagcggcacacaacgcagatcattgtacttgatgataccgtcgtgtttggccttgatttgcggctgcttgaacacctgcgacgccgtgccaccgatgtggaacgtacgcatcgtcaattgcgtgcccggctcgccgatggactgcgcggcgatgatgcccacagcctcgcccagcttgaccatctgtccggtcgccaggttccgtccgtagcagcggatgcagacgccgtgtttgctctcgcaagtcagcaccgagcgaatcttcacgcgctcaatgccggcgtcttcaatctggcgcgccttgtcctcgtcaatctcttcattcgcagccacgaggacccgtttgggatcgcgcgggtcgtaaatgtcatcgcacgcgcaacggcccaccaggcggtcacgcagtttgacgatttcatcttcgccctccaggatggcctgcacccagatgccgttgaccgtcccgcagtcttcttctcgcacgatgacatcctgcgccacgtccaccagcttgcgcgtcatgtagccggagtcggccgtcttgagcgccgtgtccgccaaacctttgcgcgcgccgtgagtcgaaatgaagtactccaacaccgtcagcccttcgcggaagttcgagagaatgggcttctcgatgatgtcgccgctcggcttggccatcaaaccgcgcagaccggccaactgacgcacctgttgcttgttgccacgggcgccggagttgaccatgaggaagatgggattgtactcggacttgttccggttgcgctccaaggtctgaagcatgaccgttgaaatctggtccgtgcaatgcgtccagatgtccacaatcttgttgtagcgctcgccgtcggtgatcacacccttccggtactgtttctccacctccgctatctgcttctgcgcctcgcggatttgcttctccttttcctccggaatgatcatgtcctcgatgccgatggacacaccggcccgcgtggcctcgcggaagcccagctccttgagccggtccaaagtggcaatcgtctcctcatgcccgcaatacttgtagcaattccaaatcaaatcgcccaattcgttcttgccggccaccttgttgaaaaagcccagcttctcaggccacacttcgctgaagatgacccggcccacagtggtctcaatcaccgcactcttcggatcgccatacaccgtctgacgcccgcggtcgggattggccagccgcacccggctgtgcgtcttcaattcaccctcgcgataagcgaagatgacctcctccttggaaccaaacagcatcaggcgctgattgcctttgggctggcgtggctccgcggtgaggtagaagcaacccagcgtgatgtcttgcgtcggcgtcataatcggccggccgctcgacgggctgaaaatgttgttgggcgccatcatcaacaggcgcgcctccatctgggcctcgatggacagcggcacgtgcacggccatctggtcgccgtcgaagtcggcgttgtacgccgtgcagaccagcggatgaatccgtatggcctcaccttcgatgagcatcggctcaaaggcctgaatggacagccggtgcagcgtcggcgcgcggttgagcaacaccgggtggcccttggtgacttcttcaagaatgtcccacacctcggtggactggcgctcaatcaatttcttggccgagcgcaccgtgtgcacatagcccaattccttgagccgccggatgatgaacggctcaaacagcaccagcgccatcttcttgggcaaaccgcactgatgcagcttcagctccggcccaatcacaatcaccgagcgaccgctgtagtccacgcgcttgcccagcaggttttgacggaaccgcccgctcttgcccttgagcatgtcgctcagcgacttgagcggccggttgccggcaccggtgaccgcgcggccatgacgcccgttgtcaaacaaggcatccaccgcctcctgcaacatgcgcttctcgttccggatgatgacctccggcgtcttgagctgaagcaggttcttgagacggttgttgcggttgatgacacgccggtacaaatcattcaaatcggaagttgcaaaccgcccgccctccaacggcaccaacggccgcaaatccggcggaatcaccggcagtaccgtgagaatcatccactccggcttgacgcggttttccacaaacgcaccaagcaaacggatccgcttggccagtttcttgcggatttgcttgctcttggtctcctgcatctgctgctgcagcttttcaatctggcgcggcagattgacgttggccagcgcctcacgcacggcctcggcgcccatcttggccacaaaggcatccggcccgtaagtctcgcgagcttcgcgatactcatgctcgctgagcagttggtggagttgcagcggcgtgttgcccgggtccaccaccatgtaatcctcgtaataaatcacccgctccaagtcccgcgccgtcatgtccagcaccaagccgatgcgcgagggcatgcacttgaaaaaccagatgtgcgataccggcaccgccagctcgatgtggcccatgcgttcgcgccgcacccgcgccaacgtcacttccacaccgcaacgatcgcacaccaccccgcggtgtttaatccgtttgtacttgccgcaggaacactcccagtccttcacaggaccgaaaatgcgctcgcaaaacaggccgccacgttcaggtttgaacgtgcggtaattgatggtctcggggttttttacctccccttttgaccaggaacggatggcctccggtgaggcaaccgagatggcgacgtaatccacctggttgaccttgtccagtccgagcagctcgcgtgctgtttctttcgtattcatgttggctgtggcattggtggggcggaaaaatcccgccccgggtctgcaaagttcaattacaagttggccagggcgctggccggcgtggccggttgatgttcaatgggattggtgtaccccaccttcacgtccagccccagggactgcatttccttgaccagcacgttgaaagattcagggatgccggcctccaaacaattgtcgcccttgacaatgctctcgtagatacgggtgcggccctgcacatcgtccgacttgacggtgagcagctcctgcaacgcataggcggcgccatacgcttccatggcccaaacttccatttccccgaagcgctgaccgccgtactgtgccttgccgcccagcggctgctgggtgaccagcgagtagggacccaccgcgcgggcatggattttgtccgccaccaggtggcccagtttcatcatgtagatgtagcccaccaccacttcctgatcgaacggctcgcccgtccgcccgtcgaacagacgcgccttgccgttgggcaatagcccctgctccttgcccacgggcgtttgcgccgcctgtttgatgaactcccaaatgtctttctccttgatgccgtcgaagaccggcgtcgcaaatttcaatcccagcagcttcgcagcgtaccccaggtgcgtttccaacacctgacccacattcatgcgcgacggcacacccagcggattgagcacaatgtccaccggcgtgccatcggccaggaacggcatgtcttcctccggcacaatcttggccacaacacccttgttgccatggcgtccggccatcttgtcgcccaccgacagtttccgcttcgaggcgatgtacaccttcaccatcttgatgatgccggcgtcaatttcatcacccgcctccacgcgctccatctcctgatcgtgctgggcctgcaaatcatcaaacttctttttgaagccgccgatgatctcattgatcttgttgcggatgggcgaaggatcaatctcgatccggtcatacacctgcgccagcttccgcaacaacgtcttggtaatcttgcgattcgccggaatgatgatttcaccggtctcgctgttcaccacgtccagcggaattttctcgcccagcaagatattgctcagagcctcggtcagttgctcccgcagctcttccatcttggtgcggtattcctcctgcacctgtttggcggcacgacgcgcaccgcccgtctccgcctgcacctctttttccccttccttctccttcttggcggagaccttgacatccatcacaatgccataagtcccgctcggtactttgagagaggtgtccttcacatcggcggccttttcaccgaagatggcccgcaacagccgctcctcgggcgccagctccgtctcgctcttgggcgtgatcttgcccaccaaaatgtctccgggcttcacctccgcgccaacgcggatgacaccgtccggccccaggttcttgagggcttcctcgccaagattgggaatgtcacgggtgatttcctccggacccagcttggtgtcgcgcgcgctcacctcaaactcgtcaatatggatggaggtgaaaatatcctccttgacgatgcgctcgctgatgaggatggcgtcctcgaaattgtaaccgttccacggcatgaaggccaccaacacgtttcgtcccaaggccagttcaccctgagccgtgcagggaccatcggcaataacctgccctttcttgaccgtgtcacccttgttcaccagcgctttttggttgatgcacgtggcggcgttggagcgcatgaatttgcgcagtccatacacgtacacgccattggccggatcgtgtttgatcttgcgcttgccctccggcagcttgccatccgcagtgatgatgatttggttgcccgtcacgctggccaccttgccgctctcctctgccaccaacacagcgcgggaatcccgggccacacgctcctccaaaccggtggccaccagtggcgtctcggtcaccagcaacggcaccgcctgccgttgcatgtttgaacccatcagcgcccggttggcgtcgtcgtgctccaggaacggaatcaaactggccgccaccgaaaccaattgcttcggcgacacgtccatgtaatccaccttcgccggctccacgtccacgaaatcgcccttgcgacggcacgtcaccgtggcggtggtgaagtggcctttttcatcaatcggcgcattcgcctgcgccacggtgaagttctcctcccggtccgcagtcagatactcaatttcatccgtcacacggcccttgaccaccttgcgatagggtgtctccaaaaacccaaactcgttcacccgcgcaaacgtcgccagcgaggctatcaagccaatgttcggaccttccggagtttccaccggacaaatccgcccgtaatggctcgggtgcacgtcgcgcacctcaaacccggcacgatcccgcgacaaacctcccggccccagcgcggacaaacgccgcttatgcgtcagctcggccagcggattaatctgatccatgaattggctaagctggctccgcccaaagaaatcgcgaatcaccgccgacaacgccttgggattgatcagcttctgcggcgtcatcgcctccaacgactggtcaaacaaagtcatgcgctccttgaccagccgctcggtgcgcgccaggcccacgcggcattggttggccagcaactcgcccaccgtccgcacgcgccggctgcccaggtggtcaatgtcgtccaacgttccctcgcccttcttcaggcgcagcaaatacttggtggcctccaccaaatcgctcttggtgaggatgcgcgtgtcgttcttgggcaggttgagtttctggttgatcttgtaacgccccacgcgccccaagtcatagcgtttgggatcgaaaaacagccgcttgatgagcgctcgtgcattggccgccgtcggcggatcccccggccgcaaccgccggtaaatatccttgagggcctcatcctcgttcttggtcgggtccttcttgatgcatttgatgatgatgccgtcgtccactgacgtgtccaccacccgcaacaccttgacccccagctcgccaatctgcttcaccaccgcacgcgacaacggctcaaaagcccgcgccacaaccaaccccttgtcctcatccaccacgtcctcgatgagcaccttgttgggaagatcatcgcgtttctcagcttctttgatgggcagctcttcaatggtgtaaaaaagcttcaacaactcggcatcgctgccacggttggcgtcccctttgcccttttccggctcgtccaaaaatgccagcgcacggaagaaagtcgtggtcaaaaatttgcgacgccgcttcttgcggtccagatacacataaagcaaatcgctcgtgtcaaactgcgcctcgtaccatgaaccgcggtcggggatgatgcggaaagaatgaagcgtcttgccgttgggatgctgggttgcttcaaaagcaatacccggcgaacggtgcaactggctgacaatgacccgctcggcgccgttgatgacaaaactcccctgcggagtcatcagcggcagctcgcccatgaacacttcctcttcgcgggcgaccttgccgttttcctccaaacggaaagtgacatggagcggtgcgccgtaagtctgcccttcgcgcaggcactccagccacgtcatcttgggctcgccaatcttataagaggcaaagtccagcttgaacttgccgtcgtagctctcgaccggaaacacctcccggaacaccgcctggaggcccacgtctttgcgtcgtcccggcgggacatcagactgcaaaaactccttgtaggaggtggtctgcagttcgataagatccggcgggttgatcacttctttaatcttgccgaaattcttgcgttcgatggctcgcgttgacatgggacttgctctattgggccggcggcatgtacagcctgtacatcccgacagccgggttcgggcttagacagcacaaggcgagtccccccttcccggggagtgctcgccaaaacatggatgaatccaaccgatactacgacttttatcttgccagtccgccctgccggccgcccgcaaaccggacaaccggccgaaggggggcgccacccggcgccacccctccagcggacaattacttgagttccacggatgcgccggcctcttccagcttcttcttggccgcttcagcatccgccttgttggcgccttcaagcaccggcttgggagcgccttccaccagcgccttggcttccgccaatcccagaccagccttgatctcgcgcaccgccttgatgacggcaatcttcttgtcggcaggcaccttggccaggatcacgtcaaacgtatccttggcctcggcaggcgccgcagcagcagcaccacccgccggggcagccccagccgccgccaccgctaccggcgcagccgccgtcacaccccatttggcttccagttctttcaccagctccgcgatctccaatacggtcgcgttgctcagttcttccacgatttttgctttatccagtgccataggtcctttctgtttcgccgcccggcgtggccacgccggatttcagcccgctgcccgcaggccggcgagttacatgttaggttgttgactttttccccagccgttggctgcagcaggagaaaaactgtgatgttaattctctcgaaaaaggcttgctcatgccgccgcaggcgcgccttctttttgcgccttggcctgcagtactcgcgccagttgcgatgccggcgtgttgagcagcgccaccagcttggtggccggcgcctgcaacagacccagcaacttggcctgcaacacctcgcgcgacggcaaatccgccagcgccaaaaccatggacgcttccaaccgctgattgttcaaatatccaaagcggattttcggcttgtcctgctccgcagcggcaaacgtcttgagcgccttggccgccaaggtcacatccttcttcccggtcaccaccgccaccggcccctccaagggcccaggaagctccacccccgccgccttggcggcatgccgaaacaggctgtttttgaccacatgaagctccgcacccgcctccgccaattggcggcgcagggtcgtaagctgggccactttcagtccggtatagtccaccgccacaaaaaacggagacgcattcaaccggttgagatattcctgagttaaattttgtttttcagcacgcatgatgattccctccgctgcaggcttgcgttatgtggtggcgaactccttcaagtccaccggcaccggcggactcatcgtcgtggagatggtgcagctcaaaatgtagcgccccttcacactcgaaggccgcgccttttgaatcgcctcaatcaccgtccgggcgttttcctcaatctgctcgggtgcaaaattaatcttgcccaccggcacatgcacattaccgcccttgtccaccttgaactccacacgacccgccttgaactccttcaccgccttggcagtgtcgtcggtcaccgtgccggtcttgggattgggcatcaaaccacgaggaccaaggattttgcccagtttgcgcacttcggtcatcgcctccggcgtggcaatcgcaatgtcaaattccgcccagccttcctggcacttcttaatcatgtcctcaaagccgacatactcggctccggcggcttttgctgcctcggcggaagcgccgctcttggcaaacaccagcacccgcaccaccttgccggtgccatgaggcaacggtacagtgccgcgaatcatctggtcactttgcttcgggtccaccccaagatgaaacgccaaatccaccgtctctgtgaacttggcccggggcattttggccaacagcgccaccgccgccttcagcggctgcgccttcttgccatccagcaggctcagggccttcttgtatcgtttgctgcgttttgctgccatgttaatggttgcggtacaatcgagggggactccctctcccgcgttggtttgttgttagtccacgatttcaatacccatgttgcgggccgttcccgcaatcatgcgaaacgccgcctcctccgagttggcgttcaaatctttctgtttgatcttgacaatctccatcacctgcttgcgggtgactttgcccactttttccttgttcggcaccttcgagccggtggcaatccccgctgccttcttcaacaaaaccgacgccggcggcgacttcgtgatgaaggtgaaggacttgtcctgatacaccgtaatcaccaccggaatcgtcatgcccgcctggctctgcgtcttggcgttgaattccttgcaaaacgccatgatgttcacaccatgctgacccagggcagggcccaccggcggggccggattcgcctggccggcggtgatttgcaacttaatctgtccaacaactttctttgccataaatcaatcttcgtcctgtccgcaacgcttacgttttttccacctgccaatactccagttccaccggggtgttgcgtccaaaaatgttcaccgtcaccttgagcttgcctcgctccggctcaatttcctcaataaccccgctgaaattcaggaacggcccgtcgttaatcttcaccgtctcgcccacttcaaagttgaccttcggcttctccacatcctccgactcgctgatttgagccttgatgctctcaatctcctcatccgccgtcggcgccggacggtcccctccaacaaacccaatgatgccctgcgtctcgcgtatgaaataccacgggcggtcaatcacccggttgttctcatccaggagcttcatccgcaaaaacacgtacccgggataaagcttgcgggtgctgacggtctttttgccgccacgcacatccacaatcttttccatcggcaccaatacctcctcgatgtattcctgcatctcctccgccttgatgcgcttctccaggctctccttgaccttgagttcctggccggcaagggtgtggaccacaaaccactggctcttggatgagggcataaactcgaaaaaggggcgttaaacagtggtcacaaaccgcatcaccaaaagcagcaccgaatccaccacaatggtgaacaggctcaacaaaaccaccgacaccagcaccaccaccgtgctgcctttcaactcctcacgaccaggccaggtgcatttgcgcaactcctcccgcgtctcctgaatatactgattcaggcgcaaaaaatgccctttccgccagaggtagaacaccacggcggccaaggcagccagcccgattatcttcaaaatttcacctgtttccatatcagtctcctgacttggcggagagggagggattcgaacccccgtcccgcgatgcgggaagcggttttcaagaccgccgcattagaccactctgccacctctccggcaaaaaaactggcagggcgtgagggactcgaacccccaacaggcggttttggagaccgctactctaccaattgagctaacgccctgttgccgcagagattgttgctcactgtctctccggtcgcttgccggtggttcgcaccgggcgccccgccacgccggcaggacgcccgcgcctgtcaaactgttcgttaatccaaaatttccgtgatacgaccggccccaatggtccgaccgccttcacgaatcgcaaaacgctgcaacttctccatggccaccggcgcaatcaccttgatctccatggacacgttgtcgcccggcatcaccatctccacgccctgcggcagcgtcaccgtccccgtcacgtcggtggtgcggaaatagaactgcggacgataattggtgaagaacggcgtatgacggccaccttcttccttcgacaacacgtacacctcggccttgaagtgcgtgtgcggcgtaatcgaacccggcttcgccagcaccatgccgcgctccacctcttccttcttcacaccgcgcagcagcacgcccacgttgtcgcccgcctgcgcgctgtccagcagcttgcggaacatttcaatgtccgtcgccaccgtcttgcgcgtctcacgcaaccccacgatttccacttcctccatgcgcttgagcacaccgcgctccacacggccggtcaccacggtgccgcggccttcaatgttgaacacgtcttcaatgcacatcaagaacggcttgtccacttcgcgcgtgggcagcggaatgtaatcgtcaatggcctggagcaggtcttccacagccttgatgccctcaggcttcaattccatggcggcgcgggagctgccacggatcaccggcgccttcgctccgtcgaaaccgtacttggtcaacaagtcccgcacttccatctccaccagctccagcaaatccttgtcgtccaccaggtcaatcttgttcaaaaacaccacaatcgccggcacacccacctggcgggccaacaatatgtgctcgcgcgtctgaggcatcggaccctcggcggcatccaccaccagaatcgcgccgtccatctgcgccgcgccggtgatcatgttcttgatgaagtccgcgtggcccgggcagtcaatgtgcgcgtagtgccggttgttgctctcgtattccacgtgagagaccgcgatggtcaccgtcttggtttcgtcacgcaccgtgccgcccttggtgatgtcggcgtagctgatcggcttggccaaccccttttgggattgcacatgcacgattgcagcggtcagcgtggacttcccatggtcaatgtgcccaatcgtccccacgttgacgtgtggcttcgtacgttgaaattgctcttttgccatcgcagttcctacggttgatgtttacggtttttaacaactgtttcgggcggccatcgccgccacactttttttcatggagcccatgatcaggattgaactgatgacctcgtccttaccaaggacgcgctctgccaactgagctacatgggcatccatgtatcactttcctgtcattgtaaaagacaaaactcccgtcagaccctgtgcttcttcccgaaaaacccacagggactaacgtagtcgtcctgtaataggcccaatgacgccggggaaattacgcccctgcaaaaaaattgtcaaagctttttttccactttttttccctcaccttgccccacttccaccgcctccgccacccggccatcccaccgccgcatcaaatggttgcccgcccaaatgaccatccccgccatcaccaaccccccgggtatgtccaccgcataatggtagcggcaatacaccgtgctcaaacacaacaaaaccaccaccaccgcatgcgcccaccgtattccacgaatatagcgccatgaaaaatacaacgtcgtcaccgccaccgccacatggctgctcggaaaggccgcccccggcgtctcaaaatgatgataaatcagcgccatgatttgaaaaaacggccccttctgcaccgccgccggaaagtcaggcaccgtcgtcggcatcaccgccgccggcaaatcaaaatccccaaaatcccggtaaaaaatccgcgggcccaccaccggcaaaaagatatagaccagaaaacacgcataaaaaaccaccgaaaccagggtgatgtaatggaaaaattgcctccgatcttgccggtacaacgccagcccacaccccgttatcatgatataatacgaaaaataagacacataaaaaacctcactcacccacaggtacggcagtttgtccatgaacagcaaactcggctggcacccaaacaaccgttcctccatccggatgaaccacgggtccaacatccccgtggcaaacatctgattcaaatgccccgtctcattgtaaatcgggacatacaacatgatgggataaaaatgccggacaaaccgcagcaatgccccatgtcggcccgtcgcttcttcacatatcaacaaatgaatcatccccaccaaccccagatgccccaacaccaaccaccgccactgcggcactgtttcattgtgaaagataagcaccaacaaccccaccaaggccacatacccctgggtcgccacatcaataaaacgataatgcctcatgcctcccaacctcccctcatcccaaccaccccgcctcacgataccaatccaaagtggccggcaccccttgcgccgcagccgtgggcgcctcaaagcccgtcatctcccgcaaacggctcacatcacacacccaccccgccgcggcaagttccttgtatttctgcaaattcaccacattgggacggcgggtgatctgcgaaatgatttcctgaaccgcgcacaccggccacaaagccgccacaggcaaggccaggggaaacggtttgactccccaatgccgcgccgccaactctcccagttgccgtacattcaccacctccggatgcgccacgtgaaacacctgtcccaccgcaccctcatgcgtcaaacaatgcacaaccgccgccgccaaatccggcgcatataccaagctcaactgctggcgtcccccgccaaagcacggcaacacaccgcgccgcaccgccttgaacaacttgaaaaactcaccatcccgcggcccataaacacccgggggtctcaaaaccaccgccggcacacggcattgctcccgcaccacctgctcggcggccagcttgctcttcccgtaatcggtcaatggcctcggtggatccgactcccgcgccggccgcgccgccgtggccggccccgtaaccgccaaactggaaatgtgcaccaaccgttgtacttccgatgcacgacgattgatggccgccaccaagttcaaagtgccagcatgattgatttggaaataaccctccctgtccagcgccttggtggcccccgcgcaatgcaccacatgcgtcaccccctccagggccgaccccaaagattccgccgactccagcgatccctccccaatttccaccttccccaagtgcccctgcaaccacttccgcgggctgctggaccgcagcagcacccgcaccggccaacccgcccccacaaggcggtccagcacgtggctgcccaccagcccgctggcgccggtcaacagcactttcatggtcggctaaatcagccccagttcacgccccacctgggcaaattgttccagcgcaaaatctatttgcgcatcggtgtgcgtcgccatcaagctcaccctcagcagttccatcccaggcggtatgcccggagaaaccaccggattcacaaacaccccccgctcctgcaatcgcttgcaaaactggaacgtcttgagcatgtcccggatatacaccggcaatatcggcgtctgcgatcctcccaaatcaaaccccagcgacaacaacccccgcttcatccgctcggtgttctgccacaaccgcgcaattcgctccggctcgctctgcatgatcttgaccgccgccaacaccgccgccgcattggccgggctcatgctcgcgctgaaaatcaccgttttggaatgatgcttcagataatcaatcgtggctgcatccgacgcaatgaaccccccaagactcgccagcgacttgctaaacgtgcccatgatgaactgcacttgatcggtcaacccaaaatggctcgccgtccctgcgccattcactcccaatacgccgatcccgtgcgcatcatccaccatcaccgccgcccggtactcccgcgccaaacggcagacctccggcaaattgatgatgtccccctccatgctgaaaacaccatccaccacaatcatcttgcccgcatccaaaggcagcttttgcaaccgcgcctccagcgcacccatgtcattatgcgcaaaacgcgaataatcccccagcgccaatcggcacccctccacaagactggcgtgattgctcttgtccgccaaaatatattcatccttgcccgccatcacgctgatgacccccagattcacttgaaatcccgtgctgtacaaaagcacagccggcttgttcaccagccgcgccagcgcctcctccaactccaaatgcaaatccagcgtgccattcaaaaaccgggaccccgcacagccgctcccatacttggccaccgccgccatcgcggcttccttgatcttgggatgattcgtcagccccaaataactgttcgaccccaacatcaaaaccttccggccattcatgatgacctcggtatcctgcgccgaggaaatcgtgcggaaatagggataaagccccatcgcacgcacttgctcggcacttttgaacgcgcgcaccttgtcaaacaacggcaaatccgctgtttccgccgtgcacgccggcggatttttggctccaaggccctgttctatcatgggcgaataggtgtcccgactcatataagtcggccctttgtgtcgcaagttggggttatttattcaatcaaaattattgggagcacaaacacccccctgcctcccgcccccgttggaaaaagggcgcgcaaccggaaatactcatggaaatatcgtggtccccccctcaagcctcgccgttggcacggcggaaaatctcaaggtgatccaccacattgatattgtgctgctgcagagtttgcaccgcccgatccggatcatcaaaacggaacaccagcacgcctttgttctcctttttcaacgtaaaggcatacatgtactccacattgatgccggtcccctccaacaccgcaagcacctcggccagcccgcccggcttgtccggcacctcaatcgccaccacatcggtgaccttcaccacaaagccgttttgctcaagcaacacccgcgccttctcccagtcgcgcaaaatcagccgcaaaatgccgaaattttgcgtatccgcgatggagagcgtcgtgatgttcaacccctcggcggccagcacgcgcatcggcgcgctcagtgccccgggtttgttttccaaaaacagagagagttgtttcagtttcatggctgtggagcggttacattttgcgctggtcaatcacccgtttggccttgccctcgctgcgttgcaacgtgcggggcgtcaccagccgcactcgggcccgaatgcccaccgtgctttcaatcgcgtgcgaaagccgttgctgcagcgcctccaaggcgccaatcgtgtcgctgaaaacctcggctgtcacctccacctgcacctccatctcatccagccccttctcgcgggtcaggatgatttggtaatgaggcaacgtcccttccacactcaacagcgcggcctcaatttgcgagggatacacattgaccccacggatgatgaacatgtcatcactccgccggctgatgcgcttgatgcggcgaagcgtgcgcccgcaggcgcaaggttcactcgtcagcgccgtaatgtcacgcgtccgatagcggatcatcggcatcgcctgcttggccagcgtcgtgagcacaagctcgccctcctgttcatcccccaacacctcgccggtctgcggatcaatgatttccgggtagaaaaagtcctcaaaaatatgcggcccacactggcactgacattccatcgccacacccggccccacaatctccgacaacccgtaaatatcatacgcccggatgccgctctcggcctggatgcgctgccgcatgctctccgtccacggctccgccccaaaaatgcccgcccgcaaaggcagctcccgcaaatcaatccccatctcagacgcctgatcgagaatgtgcaaaaaataactcggcgtgcagcaaatcaccgtcaccccaaaatccttcatcaccataagctgccgctgcgtgttcccgccgctgatgggaatcaccgtagcccctagccgctccgcaccataatgcgcccccagcccgccggtgaacagcccgtaaccatacgcgttttgaatgatgtcccccgcgtgcaccccgcaggccgcaaaactccgcaccatcgcctgcgtccacacctcgatgtccgccgcattatacgccaccacaatcggcttgcccgtcgtcccgctcgaagcatgaagccgcacaatctcatgcatcggactcgcaaacaaaccaaaaggatacgtatcccgcaaatccgtcttgaccatgaaaggcagccgcgcaatgtcctccaacccgcgcaaatcagcgggcttcaccccccgctcatccatgcgctgacggaaaagctgctgatgatcataagcgcgctggacaatcgccttcaaccgctggaattgcaatgcgcgcaattgcgccggcggcaaaaaatccggggcgcttaccggatgaaacggaatatcggtaacggatttgctcatgaggaaggttacaggattgattgtccgcaaaacgcctccccgcccgccttccgcatcgtgcaaaaatcaaccccgcgggccaaccacccgcatggccacacagcaggcttgcgtttcgcgtgaacaccgcccccaccctaccccctccccacccccccggcaactccaaactgcacccttcgatttgcccctgagtcaattcgtaatcacctgatcaatttcgaaagtgaatcatgggtcgggacgtttcctcgatcatcagtctcggtttccaagttccgttggaaattggtttgaccggagcgtgggttcgcccaacatagccgcggcatgaaacctaaagcgtatgcggcggcgggggtggatattgacctgggcaaccgggtaaaggccactctacccaagttgctcgccgccactcatcggcgggaagtcctcggcaaggtgggcggatttggcgggttgtttgcgctggacacccggaagtaccgccagcccgtgctcgtttccagtgtggacggcgtgggcaccaaattgaaaatcgccttcgcgatggacaagcacgacaccatcggacaggacttggtgaatcattgtgtcaacgacatcgccgtgctgggtgctgagccgttgtttttcctcgattatctcggcaccggtgtgctcgagcctcgggtgttcaccgaaatcatcaaaggttttgccgtggcctgcgcgcaaaacggctgcgcattgatcggtggcgagactgcgcaaatgcccggtttctaccagcccggcgaatatgatgtcagcgggacgattgtgggagtggtggagaaaaagtccatgctcgatggccgtggtgtgcggcctggcgatgcgttggtgggactcgcatccagcggtctgcataccaacggctattcgctggcccgcaagattttctttgaacaaatgggcctgcgccctgacagccggttgccggagctggggcagactttgggggaagaactgctgaaggtgcacgtgagttacgggccggtggtgcaggcgttactcaagcgcttcaatgcgccaggggccccgcgccgcatcaaagcgctggcccacatcaccggcggtggttttgtggacaacatcccgcgggtgttgccatcgggatgcgatgcagtcattcgaaaaggtacctgggaagtattgcccattttccggctgttggcggaggtgggcaaggtgccggagcaggagatgtatcaagtattcaacatgggtgtgggaatggtggcgatggtggcggcggaccaggcggattcggtggtgcgcttcatccggcgccgggggcaccaggcttggattgtgggtgaaattgtgaagggccgcggcgtgacgcgagtggtttgacgctggaagtttaatccgccgggcgccagtcgagcacctggagctgcacttgagattgaccgttgtaccgattgatttggggaatcacggcaaggtcaaaaacgcccacaggccaatgtttgtcagcgcctttccaccacacggcttccatggtgaggcgcccatcggtcacccacagtttcaagtgctgttggtgggcgccgatgcgcagcgggacgcgctggttgaccaggcggtggacgcaaagatgcaccggcgggttgttttgcccaaaaggcgccaagcgttccaaggcggccaccgtctcaaccgttaattccgccaaagaggtgcctgcatccagacgcagagggggaatgagctgatcatgtttcaaccaacaacggcccaattcgttcaagcgcgtgcgaaaagcggggaggttttccgggcgcaaggtgacgccggccgccattttgtggccgccgtggcgttccaacaaatcgtgacactgctccaaggcggcggcgaggtcgaagccttcaatgctgcgcccggagccgcgcagccaggggccgtcgcccccaagaataatcgttggccggtaaaagttctggaggacacgcgcagcaacgatgcccaccacgccgatatgaaaatcgggatggccggccacgatgacgaaatccttttcagggttaaacgtggcttccagttgttcaaggagggtggagaggatttgtttttccaattcctgccgctcgcggttgcggcggtcgaggctggcggccaggggttcggcttcttccaaggtttcggccagtaacaagcgcaaggcttcctcggcggattcaaggcgcccggcggcattgacacgcgggcccagttgaaagccgatgtcgcgcacgcccaccggttcgcggacctgggccacagccttgagggcttgcaagcctgcgcggcgggtggtgttgatgtgtttgagccctgcgctcaccaagatgcggttttcgccctgaaggggtaccagatcggccaccgtacccagagcgacaaggtccaacaggggccgcaaatcagtttccatgaactcgggctgattcaggcggcgtccttctcgggtcaaggcgtgaacaagtttgaaggcaagtcccaccgagcaaagctcggtgaagggggcgtccacggcggagggatgggttgaaaaaggattgaccagggcggtggccggcgggagggctgccgcacattgatgatggtccagcacaatgacctccactccttcgctttggaggcgagagatggtttccaccgccgttgaaccgcagtccacggccagcagcaggtgggccggatgctgggcaagacaattgcgcgccgcatcctccgtcaggccgtaaccttcttccatgcggtgaggcagatatgtgcgcaccacccagccgtggcggctgagaaaaagttgcaacaaagccgtggcggaaacaccatccacatcgtaatccccgaagatgaccaccatttccccgcgttcacgggcggcccacaaccggctcacggcctcggccatgccgggaataagcaaggggtcctgaagctcgcgcaggcgcgggttgagaaaacggctggcctgcgcaggttccgagtggccgcggttgacaaggcactgcgcgaccaatggcggcagcgaaagctcgcgcaccaggcgttgcaccaacaacggttcggccggggcggtggaccaccggtatttcatgaggcacggccgaaaccggcagaaaagtttccatcaatcatgaagcagggatatagcaaacgaggctcaaaagtaaatggcgcgatgccgcggccaaatgttttcgggggggttgcacgaggccgctggagttgggccgccagcaaaattttcttccaagacttcaacgcgctccggtcccctgcaacacagcagggatggtgcggaagaggattttcaaatcgagccacaaagaccaatggtcaatgtattcaaggtccagacggacccattccttgaaatcgctgacgttgttgcggccgctgatttgccataggcacgtcaggcccggtttcacgctcaaacgccgccgatgagacaggtcatcaaatcgcgccacttccatgaccggcagggggcggggacccaccaggctcatctcgccccgcaacacattgatgagctggggcaattcatccagactgtatttacgcaagaagcggccgatgggcgtgacgcgagggtcctgggaaattttgaagacgggcccctgcatttcgttgagggactccaactcgtggcggagctgctcggcgttggtgaccatggtgcggaatttcaacatgacaaaaggcttgccatgcagcccgcagcgttcctgacgaaagaggatcggccccggactggtcaaccgaatcagcaacgcaatcagcagcatgacgggcgccagaataaaaagtcccaccagcgctccagtgtaatccatgatttgcttggccaaagattgccaactggcttcgggggcgctgcggaacaccacaaccggcaggtccatgaattcgtccagcgaagtccggtaggtctgtgttttgaagaagcccaccaccatccacgcctccacgccctccagctcgcaggcttggaggatttgctcggcttcccggaagttgctgtggccgcagtgcaccaaaacagcgtgggcggaatgttgatgcaaaaggcccgtgagaacttcgggtttattccgttccaaattcaattcggccaccaccgtggcggagccgggccctaaagatttgagcttggagcgcaggatttggaggtccccttcgttgccgcccaccacgataacgcgtttctccaattggtcgcggccatggctggtatggtagaggccgctgagaagcaattccttgcccatcaacaagagaaaactaataccaccatagagcacgagcacgccacgggccagttgctcgcggaacagaaacatggcgagaatggcggccagtgtagtaacaacgctggctttgagaatcatgagcgccgtgcgccgccgcgagaagaataggggtcgttggtaaaagccaaaccaactcaaggcaatccatgccgtgggggcaatgaccaaccaaagccacatgaaatcatcgaagggggcaatggggtcgcgtcccagaagatgctggtttttggagcgcagctcatgggccacccacaacgccagcaaatgcaggccggtgtccatcacttgatggacccgcgtgcgaagagcgctggaacgtcgcagcatgatattctttacaacctgatcgagccgagtcgtcgagccgggttgtccggcatccatttaagccccgatcggggcatcggcgtcaagtccccccatgccgtcaaggcagggctcgggcttgcgccttgaccggcggggccggtggcaactgaaactgaggcacggcttcttgaatccattgcaccatccacttcacggtggcctcttcctcacccggtgcgcaggtggtgaaaagggaaatgtaggcccagcgttgcagctcgccggtgcgcaacatgtgcagtgtttgagaccagacgcggcgcgtgtgcagcgccgaaatttcgccatcggctacaaaccagtaaagatacattccgcgcaaggtgacttcccctttgggggtctgcatggtcttagtggactggactttcatcaccggcaaggagtattcgatgggccgctgcatcggcacttgaatgatctcggtgtcgctggccttgtattcccaaccctggccgttgagacaaaactccggcttgtgaatgctggtgcggtcgccacccatgaggaccacactcaccaaaagtttccgttcatcaggccattcgtacaaacggcggccgtaggtggtgtcggagggcagccagatgagttcgagtttgctcaccggcaccgaagtggaggtggctcccatcacttcaggcggcaggtacacactttgtggcatgaccagccggccatcttcaccccaagtgggttcattaacgagtttgacccccggggcgccaagatgctgccgggttttggcctggttcaatgccatccccgtccctaccatcaacaatagggccgccacaaaaacctgcactgcgcgctttgtcatacgacttcaggaacacccgccggcggggggacgcggcgaggggtaaacagtttgccggtcaggtacaccattgcaaatcctaccacgtaaggtaggaaactcaacacggtgctgttatggacgtaattaccgccttcctgcccgaacacctggcctgcggccacaatgagaagcaaacgcaacacattgctgacaatggccgccggcacagccataagcacaatgatgccccgctgccacatcggtttgaaaaacacaaacccgtaaatcatggtcagcacaagcagcgcggtcaggctttgaatgccactacaggccggggcgatttcatattggaatttaccgctgggatcaaaaatctgcgtgccgttttgaatgaccggcacccccagcacgtgatgcgacaacgccacggtaatctgcgtggccactagtcgcagcggaaaggtgatggcctccgactgcgtggccaaaggcacgcaaaacaccagaaggcagaagggaaacacggttttcttcaaccacaaccatccccacaacaggcccgtgatggcgtaaatgcccaaataaaaacctaaaatggaaatgcgcgcctgctgggccaggtaaccgagcaggtgtagtcctgaggcgatggccagcagtcccagagccggccaccaaggcgctttgggcagaggcagtaattcctggcgtttccaccacaagagcatcaacaccagcaggggcatgtagtagccatgttggtcttcgggactccattcgtaggcgtgaatcatccaacccagaaggcttccggtcttgatgtagccgaaggtgctgttgccccaaaagtgaaacaacaaaatccacactgccagcagggcccagaagagttcgcgatggggaaattgggcccatgccgccgtcacgtccgcccagagttggcgggctgcagcaagcaaacttttttgctgttcggtctgttgggtggtggcttccacactcatgcgcttacgtaccgcgcattaatttagacaagcttggcacccaattcactcaaaaatagcgaaaaaaagatggtcttgtcctgaaacaggcaatcaaggtttaaaaagcggatcctccaccgtttgctgccattcttgcagggatttcttcaattgctccatcacatcggcaaaatttgcctcgccggaaagatcgcgtgtttcccatgggtccttgcgcagatcaaagagctgaacacggttggcctggggataaacgaggagtttgtagcgctcgtcgcgcaccatgcgttgatgttcccgataggcagcgtaaagcgtggtataaaccttatcttcgcgtccctgcataatgcccaccagactgcggccctccaccaccggcggcaccggcaggccggaaagctcacacaacgttggaaaaacatcgtgcaaatagcacagcgcagccgagcggcgattggacggcacaccgggcccgctgaaaacaagcggcacacgcacactgtgatcgtaaaggttttgcttgccgagcaacccgtgttgcccgacagccaaaccattgtcaccaccaaagaccaccaacgtctgccgccgaagcccccgagcctccaacgtgttcaaaatgcgcccgatttcggcatccaaatgcgatatcattccgtaataggctgcaatttcctgctgcaccgccttcggggtacgaggccaggggagcaatttttcatcgcggaccttgagctcaccattgtcgaaggggtgctccggtaaaaaattggggggcagtttgattttctcggggcgatacatcgcagcaaactccgggggcggcgttcgcggatcgtgcggcgcagtgaaagccacgtaaagaaagaaaggctgttccactggatgtcgctccaaaaattggatggctgcgttggcaaagagggtggaggaaaaaacacggttggtttggcggcggttgttcggatacgcgccagtgggatcgtagctgtgcaccggcacctgctcatgatcatgcatgccaccaaagaaaattgcgtcgcccgctgtaaaagcccgattgaaggaaggtttatcgttgtgccacttccccactgcaaaagtgcggtaaccggcggagcgaaagacctccggcatgagcactgcgggagtacggatgacatggtctgccgggcgtccctgcgcggcaggcaaagcagcgcggtacaaggtgcggcctgtcatcaacatcgcgcggctgggcatgcaaatcgccccctggcggccgcccatgatgtgggcgtgagtgaaggcaaacccttctttcacaaggcggtccaggtgaggcgtgcgaatggcggaattgcccagcgcgtggatggtatcgaaacgctggtcatcggccagcaggatgagcacattgggcggcggcgctgctgcggcaaccaccactattgttaaaaagcagatggccgccggaaggttgcgtaatcgtcggatcatgcctttttctatcaggctaccgccttgggggcaaaggcgaaaaccaagccaccaaatcaaggagatccgcgatttcaaggggtggctggcacattccagcgctcgcggtcggtgaggaagagttgctcaggaaagaggtcagcgtaggcatgtttgaggggaaagccttcaggaacctcccgccgcaaaaggcattgggcaatgaacatgccccagccctggttttcgccctgcacccactgggtgagaaagcggttgtccaaggtctgcggcgtcaaataaagcgccttgattggatgctgccggtggatcgcttggaaatcaccctcggaattaaggggcagccacacgcatgtgcggttgccgtaccatgccacggcccaagggatgtcactcatcatcaattcatccggttgcatccacgcggaaacagcctgaatgacccgcggcgcgtaaggcgggtaggccatcatgggcgagcgcggaggcagcagcttcaccaccaaaggtgccatggccaccaacaaaaacccgcccacgaacaatggccgcgcctcccataccgcggcgcgcgcctgatccaaaagcgtgaagaaaagtgccacaccgaacatgaccaccaacggtgtcatccaaaccaaaacgttttcggaggagacctcgcgcaacgtctggcgcggactgcccgacaacgcctgaacacccgtcaacaacagcaatgacagtagtacaaacaacctcaatcgcgacaacaccggtctgcggaaaggcaccagcaagccgacaagaaaaaaggcgctcacccatgtgccgccgaggcgcggcaaatcttccggcaccacctggcgcaggccctgcaccagtttcagcggcaaatccaacgcctccacgtgcgtaaaatcaggctccaaagaccgcggcaacgtgcttgcaggaaaactcggggtgccctcgtacaacacatagccggccgtgccgaagaaggttccgctcaattcataattccgccacaaccagggggccaccaccgcaagagacaccagcgaggtcataatcagcgccaaccagcggcgcacgccaagatgcgccagcacaaacaccaccaccggcaaggcaagccacgcgaaggcatagcgggtcaacacgcccagcccgagcaccaatccggtcaacgcgcccagccctgccatgcgccatccgctgcaaaactcctcggctccacgctccaaccacaccaaacaccagatcaaagccagcgcccacaccatgaccaataaggtggagccgccgctcatgctcacgcgccacaacaattccgtgcccatcaacaccaccgcggtcagccaggccaccccctcatcgaacaaccggcgggccagtgcgtaggccatccaaaccaccacgaaaaacaacacttgattgagaagcacgatggccagctcgggcaagggccgcgacggctttgcatccgccgcaattttgtcctccaaaggaaaaagtttcatcaagcccgacagcaacaccgggtaggccggaggataatgcaagtcgggcatgggctttcccagttgggcgggagccagcaggcggtcaaaggcctggcgttgttcgggagtccagcggctttcgtccggcggcaacttgcgacgcgcatcctcggccttgcgcacggcctgtttttgaagcagatgcacggccagcggatgaatgcttcgggtgacatacccttcgccgcgggccaggttgcgtgccaattgagcctgctccatggtctcgggcagttcaaagttgcgccaagcccgcacgtcataaatggcggccagccctgccacactgagcaataacaaggcaaacttcagcgaccggttgccggcgccttccgtccaatgataaatccattcctggatacccgacataaatgatacgctctttcggggcccgcgcctccacttgcgcaagctgtgcaagccaacatggagacagccccgccctcacgcaagttatttttgaaaaacttgaatttataaacgttctttgaaccagcgtcgcgttttttcccacatggccggcgtgtacacgtggccgaggccggagatgatttcattttcgaaatcggcctccgcatcataaaggcggtagatgggacgaacggcggcgtctatggcgcggatgccggagaccggagagccggcgtcctggtcgcccgtcatgaacaacatgggccgcggtgccgccaaggccacaacagcctcggtatcaaagtgccgcagcagcccgggcacataataataaatcccgtggtatttcagcccctcggcggcgatcaaatcttgataacgtgtgaggcaggccaccgccacaccggtcttggggcggtcatccaaagccatgatccaccaagtgcgcgtggcgcccatgctgatgcccgttacgccgatgcgtgccgggtccaccgccggatgggcggacaaatagtccaaagccatcaaatcatcccgcaccatcatcccccacaacgagcggccgtaccaaagttgaaacttgctggcgctcaattcaccagcgccgccccgctcggaggggcccccgggcccccggccattgcgctcgccgaaacaataagcatcaatggccaacaccacaaaaccatcgcgcaccaacgcggggccgggaggctccggcagggcgttggtgcggaacagttcttccttgcccacgtcgtaatgacctccatgccaatgacaatataaaatggccggtttgcgcgcagggccgtccttgggaatgaggaggtaaccggggacagtatcgccagcgccgttgtcaaaggtaaatcgctccaaggtgtagtaggtgcggtcttcacgcgagatggtttgaaccaccggcaccttgggacgaggcggcagatcccccaaggtggtccgaagggtggtgcggatttggcgtcgctgtttttcccacgccttgatgttggctggcgccttgaattccggcaccggcggcgccgattgcagccagtgctttccggcggacgactgaggttgtgccataagatgatgatgcaagagtccaaagacggccgacagaacggcccatttcaagtcaaggaatcgcataacaaaaaattacggtttgatcccatcaacgcaatgccaaaaccgaattaactcagaaatcaaaagtcaacggagccgggaggtgtacaagggcgttgccgattcattgaatcatatttgtggttacccaagcacagattttaaggctatctgccaatcgctaagagtcggccccctccctggccgcttccattgcgccttacatcgccaccagacgcacatgctcactttgatgttctcacgatgatgattgttttcattccgcgattaaagcttggcccgggcgatggcttttgctaacgtcccgcccatgccagagattgccaattacgtgagccacggggcgcgattgatcacgccggccatcatggagcgcgtgctgcgccaactccccatatggaaggttgagttcacccaaatcaacgcccccaagtatccccatctggtcacccagcttgaatttctggtggacgcagtggaggacttcgccgaaggcgcagacaaagacctcccctacgtcgccgtcgccgaggccctctttgccctcatgtatgcccataaaaaagtggacatcatccccgacttcatggcagccctcggccacgccgatgattccagcgtcgtccgcgccgccttgattcaaaacgaaaaggcatttgccgcctacgcccaacgccaaaagcgcgactggaaacgcatctccagcaagccttgagattcagcgcccctccccgctgcgggccggatcgcgtgccgccaaaaacgccaccaaatccgccgccatcttttcactaaaaccaggcacctcggcaatctcctccacacgggcgcgccgcaatcgctgcaccgacccaaactttttcagcagcgccgtcttccgctgctctccaatccccggaaactcatccaaaatgctctctgaaatcttgcgcaatcgcaactgggcgttgtatgcgttggccacccggtgcgattcatcccgcacccgttgcaacaacttgagcgccccccggtcatgcggcagccgcagcggctccgactccccgggccggtaaatctcctcaaattccttggccagccccaccaccggcacatccccaagccccagcgcctgcagctccttgaccgccgcgttcaactgccctttgcccccatcaatcaaaatcaactccggcatactcccacgcccgccctcccgcaaaacacgcgtgtaccgccgcctcaccgcctccgccatgcacgcaaaatcgtcctggccggtcacccccttgatttgataacgccggtaacccggcctgtcgggccgcccctccacaaaccgcaccaacgacgccactgccagcgtcccgctgatgttggatatgtcgaacccctcaatcacccgcggcggcctttccaatcccagggccgccgccaagtccgccaaatccgcctccggattcagcgccacaggaagattgtgcggcgtccgcgtaaatgtccgcgtcttgcgcgtggtttcctgtagagaggccagcaaatcccgcaactcggccgcccgttcaaactccagcttttgcgccgcctgccgcatctcctcctcaagccgccccgcaagctcctcacattgccccgccaaaaaatcacacgctgccaacacttgtgcgcggtactgttccaatgtcacgttcccaatacaaggcgcagtgcaaaacttcaaatgcccataaagacaatgcttgtaatccgcaggcccgggattcaacggccggcacccgcgcaaattaaactgtcgccgcaccagcgtcagcgtcgtccgcaacgcccgcccgctcggaaacggcccaaaataccgggccccatcgtccgttcgcagccgggtcaaagtgaaccgcggaatgggatcctgcagattcaccttcaccatcggaaaccgcttgtcatcccgaaaactgatgttgtaacgcggcctcaattccttgatgagccgcccctccaacaacaacgcctcaggctcgctccgcaccacgtgcacatccaaatccgccaccgcctccaccaacgcattcaacttcaaatcccacgccatccgccgcgacggttgaaaataggagctcacccgcttccgcaaatcccgcgccttgcccacataaatcaccgtccccaggcggtccttcatcaagtacacacccggtttgtgcggcaactgggcgagcttctgtctaagcgcttccgacaccggcatgcctccattatgcgccccattcccctccccgacaaccgcgattccacgcctattggccaagtttattcagaatttggctttacccttaaagcgattgacaaagcccctggagatgggaaatatgctcatcagttgcggttaatctcgcactgacgtgaattagatttgtccaacaacacaaggcgggattggctgtttttttgctttggcatttgacagaaaaataagagctattgtttgaactaatatcggtatgaaaattgtctctccacaggaagcggtcaaagtcattaaatccggcgactgcgtacacatccacgccatcgcctgcgtcccccacaaagtcgtccaggccatggtggaccgcggtcgcgccggtgaaatcaaaaacgtcaccatccgccacctccacaccgaaggccccgcccattatgtggagcgcgacctcgaaggcgttttccagctcaattcctacttcgtgggccacaacgtgcgcaaggccacccaggaaggctacgccgattacattcccgtttttctcggtgaaacccagcgtctcatccgtgaaggctacaccccggtcaacgtcgctctcatctctgtttccccgcccgacaaacatggttttgtctccctcggcacctcagtggaagccaccctcgccgccgtcgaatgtgccgacaccgtcatcgccaccatcaaccccaacatcccccgggcctttggcgatgccatgattaagaccgacatgattgacatctggtgcgaggacgatgcccccctcgtcgaggccaatttcgccgcacccaatgaagtcgaacaggccatcggcaaacacgtcgccgccctcgtcgaagacggcgccaccctccaaatgggaatcggcgccatccccaacgccgtcctggcccagctcggcaatcacaaaaacctcggcatccacaccgaaatgtttgccgacggcgtcctgccgctcgttgaaaaaggagtcatcaacggcaaggaaaaagccattgaccgcggacgcatcgtcgcaaccttcctcatgggctccaagaaagtgtacgacttcatccacgacaaccccgaagtcatgatgatggacgtcggctacaccaacagcctcgatgtcatcaaacgcaaccccaaggtcaccagcatcaactccgccatcgaagtggacatcacaggccaggtctgcgccgactccatcggcaccaaacacttcagcggtgtgggcggtcaaattgacttcctccgtggcgcctccctttccaagggcggcaaacccatcctcgccatgccctcgcagaccgacaagggcatcagcaaactcgtccccaccctcaaggttggcgccggcgtcgtcaccacccgcgccagcatccactggcttgtcaccgaatacggcgcagtcaatctttacggaaaatcactccaggaacgcgcccgcctcatcaccagcatcgctcaccccaaccaccgcgaaatgctcgacaaggccgcctttgaacgctggggtccccatttccactacatcccggccccctggaaaaaatagaaatcctcaatcattcaccccgcgcccggcccccaaagccgggcgtttttttatgcccacacttgcccccccgaggctggcctcaactttttaaaattccatttgatgaaatccgcccccgcattcgtctaatcccgtggacctatgaacaaccaaatcaatcgtcgtcgtttcctcaaagccggtctctttaccacggctgccctcaacattgtccccggcggagtcctcggccttaacggccaaacccccgccaacaaccgcctcaacatcgccggcatcggtgtcggtggccaaggccacagtgacctccgccaaatgaaaagcgaaaacattgtcgccctctgcgatgtggactggcggcatgccgctggcacttttaaagaatggcccgacgccaaaaaatacaaagattaccgcaagatgctcgacgaaatggaaaagagcattgacgccgtagtcgtcgccaccccggaccacgtccacgcctttgcaagcatcgccgccatgcagcgcggcaaacacgtctattgcgaaaaaccgctcacccattcggtgtgggaagcccgcatggtcgcccaggtggccaaagagaaaaaagttgccacccaaatgggcaaccaaggccaggcctccgaagaaactcggcgcttgtgcgaattcgtttgggacggcgccatcggcaacgtcctcgaagcccacatctggaccgaccgcccctcgcaaggattgtttaatgaatactggccccaaggcgtcgcacgccccaaagaaaccccacccgttcccccggatttggattgggatttgtgggtcggccccgcccccatgcgcccctaccatcccgcctatttgccgttcaaatggcgcggctggtgggacttcggcaccggcgcgctgggcgacatcggctgccacgccattgaccccatcttccgcgcttgcaaattgaccgcccccaccagcgtccaagcttcctccacccgagtcaacaccgagacctaccccctcggctccatggtcacctaccaattccccgcccgcggcaacatgccacccatgaaactggtctggtacgacggcggtttgcgcccgccgcgcccggacggcttgcccgacggcgtaaccatgggcgacaacggccgcctgctcgtcggcgacaagggtttcatcctcggcaaccgccttttccccgaagctcgacgcaaagaatacaccgaccctccgcgcaccatcgagcgctcgcccggccattaccaagaatggattttggcctgcaaaggcggcaaaacaccaggcagcaacttcgcctttgccggccccctggcagaagccgtgttattgggcaacgtcgccctccgcgtccaactccgcgaggaactcacccgcaccaagctgctttgggaccccgtcgccttcaagttccccaactgccccgaggccgacgcctttctcaaacgcgactatcgcgagggctggaaattaatctaaagccggagcctgttcacaccgccttcaaggcggcttgcaaatagcccagcgcatacgccatgccggcgtgccagggcgcagcacaactcatttgcggggcgtgatcgggaatgatcacccccgcaaaaccgtttcgcttcaaaatccgcaaaacctccaacacatccacatccccctcgtctataaaggtttccttgtacgtcggcaccttgccccgcacattgcgaagatgcacatacgcaatccgcccctgccggctgtacgcatccaccgcctcatacacatccccctcggtcatttccgcaagcgtccccacgcaaaactccagttgattccgcgggctcggcaccaaatcaatcaaccgctggtataaatgcggttgatacaccaaccgcggctgcccgcgcaccgtcggcatcggtggatcatccggatgtgccgccaacgtcacccccgcctcctccgccaccggcaacaccgcctcaagaaattcacgacaccgccgccaaagctcctccggagtggccgggggtacgttacccggcggcgcgttcggatcgtaaatcatgttccaaaccatccctctcggcatgggcttgtccatcggcccattcattcctaccgcctccgcccctccacgggcaaacggccccttcacccgcccggccacccccgcgatggaaaagttgtaacccataattggaatgccggcggcaccaagattgcggatgataatcttcaagttttcaagctgctctgccttgcgcggcccatccaacaaaacgtcgtgccagtgcgccgggtcaaaattttcaatggcctccagctccaaccccgctgcgttgacccgccgtctcagatctgtcagctcctccaccgtccacaggtgatgcgggtccccagccagcccccaaccggtgtcatcgcccaccggctggtcgccgggacgattgctgcgcgaagaccggaaataatccaccaaatgcgccacgatatgcgtgcagccgcattggcgcgcaaaacgaaaatgctcgtcatccaactgatgccggtaaagccccagtccaagtttcatgcgaagtcagaattaaaaaccaatgctcgcccccccatccaccggcagaataattccagtgacaaattgcgccgcaggcgaacacaaatacaccgccgccatgcccacatcttcaggcttgcccagccgccccatcggagtacggctcaatattttttgacgacgcgccggatcattcgccagcgccttctcagacatgtccgtctcgatccacccgggcgcaatggcattcactcgaataccgtgcggagacaattcagttgccaacgcccgcaccatccccacatacgcactcttggctgcactgtaggccaccacatacggaatcccaaacagcgatgccatcgaagcaataaataacaaactcccccgcccccgctccaccattcccggcaccaccgcccggctcagcgcatgcgctcccaaaacatgcgtcgtcaagacctgcaaaaactcctcctcagtcgtttccacagccggttttttcaaatgaatgccggcattgttgataagaatggtgatggagccatgcttcttttgcacccgctccacaaacgccggagcctcccccaattcatccacatcatgcactgcatagtccgccagcggcccaatcgtccgcacagccgcctccagtgcagcctgccggcgccccactaaaaccacacgcgccccggcagccgccaaacaccgtcccatcgccaaccccaaaccgctccctccccccgtgatgaccgccagctcattttgcagccggaaaggacaaggccacccttccaaatcacactcggacaccttcgtttgatgaatgttcagttgttcgttcatgatttcagcgccgcccgcctatggcgaacagcatcgggccggtaaatgtgggcacgttggcttcatttggcaaatccgaacctccccaccgcccccatccttcaaacctcatccccgcggccaaagtcgaaaccaaaacttcatcggcgcccgcaacaacaaatcccgcaaaagatcctcaaaccccgccgccttcggttccaccagccggcgcgtgctcaacaaagccgccaacgtcaccaacgccgccgccgcaaaaaagatgctataccgattccattccaccccggttgtttgatgccggaaatcaccgatggcatcaatcatcatgccccacaatatcggagccactccttgcgtgacgttccacgccacagaaaaaatcgcaaaaaaatggttgcgccccatcaccggcaccgacgccatcgccagccgcgtaaaagccatgttggccgaagccgcaaacaatcccatcgcgcccaacagccccatcaacaaaaccggcgacaccgccacgacgttggccgccatcaaccaccagccgcccaaaatcaaaacaaataccccaaacgccaacgccatcaccggcctgctccccagggcatccaaccggctgccaaacaaccaaagacttcccatccccccaaggtacaaggccgatgatagcaacaaaattcgcccctcggtcagcgctgcttccgtcttcaaataagccaccggaaacgcctgcatcccaccatacaccaccgcccacaacatcaccgtcaccaacaaccgctgaaacggtggatgccccaaaatggccccccacggcacttcccctgtccccccggccggttcttgcggcaccggcacatccggcatgcgcttgagaaaagtcagactggccgcccccgccaccgcgctgaaaacaaaaagcaaactgaaatggacaggttgaggattactccccaaaaacaaggcagccaccaaaaacaccacaatgctccccaagttgaccaccgccgcatcccgcgccaggtaacgcccccgaatctcttccgggacaaggctggtgatccacggcagccacgcacaactggaaatgccccgcgaaagattaaatccaaaaagcaaaaacaacagcagcgcaagctgcgtgcccttgtccaaaaatgcacccagcagcggcaccgcggccatcccaaaaataaacgccactcgaattccccatcctgcatacacaaaccgccggaaaccaagccggggaatgtattgcgcagccggtatttgaaaaataacgagcagcggcatcatgctgaccacaacccccaacaccgtggcgctggcccccaaactccgcgcatacaacaccatcgggctgctcagcacgatttgaaaggacagcgcgttgaacaacgcaaaccagtaagcgttacgaaaacccggaggcagtcgcggcgtttctgtcgttgttgatgttgaaacaggcatggaatttttggacaaagacgggcgcccacccatcaatatccccgcaaagccgtgcttgaccgcgcaggcaatccgggcgctggcgtccggcgaagcaccacatactcaatcccgttggcctcgcaaaacgcccgcttctccggtttgtcaccatcttcattgacggcgtaaatgtccgggcgcaaccgccgtatctcgggctcggcatccaaccacccccatcccgaagtaaccaacgcctgcgtaacgtgccgaatgctggccaccatataccgccgctcattctccgtctgcattggatggccttcccctttcaaatgccgcacattcgcgtcattccccaccgccacatacaaatccccaagcgcagacacctcctcaaaaaaccgcacatggccggagtgaagccaatcgtaacaacccgttacaataacctttttacgccccggctgaatcacccccattggcacctcgggaaaaccagccaacgcctcctcaggcaaaacatccgcccgccagccgtgctgctcacataactgccgccgctcacgcgaatcttcttccaccgggtaaacccaagccgccgcagccttgggtgccgcctcgggcacccccacattagcccccacaacttccacggcgctgacaaaccgaatggcttccacaaaataccggcgctcagccagaggaaatttgggcggacgccccgtcgcacgcaccaccgacgcgtcatcccacaacaacacatgcacccgcccccggcgcgccgcttcctgcaacaaccgcacatgccgggagcgcaagtcatcaaaagtccctgccaccaccactggaagttgctcattcatgcgttaaatccggatgcatggatgaaatgcgccgggtaccggttcctccgacaccacatacaaataaccaccaccacaccccgaatacatggccccggcataacgcgcttggtaatacttcaaaatggccttcaaatccaccgtcaggaacggatgccgcaccgtgttcggcagcagatattcccaacaatccatgcactcgttgagcgagcgccccaaggcccccgcatcccgtgcaagaatggccgcataacaatccttgcccgtttgcccaagccgccgcacccattccggctccaaacgctgctcgcccaacggatgataaccggggggccgcggcgcgatgggaagaatatgcaggacatgagccaaccactgcgcaatctccgaatcccggcaactttcaatgtgtttgggaaacagccccccttcatgcccggcatcataatccaaacgattgatcccgggataaagcagtccaatcatgtcctgcgaaccggaaggatcacttttgccttcgttttcggcgttgtaaagttcacgcaccaaaacggcaggctccccctccggcaggctatccccccacaattttcgcgccacagcacgtgtgcccgtggccaaaccagcccggtccatccaaggcggcaccggctccagattcaccaccaccatggagccgggcggcgatggattccaccgcgacacaaagggctggtcaatccaacccccggccaaggccagccgatagggcaggtttccccaaggtggtgttggtgtggccccaccggcaggcccggcggcatggcaaaagttggattgggagctgcccatccgttaatacaaatcccgtacggtgtcctcaccggcctggcgtttccggtattgatcctcaatccacttgtaagtggttttcaacccctcgcgcagcggtatggaaggctcccatcccagcatttgtttgatgaaagtattatcgctgttgcgccccgccacgccgcgcggagcattgagatcgtaatgacgcttaagtttcacaccaccgatttcctccaccaacgaaacaaggtcattgatggaaatcatctcgctggttcccaagttgaccggagtggccttcagcgcatcggtgtgcatgatcatgtcaatccccaggacacaatcatcaatgtacatgaagctgcgtgtctggttgccgtcgccccaaatttcaatctccagctttcccgtggccttggcctcgatgaccttgcgacaaatggccgccggcgccttttcacgtccaccatcccacgtgccccatggcccgtacacattgtggaaacgcgcaatgaacgtcgccagcccccgctcggcggtgtactcctggcaaaacatctccgacatgagtttttcccacccgtacccccgctccgccatggccggataagcatccgactctttcagcgcacggcagttgggatccttctgcaattcggtgttgtacgcgcaggcggagctcgaaaaaaaataccgccgcactcccgcccgccaggcatgttcaatcaaatgcgtgttaatcaaaatgctgcgcagacattccacgcgaaaccgctcaataaaacccattccacccatgtccgcagcgagattgtacacttccgcagccccttccacggcgcggcggcaattttcctcaaccttgaggtccaagctcaattcctccaccccgggaacccgctggtaccaatgcggcagcggcttccgatccaccgcccgaatccgctgataacccaagtctttgaagtatcgcaccagcgcgcccccaataaacccaccggcacccgtgacaacaatcaattcatccttggcggcacggttttccatccacggacgttcagttttcgcacaaggggctgagctggcatcagttttggtttgtgtttgcatagcctgtatccattcaaaagccgcgccaaactatcattgctcctccccgcttggcaatgaaggagatttcctcctttcgttcacaccgccgccctgctatccctctgatggcatggttgcgcgcgtgacacttgaaatcgccctgcgcaaagagttcgactacctcatccccgccgacttggaaccattggtcgaaatcggcacgcgggtgaaggtcccctttggcggacgcgaagtctcaggctgcgtcacagcgttgctcgatcaatcctcccacccacgcctcaaacctatcatcaaaatcctcggctcccccagcctggtcacccccaaagtgctggcgttggcccgatggattgccgagtactattgctgcgcaccggaagtcgccttgcgctccgttttgcccgaggccgttcgccgtgaaaaagcgggatggcgcgagcgcctctgggtccgtgtcatcccccgcttgggcgaaatgcccaaattaactgcgcgccaggaggaagtctggcgcgtcgtggaagaaatgcgcgccctgccaatgcaaaaattggcagccttgaccggcgccacacctcaaaccatccgccgtcttgaagacaaaggtttgattaccatttcacccgaagtggacgaacgcgacccctatgccaccgaactgattctgcccacccaacccctccccttgaacgccgagcaggcgcgggccttggaagccatcacccgctccatgggccagcccggccaaccgcccccggacaaacccacagtctttctgttgcacggcgttacgggcagcggcaaaaccgaagtttatttacaagccatcgcttacgccctcagccagggccgcggtgccatcgttctggtgccggaaatctcgctgacgccgcaaaccgtcgagcgtttcaaggcccgcttcagcagcggcccacatcaaactctcgtggccgtcctccacagccacctctccgcgggtgagcggcatgacgaatggcataagatccgccagggccgcgcccgcatcgtcatcggcgcgcgctcggccatctttgctcccgtcgagcctctcggcctcatcatcgtagatgaagagcacgaacactcctacaaacaggaggaagcccctcgttaccacgcccgcgatgtggccgtcgtgcgcggaagccgcgaaaacgccgtcgtcgtactcggctccgccacgccatccctggaaagtttctacaatgcacgccgcggcaaatacgtcctcctggagctgccccaccgcgccgacaacaaaaaaatgccggtggtccgcgtcgtggacatgcgggccgagctccgccgcgaacgcggacagctccaggtcttttcacaatcgttgcgcgatgccatcctgcggcgcctcgaacgccacgagcaaatcatcctcttcctcaaccgccgcggttacgccaccgccctggagtgcccccaatgtggctacgtcgcccaatgtccccattgcagcgtggccctcacctaccaccgcccacaagcccaactccgctgtcacatctgcggttacaacgccgaagctcccacggcctgccccaacgcacaatgccgcaaccccgccattcgcttcgcaggcctgggaacccaaaaagtggagcacgtcctcgctcgcctcttccccaccgcccgcatttgccgcatggactccgacgtcctccaaagaaaagaggactaccggcgaatcctcggaaacttcaaggccggcaaaattgacatcctggtcggcacccaaatgattgccaagggcctgcacttcgaaaacgtaactttggttggcgtcgttcatgccgacatgggattgcacctgcccgacttccgcgccggtgaacgcacttttcaattattgactcaggtggcaggccgcgccggacgcggcgaagtcgaaggcgaagttttcgttcaatccttcaccccctttcatcccgccattcaatatgcgcgccgccatgattttgcgggtttcttcgagcaggagctcgagttccgccaacaactgcgctaccccccctttacacgcatggcccggttgctttggcgcggacgcaacgaagaaaaagtggccttttttgcagagcaatgccgcaaaaagctcgaagcgttgactcaagagctccccgacttgatggtggccggcccagccgccgcacccctggcgcgagcggagactttttaccgttaccatctgacgcttcgcacccgccaaatgaccaagctcagctccgccctggcaacgttgttgccaaccatgcccttgcccgaagacgtaagccttgtcgtggacgtggaccccgtcacgttgctttgactcaccttctttaactcacagctcacctcttgggcaaccggtcgaaagcctccagcgccacctcccgcgcaatggcatggttgacaatcggatgaggataagtccgccccaattccacaccggcctgcttcagaacatcagcaggcgcctcccatggccggtgaatccatgtctccggcagaccggcgagctccggcacccaccggcgaacatacgcgccacccgcatcaaatttttccccttgggacacaggattgaacacacggaaatagggcgccgcatccgcgccgcaacccgccacccattgccatcccagcgtgttgctcgccaaatcggcatccaccagcgtgtcccaaaaccatcgtgctccgtgccgccaatccaccaaaagatccttcaccaaaaacgatcccacaatcatccgcacacgattatgcatccatcccgtagcccacaattcccgcaaacccgcatccacaatcggataacccgtccgccccttctgccacgcccgcaaaacctccccaacatcctcccgccacggaaattttttgaagttgggccgcaacggctcctccggtgtatggggaaaatgccacagcaaatgatacgcaaactctcgccaccccagttccgtcataaacggcgaatgaagccacgccgcatccgcgggacgctgcgcctccgcccaccgacgcaaccgctgcccgatttggcgcgggctgatttccccaaaatgcaaatgcggcgaaagccgcgaagtccccacctctgccggcaaatttcgtccctcggcatatcgcacaaatgccgactgcaaaaaccgctccaactgccgctccgccccctccggcccgggctgccacgtagcgcgcaatccaccggcccaatccaccttgggctccaattccaactcttccaacgcaaccgatttcggccaccccttgggcgcaggcaattgctctggcgccggcagcggctcggaaaaaagtgtcgcttgcgtcaaacaatgtttccagaaaggcgtgaacacttgaaaaggttgcccgctccggtttttcaccgtccacggctccaacaacaaagcagcattccagctctccacctccaccccttgagcacgcaacgtttccttgatgcccttgtcccgcttgatgatcgcaggctcataacgccgattccaataaaccgcatcagcgcccgtttccttgatcaacgcttgcaaggtggccaagctcccccctctccgtatcacaagcccactgccccggcggcgcagtccatcctccaaagctcgcaacgatggatgcagccaccatttcgacgcaccccccggcggccaatctccctcttcctcaggcgcccaaataaaaactggaatgaccggctgcccccgtcgggccgccgcgtgcaaagccggctgatcttcccaacgcaaatccagccgaaaccaaaccaaggtggcactcatgatttcccctaaacaccaagccaatggataattaacaaacgccggttggatacccgcccatttcaaaaacagttcccacgaaataatactagtgcctcaacgtcgcttttccaaaccacgcccccgttgtatgagcagctcgcggctgtcgggcggcacgtcatatttctgtgtctctccccacggccaccgcacttccactgcttgagtgtccgccggcaataacaacaccgcgctgtcctgtgaataccatcccccgcccgcatgaacttcccataccggccccgccgcattttgacgccacgcacgcacctgcgccccaacacctgtcggattcatcggccccgccgataggcgcactcgcaaaccaggccgtgcactgacgttccgataaagccgcgtttccgccccgttctgagtcacggccaaatccacccgcccatccccgtcaaaatcagccaccgctgcgccacgctgttcaccatacactttcacgccggtccgtgtgccctcagccggttccagttttccctcgcccgtgttgcgcaaccacaaaccgcggccggcatccaatcgcgtaacccccgcctgcgtggcaaaaaagttctgactcaaaaaaacatctggccatccgtccccgtccatatctgccgcgcagacactccacaccggcgcccattgagccatcggtggcaacggcgcaacttcccagcgttgggcccgattgaggaaacgatgcgtctcaagcgtcaccgctttgagctcatgcgccgtcttgaatttttccccaagcaaatcagccacagtggccttggcgtacaaggcatgcttgggatacttaggcgcaagaaaaggcagccccactttgttatccgtcaacggcctcctcggcaccacccgcccgggtgtcagctcctcgtaagcctccaacaaatccacctgtcccaaaccattgaaatcgccgtaataaagccgcgcaggaaactttggcgaagcctggtagtggctgttaagcccccaatttccagctacaagatcaagccgcccgtccccatccaaatccaccgccgccaaacccgtccaccatcccgtccatccctccaaccccagctcccgcgtcacttccttgaatgtgccctgttcattgaagaaaacccgcaccggcccccactcacaactcaccgccaaatccggacgcccgtcttgattgaaatccgcaaatatcgccgccgtcaccaaaccaagctttcggaaaaccgccgcatgacgtgcatccgctttgagcaccccttgctcattcaagtacaattgcgaatccaccggctcaggatatcgcccgggggaaacacgcccccccatgaacacatccaaatctccatcgccgtccacatccgccgcagccaacggccccacactttgccctttttccgcaggcaagacggtggaggcccccccttgcacagcaatcagagccttgctgccctgccccggctccaactcccaactggacatccccaccaccagcgcccgctgtgtcggcgcaagctggatgcccaacagcgacgtcgtatcctggttttggattccgcccatgtccggcaacagcgtccacccccctttaccgtcattccggtaaatgctgattttccctccagcgcccgtacccacaatcagatcatcccaaccatccccatcccaatcataccacgtcacccccggcccggattgactcagacggttgggcaaaagcggctgccgcgcaaaatcatcgtaagccacttcatgatgacgatgccccagtttctccgaaacatcctcaaacatcaacgccggcggcgcagcccgtggtggcgccggatttgccacggcgctggattgggcaatttcataaacccgattgggacgcgcatccgcaatcaccgaccgctgtcccccgggccacaccacttccacagtcagacgctcagccgagcccgccgcaaatgtgcggaccgtatcatcacatccgagataacgccccccggccaacatctcctgaaactgcatcggcaccgctccgccacgcaccgttacccttgcattgatgccataggtattgggcgcaagcccgcgcaaacgcaccgccacccgcggcgccggacaattgttccgataaaccagtgccggcgcattcaaacaattcaccaccacatccaaatccccatcgttgtccaaatccgccatcgctatcccatgcgaaatctcttcggcatgaaatccccattgcctccccacttcttcgaaccgcaggttaccaagattccggtaggcgtaattcggacttaaatacggtggtatttccagtagccgcgcccgaaattcctgcaggttgcgctcctgcgaaactgtccccgctgcatcgagcatgtccatgtcattcacattgtgggagtagccggtggtcaccaaaatgtcctcaaacccatccaaatccacatctaaaaacgccggcacccatgtccaatccgacgccgccacctgcgccgcatacgccaattccgcataggtgccatcaccccggttccattgcaaaacattgcgcgttgtcagtatccggttttcaatcgcacccacaggcggatggacaaatttcatgccggtaagctggcgcatcagacggtcatgcgtggtgggtttcatctccgtacagaacaaatccagcaacccatcccggtccaaatccccgaaatccatccccatgctcgcaaaacacatcgtccgcaccgccagccacggcaccgcccgaaacacccctcccccttgattcaaccaaaacctgtccggcgtgtgaaaatcattggccacatagatgtccacccgcccgtcgtcgttcaaatcacgcaactgcaccgtaaatccgtaatccatcaaattggtccggatcggctgcccattctcatcaagaaaccagttcgcccacgattgaaggacaaaacgtcccccgccttcgttgatgtacaaatcatcctgctcgcccacctcaatcaacatgttcccctcgattttcaatcgccgcgcccaacgccccgtgaccacaggacggccattcacataacgcaccgagtaattgcccccgccgcgaagtatggtctcctccccgtaattggccacatacaagtccaagtcgccgtccccatccaaatcccccaaactggcactcgtacccccgcgagtattcgtgaatcccgtatccgtcttctcggtaaaatgtccgcgaccgtcattcagaaaaagccgggcgccccgtccattgaatgtcacaataagatcaaggtccccatccccctccacatccgcaaagacagccccgcggctcaactggttcaccagccccaacccgctgctcgccgtcacatcttcaaatcgccagcctcccaagttgcgatacagggtattggtgccattaaggctgcacaggtaaatgtcacaccacccatccccatccacatcccccaaggccagccccgaaccattgatcaaattggcatttcgggcgtcactttcgggagtaagcaggttgacaaatgcgatgctggtttgttggggcggcatccgggtaaatccggcggagaaatttgtggcaaaagacaaatcgcgatacttgtaaccgttggcgactttccagtccaatgccggagcacccatcaggccatcgctgaccagaaggcaacacgccaacatcgcccattgtccggccttcccggcagaaagccgccgattgcgcaccattttttgcatcattacgggtaagtagcgcccgcaaatatgcccaatcgcaagggaaagacaatgagatttggtctctttccacgcacaaattcactgttttccgcaaaaacgcccccttcaaggggccaccgtcagaccagagggagccctcaagcggtagccatcggaaaacgtcaccgtcaacggcgtggtttgaaaattataaaccgcatacgtcttgcgcccctccttgcggtacacattgaaaaaaggataatccgccgtcactcccgtgtcattgagccccaaacggtcaagggtgtgaatccattgatacataaaggcgcgggtattgccgctttcaattttgttttccgggtgcgcctccaaatacgcagcagcagccgccggctccgccaacgcgcggaacatcaacaccaaatccccccaacccgtgttgtaatcgctcccccctttgcgccgcgccacaatccgatcatggttctttttcacatacgccggagaccgccccatataaacactggccggcgtaaacggcaaccagttgatgccgtgaatgcaatctatgtccccggaaaaccacgtggcaaatgcccctttgccgccccacaccatccccaacgccacctccggaaaatcctttggaaaattcgtgcccgccacgtcaaaccagtattcctccaccgcagtccgctcgatattgaacaaggccaaacccgtatcccgcaaagcacgattgccggtggcctccccccacaacatcactccataccacgcattgagcgactcactcgatgactcctgattgttgccatcggcaaaattcgcatcgcccgatgcccacgagtgccccgcgtatttgtcaaaacaacgcaaataaggaaacatggcatcccgcctgtcggtcgcggcaatgtcacgaatcaacatttccaccatcggcccccaacgccgcgcccaccccgcatccttccgggccacctccgctgccgcgcggatgaaatagccgtaatgaaaatgatgatcattcagtggtaaatcgcttccgtaagatggccggctcccaaccagcgttccccaacgtgcattgtaatagaataccacctgctccttcccgggcatagcgctaaaccattgctccaaacgccgcttgagctcgccaagaaagacctcctgcaattccggcgcccccgcagcctccgccaccccgctcaaagtcgccagcttgccaaggtgcttcccctcccaataagtatccccaaacccggccggtttcttgccggcctcagcccgcaaaagctccaccgccttctcgcggctggccagcccctgcccgggtaaaaacggcagcaatccctgcacgggtatctgcgtggtaaatccagccccctcgcccactttcatcaatccccgtaccgaattgtagctgagctccgtcaacggactgcgcacatatttccactgatgcggatacaaggcaaaaatcgtccccacgtcagccccctcctgcggtttgaacgcataccggtaagtcgcgcgcacattcccgccttcatgcacatactccaaccgcgtatccaccacgtggttgtgggcaaacctggcaaaacgcgccaacgtctccggcttgtcatccggcaaaaccgccaccgtaaaatacgttttgcctccggcaaaattggtccaacttcgcccctccaatcccgcccaagtcgagcctcccggaccaaaaagcccgtaatgatgaccattcaccgtgatccccagcgttgcctcccgccccgtgccgctccacaaccgcggcgtctgcgaaaatgtcaccaccggctgcccatcgctataaacacaatagacatacggactgccatgcccaaagctcgtgcgcaaccgcgccttgttggtctcaaaaacaacgctcacaaaccaatccgaccaccccccgcacaacgcctcgggaaaattcgccgcagccgagtgccccaacattaaatcgccctgccttccgccgccgctgccaaaaatccccgccgaggttgcgctcaccctggccccatgctggcttattgccagtccgttggaggtacaacgcagcaccaacggatgcgcaaaaagattctgcgaatacggctgccacaccaaagaactccaccactgccctgtaatcatcgggcctcgcaaatcctccgtgcgatatatccgctccggcagtgccttgcagggacgcggcgccgaactgaggtaacctccctcacccactttgatgaccgccgacccgtcgggcgtcgccgaaaaacctggagcccctcccaccaaaagcactacccaccccaacaatccaaaacgcatcacacgcagcagactgcccccatggtgaatcataaaacagcggatgttcatggcgcctacctttaagaatttcggcgccatttgtccaaacaaaccaaaaaagccagcggcccacctcccccccgaagacctcaaccgccctgctcagccctcagccaccggccacaatcttgactatctccagcctgtcgccctcctgcaaccgccgctgcccaaactccgagggcgcaagcgcctccccgttcaactccaccaccacactgcgcggatagaacttttgggccaccaaaaactcttccaccgtgcagggaagcacggcctccacagactgtccattggcaataacttgaggcatggcccactcacacccccgccagcgcctccgcaggcgcagcggcaatttcatccatcgtcaaatagcaacccggatcttccgcccacggatccccaaatacctgctcggcacgcacccggaatccgcccccgcaaatctcctgaaaacggcaaatcccgcaccgtcccttgagcaaaggccgccgattccgcaaaccattcagaatcggatgatccgttcgtgtccaaatcttgctaaacggcgtctccttcacattccccaaggttaccgactgccaaaactggtccggatgaacattcccctgcgtgtcaatattcccaatccctacccccgaactgttcgcgccgccgccgttccacttcaacaaatcataaacttccttggcccgcggcgattgctcccgcaagagccgaagataaagaaacgcattatccgccggctggtccaccgtcagcacctcccgcgtctttccgttctgattccattgcatcgtgcggtcaatgatccggtcaatcgccgcccgtgtccgggccggcggcacactcacaaggttggctccccgcccgctgtacaccaaatggtaaaaacaaacccggtcaatgttctcaaattcaatgaaatccaagatgcgctccaaatcatccaccgtgttgcgcgtcagcgtcaatcgcagccccaccttttgccccaccgccttgcaattccgaaacgcctctatcgtcttttcaaacgcccctttcttgccacggaaataatcatgtgtatccccaatgccatcgagcgaaatccccacgtaggaaaaacccagttccttgatttttttcgctgtggacaggtcaatcaacgtcccgttggtcgaaagcgtcaatcgcagtcccttctgcacggccctcgaagctagatcaaaaaagtgcggatgtatcaacggctccccacccgacaacaaaaccgccggcaccttgaactccgccaaatcatcaatcaccgcgttgcattgctccaacgtcaattccccgggatacacctgtgccgtggaatccgaatagcaatgaatgcaattcagattgcaccgccgcgtaatgttccaaaccactatcggccgccgctcagacgcagaacgcggggccccgtggccctggccatatcgaaggtgatcggcgggctgggccacgccacaatacaaacgtgtcagattcagcatggtactaaaatactagacttcaacagtgccctccttacgaggccgcaggcgcaggcgcagccgcaggatggtattgcggtgaaacgtaggcgcacaacggctcctccccaagataatcgccggtcagcgcataagcacgagcgcgcgagccgccgcaaatgtccttgtactcgcacaccccacatttgcccttcaaaagactggaattgcgcagattgcggaacacttcatgattccggtacacctcaatcaattcatccgtacgcgcattcccgcccgtaatcggcaaaaatccgctgggctgaatctccccaatgtgggagacaaaaacaaaccccttcccatcattgatgccaatcggagcgcgctttttcagggccttctcgtcatgcaattgctgcaacaccacccgccggtagtgatgcccctcggttgtcttgatgtcgtacggcacccgcgtggacaaatgcgccagcttgacgaacaactcctccatctcaaacgcattcaacaaatccgccaccttcccccgccccgtcggcacaagctgaaatacactccacaacaccggcttgatttcctcaagcagcttcacaaatccgtcaaactccctgaagttttgcttcgtaaaggtcgtgttcacctggacttctatcccagcctcacgaatgttctgcagcgcctgcatcgtcatgtcccacgtccccttgatcccgcggaaacgatcgtggctctcacgattggccccatcaatgctgatggaaatgcgcgcacaacccgcctccttcagccgcttcaaatcggcctgcaaaaacagcggcgtcacactcgggctcaacgccacccgcaaccccttgcccgtcgcatacgccacaatgtcgtacaggtccggccgctgcatcggatcgccacccgtcaaaataaaaatcgccggacgcgcccgcaccacctgatccacaaaacgatacgcctcctcaccatccaactcctgcgggtgacggtggaccttggccgccgcacggcaatgccggcacaccaacgcgcaggcgcgggtcatttcccataccaccaaaaacgggtggtcgttaaaatcaaacatcggttgaccgagcatcggtatcatatctacttcgtcggccgccaaacggccatgactcacatcaagcttaacgccgaatagtttcgcgtgcaatgaaatgagtcgaattcgccaaaaaatggtcagccacctcatcccctgcttctaacaccccccacaagaggccagatggagaagtgaaaaaacataaaaaaaaatttttgacaaaccgagcaagcaagccatattaacgacagatttagtcgttattaggctaaaccaattaatatcaacgcatggccgaggggcttacggggccttcggctcatttaagtcgtctaatgacgacataattagtcgtatatgcagaacaacgccattgagccaaagctctcgccaaacgaggctctcaaagcctcttcccccaccctcgcaggcacgttggcccaaaccttggccgaccctcaagccgaccatttctccgaggaagatgcccaattcctcaaattccacggttcctatcaacaagacgaccgcgacctccgaaagcagggcaaaaaatttattttcatggtgcgtgtacggatgcccggcggcgttttgaaacccgagcaatacgtcgcactcgacaagctggccaccgattacggcaacgattccctccgcgtcacctcacgccagggcatccaatttcatggcatcattaaaaccggccttgcccgcaccattcgcggcatcaacgaagtcatgttgaccaccctcgccgcttgcggcgatgtcgtgcgcaacgtcgtaacaccgccgccggtgctgcacggtttggtcggcgagcaggtcctggacgatgcccggctgctctccaaatctctcttgccgcagactccggcttaccatgaaatttggctcaacggagaaaagctccaactggaatccgaagccgcaaagaactttgaagaccctctctatggcaaaacctatttgccacggaaattcaaaatttcctttgccattccaccggtcaatgacgtggacatctttgcccaatgccttggcttcattgccatccaagaggacggcaaggtcagcggttacaatgtcgtggccggcggcggcatgggccgctcgcatggcaaccaccagactttcccaagactggccgatttaatcggctacattccccgtgaggcggtggaagccacggcctgggcagtcgtcggcatccatcgggatttcggcgaccgcgccaaccgaaagcatgcccggttgaaatacgttctcgctgatcgcggcgtggactggttccgtcaacaattggagcaacgcctgggcttcgcactggaaccggcacgccccttcgtcttcacccgccagggagacctctacggatggcggcaacaacccgacggcacttggattttgggcatgttcatcgagaccggccgcatccgtgatacagaatcgcgccgtttgaagacggccctgcgccaggtggtggagcaatttggattggaagtccacctcacccccgccaacaacctgctgcttgttggaattcaagacaacaaacgcgcagacgtgacccgagtgttggctgagcacggcgtggaccctgcccaacgtgtcagcgccgtgcggggcgcctccatggcctgcgtcgccctgcccacctgcggcctggccttggcggaagcagagcgttttctcccccaattgatgacgcacattgaagaagccatgcaagaaacaggcctggccaacgatgaaatcatcatccgcatgaccggctgccccaacggctgcgcccggccgtacatggcggagattgccctggtgggcaaggcgccgggacgctaccagctttttgtcggcggcaatcccgccggcacccgcttgaaccgtgtgtacaaagacacggtcaaagaaactgaaatcgttgccgaactaaaatccctgttcgagcgttaccgccgggaacgcctggccaacgaacgtttcggcgacttcgcagcacgagtcttgtggcttgagaacgccgctcaaaacaatcaagcgcccgcggtggtgggctaacccatttcgaccatgttaaccgaagtagaaataaaaaactggaacgaccactggaagggcaagccagtccaagaactggccgagtgggccatcgtcttgggacgcggacgcgcagtggtcaccaccaatttccgcccttacgaggccgtgctgttgcatctgctcacgcgtatccagccggacatccccgtcatttgggtggaccacggctggaatcgccccgccacttatcgccatgctgaagatgtaacacgccgcttgaagctcaatttgaaagtgtacacccccaccatgaccgtcgcccgctatcaggccctgtacggcgacccgccccaccccgaccaggaggaggccctgcgccaattcagccaaatcttcaagctggaaccctttcaacgcgccatgcgcgaaatggctcccctcgtctggctgacagcgctccgccgtcaacaaaacccgcatcgcgccggcatggatgccatctcactcgatgccaatacggggcttttgaaaatcagccccctcctggaatggacggattcagaaatggacgactacctcaaaaaacacgatttaccggtggaatgggattacttcgacccggccaaaggggaagaaaaacgtgaatgtggcctgcatgtccggtgggaccacgcccaaacggggcgttaaacctcccgctcattccttgaagacactcggcccatacacagcaagcacatcgttaaaccctgcacccaaacttttcgatccatgaccagctatcacttggaccatttgcaacacctggaaacggaggccatccatgtcatgcgtgaggtggccgccgagttcgagcgcccatgcctcctcttctccggcggcaaggactccatatgcctgcttcgcctcgcagaaaaggccttccgcccttccgacatccccatgcccctcctcaatgtggacaccggccatcactttccggaattgaacgaattccgtgaccgccgcgcccaggaattgggagccaaactcatcgtccgtaaagtcgaagacgccatcgctcaaggtctggccacgcccgcccccggcgaaatcagccgcaataaactccaaatccctacccttctggccgccatcgaagaattccgtttcgatgcctgcatcggcggcgcacgccgcgacgaggaaaaagcacgcgccaaagagcgtttcttcagcttccgcgatgccttcggccaatgggaccccaaaaaccagcggcccgaaatctggaatctttacaacgcacgcgtcaacccgggcgagcacatgcgcgtctttccgctcagcaactggaccgaactcgacgtctggcaatacatccgtcgcgagcgcctggaagtgccctccatttatttcagccaccgccgcctctgcgtccgccgcaacggccaatggctgcccgtaaatgatttcttgcccccgcgccccaacgaagaagtgcgcgagctcgtcgtgcgcgtccgcaccatcggcgacatcatcagcacgggcatgattgaatcccgtgctgacagcctcgaagacatcatcgccgaaatcagcgccgcgcgcgtcacagagcgcggctcccgcgccgacgataaaacctccgaagccgccatggaggaccgcaaaaaagcaggctatttttaagggttaaccaagggactgaacatgcaaacctcattgtcaacagaacccaaaagcgccattgccatcggccactccgccgaacactcacgccccgcgggacacgccgtcgaaatcctccgcttcaacacctgcggctcggtggatgacggaaaatccaccttgatcggccggctgctctacgattccaaatccttgatggaagaccagctcgaatccctcgagcgttccgccgaaattaccggcggcggtcaaatcaacctggccaacctgaccgacggcctccgcgccgaacgcgagcaaggcatcaccattgatgtcgcctatcgctacttcgccacaccccgccgcaagttcatcgtcgccgacacgcccggccatgtccaatacacccgcaacatggtcaccggcgcttccacagccaacctctccgtggtgttggtggatgcgcgtcagggcgtcaccgaacaaagccgccgccacaccttcatcgcgtccttgttgcgcatcccccacctcatcatcgccgtcaacaaaatggatttggtggactggtccgaggaccgtttcctcgaaatccgcgaggcctttgaggcattcctgccacgccttgacatcaaggacgtgaaattcatccccatcagcgccctcaacggcgacaacgtggtggagccctcccgccacaccccgtggtattgcggccccacccttttgggacacctcgaaaccgtccacatcgccagcgattacaacctcaacggcttccgactgcccgtccaatgggtcaaccgcccccaagccccccgggacccgcgctaccacgacttccgcggttacagcggccagattgcaggcggcattgtgcgggttggggaccccgtcctcgtgctccccgccggcctcaaaagccgcgtcaaagaaatctggacctacgacggctcactccacgaagccttttgcccgcaatccgtcaccgttttactggagcacgacattgatgtgagccgcggtgacatgctcgtgggctttgatcatctccccggaatggacaacgatgtcagggcccaagtctgctggatgaatcaccggccgctccaggccggccgcaaatacctcctcaagcataccacagccacggtccaggccgtcgtcaccgacattgaacaccggatgaacatcctcgcctttgaaccggagccggccaccgagcttgctttgaacgacattggccaggtccgtttgaaaacctcccgcccgctcgtctatgacggctacgccaccaaccggctcaccggcgctttcattttgatcgagcccggcaccaacgccaccgtggccgcaggcatgttgctcccgccccctcgggccatcaccccggaataccacgactttattatttaaaactaaggattgggcgcagtctcccgcagcggcagcgccccgggcacgttggaaaaatcaaaatccaccaccgcctccgcggcaagagtggccaccaccgatcgcaatttgaccacattgccaccggtggggtgattgcggttggcatacaacaggacaaaagtccgcgaaaacggatccacccacaggctggtgcccgtccaccccgtatgcccatacgacccaatcggaaacaccttgccccgcggccctgcataaggcgaatcaatgtcccatcccaatccccggcgcgcactgccatccgccggcgattgcaccgacgtcatcaatttaatggtctcttctttcaaaacgcgccgcccatccaattcgcccccattcaaaagcatgcgacaaaaacgcgcagtgtcggccaccgtcgtaaaaagaccggcatgcccagccacgccccccatccgtcgtgccgtcgggtcatgcaccacgccgcgcaacaccactccccccacccgttcagtcggcgcaatttcccttttccattcctccggcggcaaaaaccgcgtctgcttcatccccagcggctcgtaaaatttttcgcgcgccaagtccgcaagagattttccggaaacccgccgcacgatttcaccaagcaggatgaaattgacatcgctatagcgaaacaccttgcctggagccggattcggccgctcgctcactgcctgagcaatcgcgcccgtgtaaccgttgaaatcacggcgcgtcaaccccgacggcaaccccgagtaatgggtcagcaacagtcgcaccgtgatcgcctcccgcccttgtccgacaaattccggcaagtatttggacaccggctcatccagcccaattttgccctgttcccacagccacatcacgcagggcgttgtggccatcaccttggtcaacgaggccgcatcaaaaatggtgttggtggtcatcggctccggcgcaggaatcacggcccgctgcccgtaagccttgatgtacgccgtgccctgccgttcaatccatacaaccgctccgggagtgtcaccgttggtaatggccgccgtgatggcctggtccagttcaacaagtttctccgcgcgaaaaacttttcccgacccttccgccgctggcgcaacaggcgtgctcaacacccagagcaggccgaacagaagttgaagaaaagcccgccggctcaggcttggttgcgccttttgctcatggtttgaaatcggcatcattcaatagattagatgttacgcagcctgaataagttaccatttttcaagctgttggagctccttcgcccaagccgccttcaatccccctccccctcgtcctccccggctccgccgttgccgctgccggcattgtactcgtgcaacttgttgcgcaacgtgcgcacactgatccccagcagcttcgccgcgtgggtccggttgccgccgcacttttccaacgcggccaaaatgtgtcgcttctccagctcggccagcggcaccacttcaggagtggtggctgcagcagccgatgttggggcaggagccgctgccgctgcggcgggagaaggctccacggatgctggcgttgcgctcaacgccgacgtccgcatcaaccccaaatgctccggctcaatcatcccgctgtccccgcacagaatgacggcccgctcaatgacattctgcaactcacgcacattccccggccaatcatgctccatcaaggcggactcgctggccggggacagtcccgcaagtttcacaccgtgcttgcgcatgaagcgttgcatgaaatgccgggacagcagcaggatgtcctccttcctctgccgcaacggcggcacaagcaccggaaccacattcaaacggaaaaacaaatcctgccggaactccttgcgggcaacactttgctcaagatgccggttggtggtggcaatgacccttacatccacccgcaccgtgcggttgccgccaacccgctcaaactcacgctcctgcaaaacccgcagtagcttggcctgcaccgccggcgatatttcgctgatttcatccaaaagaatcgtgcccccatgcgccagctcaaaacgtccctcacgcttgctcaacgcccccgtaaaggcccccttttcatgcccgaaaaactcgctctcaatcaggttttccggtatcgccgcgcagttgaccttgatgaacggcgcgccgttgcgtggactttgctgatgcaacgctcgcgccaccaattccttgcccgtcccgctctcaccctgaatcagcacggtggcctccgtgcgcgccacccgccggatgagctgccgcaaatcctccatcgccttgctctgccccaaaagctgcgacgcatcctcatcctccgcctgccggccgtaaaattggttgacccgcagcaactgggtgaactctgcagccttccgaatcaccacctccaactgctccgcgctgaacggcttgataagataatcaaacgccccggccttcatgcactccaccgccgattccaccgtggcgaagcccgaaatcatcaccaccaaaggccgcacgggacgggtgttgagccgcttgagcaaatcagtggcatctccatcgggaaggcggatgtccgcgatcaacaagtcgaaattgtcccgcgccagataatcctccgccgccgctatggtttccaccgcggccacgtcataccgacgtgaacgaagctgctgctcgaggtttttgcggacaatcaggtcgtcttcgagaacgatgattttctcgatcggcatgaggccattatatcaagcgacctggtgtcggcgatataattctgaaacgtacccctgcccggataccggcggcggcgtgggccagtgttgcggcggcaccaaccccaaacgcaaccgcgcttgttgattctcgcggtccaacgtcaaaagccgcaacaccagcccctgagtctcttccaacagcgcccgcagctccggagacatcaagcgcctttcctccggctttttctcccatgcctgcctctgctcccgcaggtgccgcgtgacttcctccagccggggcagcaattgccgccgcaccgcatcggctctcgccaacgcctcaacatcgccgttttgcaacccaccggcctctgtctcaaaagccgccagcaattcccggcacaattgccggtgttcctgcaaattttgaacaaccgcttccatcatgaagggggcactggagtggacatttccggtggcgtctgactggcatttcccttgggcagggaccgcgtcggcagcatgtgctccgcctgagaacgccattgcaaaaattgaatccgccattgcgccatttccatcaacgccttcaaccccggcgtcggcgtgtcgctcattttacccgccagcgccactacctgttgataataatcacgcgcccgctccggctgtttcatgtgctcgtacaccagcccgatttgatacagcactggcccctgccatcggggcgacggatccaaattcaaaaggctcaagtaaatttccagcgcattcagaaaatcgccctcttgatacaattggttggccagctcgtttcccgtccgctgctgccaataggcccagttctgcgggtttttcgctgcatcccgccgctgcttctccaacagcgccaaggtctgctgcaacgcctcccgattccgccccaaacgcttgagcgaagtggccagcaaaaaccgcacttccgcttcatcaccgcttcccccgtacttctgcaggtactcctgcgcctgcgccaccagcgtctcgtgctgccccagatttgccaggcacttcaaataacgaaaatgcatccgctccttgttcaactcctgcgaatccaatcgcaataatcgcgcataaaactccgaggcttcagcatactgcccgcgcccaaaataagtctcggcaatttccgtctgcgccaacaacaccagccgctggtaatattcaaattgatcgagccgcaacgacaacgcactcgacagcaccgcgtaaaatttactcaaggccagcgctcccacacccatctcccgatagagaataccctgccgcaacaatatctccggcaccgccgggtcatcgtggtaacgcttgacgtactgggagaaaatctgctgcgcgcgccccagttgtccctcctgttgggccaccagcgccaactcaaacaaggctggccgtttcaactcctccggcgcgtcggactccaaaatcccaatcaaaacagccgccgcctgccggtgatcccgcatcttccgcaattcccgccccgcctccaactgctcctgaaactggcgcacccgaaagacatggttggaagtctgcaacttcaccgtcagcaaattgctgcttgttatctgcccgggtgccggtgggttggtcaatgttccagctccccagcccggcggcccagctttgatcagccgcttgacataatcatcaatcaaaccggctgccgggctgttggtgacgacttttaagttttcattcgtgccggccaccgacgaaggaggggccgaagtcgtcactgccgtcggcgcattggatgcctgcgagcctgagccccataaatgagcattcacccccgccatcccaaacaccgcagccaaaatccacccccaccatcgcaaacgatggcctgaaaaatagccccccctgatgtctgataaatccctcatggcgaagacggctttttaggttcaggggtttcgtaacgggccgagctgggcggaatgcgtgcaggttgcggtggctgaaacaatggcaaggtgacaattacccccgccgcattggtacttcccaccggcacaggtgttttgaaatattgcaccaacatctgcggagtgatttccggctccgaggaagactgcaccgctgaagccgccggcaacgtcacttgattggtggccacctccaccgaagcggccggcggctctgaaatcaccggcacttcattcgtggcaggcggcgccaccaccacaacattggttggcggaaccggcggcggcactggattcggcggaatgatttcggccgcggcccccgggccgcccaccgtgccgggaatagccgcctccgccgcagccaccggtgccgccttggacgcacgagcaggccgctcaaaccgcaatggtcccggccccaaatacggcaaataagccgctggcgccggccatatcgcagccacactcacggccactatgacccagcttcgtaacacaaaatcgcccagttcgttggctcttttccaagctccctcgcccctgcaaggcaggaagcccagtatctcggagaaattatcggcaggattcggtgaaaactttaatccaatttcactcctccaaaatttcccgccttcgagagaaagttttccctaatttttccatttttggcgtccaagttccatgcagaagtgcctgcacccgttaaggttgcaaccagccatattctcacctgacatcccgcccgcaaaaagctacactgcccgcacgatgcaaaccttggacaccttgggcattattgccggcaaccggaaccttcccctcacgttggcgcgggaagcacgggccgccggcatccggcggctggtggcagttgcctttgaaggtgagaccgaccccgccctcgcccaactggtggacgaaattgagtggctccgggttgggcaactgggacgaatggtcgacgcatttaccaagcgcggtgtccgccactgcgtcatggtgggccagattgccccccgcaacctcttcgatttacgccctgactggcgggccgcaaaactgctcctgcagctcaaagagcgcaacgcccacaccctcttcggtgccatcgccgatgaattggcccgcgagggtgtcaccctcatcgaggccaccccttggctccaatccctcatgcccgaccaaaatttccatgccggcccgcgcctgagcgacaatcaaaaagccgacatcgccttcggccatcggatggcgcaggaaatcgcccgcctcgacattggccaaacagtcgtcgtcaaaaatggcaccgtcctggcagtcgaaggctttgaaggcacagacgcctgcctggccagaggcggggatttggcgggcaaggacggtggggccgttgccgttaaagtggccaaggccaaccatgacttccgtttcgacatcccatgcgccggccccaaaacagtggaagtctgtgcccaacacggagtggccgtgctggcagtcgaagccggccgctccctcctgttggaccggactgaaatggaagccctggcaaaacagcgcaaggtgaccctcgtcgccgtgccacccacgccggccacaacataaactacggcgtaagcgccgtcttaaatcgaagtcgaggtctccaggaagccttgcaactgccgcaaccgtgtcggatgccgcatcttgcgcaacgctttggcctcaatttgccggatgcgctcgcgggtgaccttgaactgcttgcccacctcttccaacgtccgcgaataaccgtccaccaatccaaagcgcagctccaagaccttccgctcccgctccgtcaggctggccagcacgtcgttgaccttttccttcaacaaactgtaactggtcatgtccgatgggttctccgccgttttgtcctcgatgaaatccccaaaattggtgtcgtcactgtcccccaccggcgattgcagagagatgggttgctgggccatcttgagcaccgcacgcacccgctccaccggcatctgcatttcatcggcaatttcctccggcgtcggctcccgcccaaaatcctgcaccaactgcttctgcacccgcatcaatttattgatggtctcaatcatgtgcaccggaatgcgaatggtgcgcgcctgatcggcaatgctgcgggtgatcgcctgccgaatccaccacgtcgcatacgtgctgaacttgtaaccccggcgatactcgaatttctccaccgccttcatcaagcccatgttcccctcctgaatcaaatccaggaaggacaacccacggttggtgtactttttagcgatggatatgaccaagcgcaggttggcttccaccatctccgtcttggcctgcatcgccttgcgattgaaatgctgcaattgcttgaacgcctccaggtattcctcacaactcatccgcaccatctcctcaagcgcctgtttcttccggatttccgcctgaagaatggactgtatctgcggattcttcttttgagcctcaagctcctgaatcgtgcgcaaacacgtctggaatttgtccaccacgttttccgccacattggcgatttcctcgatcaccttctgcttgtaataaaacttgggaaaagtcgcctgaagcttcgcatcgagcttcttgaattccttcatcaacttttccttcttggcgggcgaggtcgcagccaccatttcccggtacttgtcatccacctcccgatccatcgccatcaccgttttaaccagccgccgtaaatccttgaggtgattttcccgtccctcaatctttttgtccacaatcacccggtcaaaccgttccttgggcggctcgctgatgagtttctccgccaaagccacgtgctccttggccgtaaagccaaagctgtacacgatccgcttgacctcgttttcagcgtcttcgattcgcttggatatttccacctcctgctcccgcgtcagcagcggcacctggcccatctgcttgaggtacatccgcaccgggtcatccaaaatgtccagccggtttttatcgtcgtcttcctccggctccggctgctttacccggtccacctccgcctgatctacaatctccacctcaagattccgaagcttggtgtagatgtcatccagctcctccggtgtcaccaccgaatcaggcagagcgtcattgatatcattataagtcaggtatccctgctcctgcgccaatcgcaccaattccttgaccttttccgccaggtcaatcgtctgcggttgcttgttgggatcctggttttcatccaccgcaacaggcgcagcttcctccatcgccgtcttcgcaatggattttgccgttttcacctcgcttttagccgcggccttggcaacagcctcgccgcctttcttcgtttgcaactgctctgcctttttgctctcagccgtttctttaaccttcaaagagccgggctttttatccttgttttccacttcggcaggcttgaaatccttcttcttcggtgggacgccatctttcggcttggcctgggcagaagcagacgctgccggtttggagcccttggcctgggaaggttgggcgtgggccttcacttccttattggacgataactttcccttgccagccttcgcggctggctttttcacctgaggttttgccatagatgcgttttagaactatcggctacaaattctcgttataataaatagccttatactttaacgcttttctgttgtgtagtcaatctttgcttcaaaatcaaactttgcccacccttgctgccctgttgaaggcgtaaggtaccacgtaaaaaacactacatttccacaaaacacgggcctgtcttccccccctcccctcgatatttccacccggttataatccatttgtaaccttttccgccaaaaatgctcttggtatagtgtttggaacgtaggcggccaaccaactgcatccgccgcctaaacgccactcatatctgtgggcatgaccgaaacggtccataccgaagtgttgccgctccattcgacggcggatttcaccgccgcagtggagaaagccgccgctttgcttcaggctggcgaagttgtagcggtccccaccgagacggtgtacggcctggcagctaatgccctcaacccacaagccgtagccgccatctacacagtcaagggccggccttcccgcaatcccatcatcgttcacgtggccgatgaaagcatggcccgccaatgtgtcgcctcctggcctcccgctgctgccgccttgtcccgtgccttctggcccggacctctgaccatcgtcctgcccaaggcagccatcatccccgacatagtaactgccgggggccccaccgttggcgtccgctggccgcaccatcctttcatgcaagctttgattcaacgttgcgcctttccactcgctgcccccagcgccaacctttccaatcgcgtttctcccaccaccgccacccatgtgcgccaacacttggaaggacgcatcccccttatcgtggacggcggcccctgccccgtcggaattgaatccaccgtggtggcccttaaaggtgatgtttggcgcatcctccggcccggcatcattcacaaggacgctctggccgccgtcttgggcaccggctctgctcatgaggccgcctcacacgatagcaaccgccctgctttggaaagccccggccttctgccgcgccactacgcccctcgcgcacaagtgttggtttgggcctgggaaaacgaagactccctgcttgcgcagattcgccgcatgggggcaaaaccggaggaaacttacgtcttggcgcactcctgtgcgccccgccaaaaggactggcttgaagtcagcgttgcaccgcgtgacccggaagcctatgcacgcgccctttacgcggaattgcaccgggcggatgctcacaatgcacggtggctggtggtggaacagctccccaccgatggcccatggcaggccatccatgaccgcctccgccgcgccgctcaacatgaagaaacttgaattttacgtcggttgttgattgccatgcctcaaccgcgttacgatgaattgacgttttgatgaaaaacttgcaagctcgaccaatgacacgactgggaatcatcgcaagcctggtggccgtcctcggcgccacggcctggggtcagaccaaccatctgacggaacgcgccatttctttggatgaatgtctggaaatggcattggaaaacaatttcacccttcgcattgagcgccacaacatcgagcaagcccgcttcgacctcaggcgctctcaaacagcctacgacccgcagcttttctttggcctcacccgggccagaaacaccggcctcaaccaaaacttcgatttattgggcaatcgctccgagaactcctcccaaaacacggtggacaccctcgaatacggagtcagcgggctggggcccatggggtttgaatactcggtgccagtgagattcacccgcagcttcggcgacggctacacgtacaacaccctcgatctcaacaccttcaccttcgtgccggtgggttacgacgagtacgctgcccgcttcaacatcgaaatgcgtcagccgttgctccgcaacttcgctgtggacaacgtccgccgcaccatccaggtcaaccgcaaactgctcaaaatgtccgagcaccagtacgaagcccgcctgatggaaatcatcaccttggtggaactggcatactatgaactgatcttcgcccgcgaaaacgtcaaagtccaggagaaggccctggaactggccgaaaaactcctcgataacaaccgcaagagtttcaatgtcggaagcatggccattctggaagtgcaccgcgccgaatctttggtcgccagcacccgcgccgacctcctggccgcccagcaattggtcaaagtgcaggaaaacgtgctgaaaaacctcatcaccaaagacctggccgagtggaaacaagtttccttgagacccaccgaatccctgatggccattccgcaagccctcgacgtgcgcgaaagctggcgcaccggtttgaccaaacgccccgacctcgcccagttgcgggtggacttggaacgccaggacattgacatccgttacttcaaaaaccagaccctccccaacctgaacctcgtcggttcttacggacgggatgccctcggaacgggctttgaaaacacttggtcagacctccatttccgcgacaaagccgtggactactattacggcgttgaactcagcttcccatggggccgtcgcgaggccaaataccgtctggcgcaggaaaaagaccagcgcctgcaaaaggaattagtcctccaaaaactccagcaggacatcctggtccaaattgacgatgccatcgaagccgttaaaaccagttatgaccgcatcgccgccacacgccaagccgctgattttgcccaaaaagtcctccaatccgaggaatccctcatgcgcgtcggcatgagcacctccttccaaatcctgcaataccagcgcgacctcaccgcagcccgcacccaggaagcccgcgccatcgcggattacaacaaggcattggctcgcctagcccaggcggaaggctccaccttggaacggcgcaaaatcaaattacaattcaaataaaaccgccccggaaacgcgaaggttaaaagcctctcttgcagtggctgctgctacctgctgccaattcgaaaccaaaagcactgcgggaaaacttcccgcaattacaccagcccctccaaaatcatcggcaaccgctccaagctgcggttaagccctgcccgcgcaatggccttggcactgtcggtttggttggggaacaacaaatgccatgccggcgtttcaaaccacgcttccgccgccacgctctggtaattcccgctggtcccgatttgggcatgccgcaacagcagatccgccacatgcaccgccgccacaatttgaatatgctggctggcgcgctcgggcgcatggtgaaaccgggccgactccaccatcacctgcggcagtcggtgttgctccaaatacaacccgcccaactccgcgtgatccatccccagcacctcaatttcaatcgcctgcaacggcgcttttgtctcggatgaacgccggtgaatctcggcaaaatgctgcggaaacaccgcggccatcacaattttgcccacatcgtgcaccaatcccgccacgtaatccgcctcgtcattgggcattcgcaccgccgacaacacttcccgcgccataatcgccgtgccaatgcaatgacgccaaaactcccgccatggaaattccgtgttgcccgccatcttctgaaaatcctcgatcaccggcgtcaccatcgccagttgccgtatttgcctcagccccagataaaaaaccgcctcctcaatgctgttgaccggcacattcagcccaaaataaaccgagttcaccaaccgcaacaaccgcgccgtcaaactagggtcccgccgaatcacctcgctgatttgcgccgtataactctgatcagccgccaacaactcccgcagcgcactgttgacagtgctcagcgatggcagacgcgggcaggaatgtaaccgcgccgtgatctgttgccggttcagcggcgtcagccggttcgtagtggccacttgactcatactcatcttccctatcggcagtcagaggaaccaactttaataaataataaaaaaagacctctggttaccctcccagcgtccgatttttagacctccacaatcaaacagccttgggtagatacacagaagccgcgcttgacggcctgccctgctttggttaccaaagcatcaccaatacagcacaatacattcgcgggccgggccggtttggcgtccctccccgccttggaaaatcacatgaatactgagaaaaaaggcctgtttgtcaccgccgacggcagaaacgtcgccttcacctttgcgctggtcagctcgttgtttctcctctggggattctgcaacgggatgattgacgtgatggacaaacatttccaaaacgagctcaaactcaccctcagccaatccgcctgggtccagtttgcccattacctcggctatttcatcatggccctgccggccggctggctggccatccggctcggttacaaaggcggcattatcgcaggcctcttgatggtggccgtagggggattgtggttcatcccggccacacacatcgccaagttctgggcctttttacttggcgtctgcaccatcgccgccggtctgaccttcctcgaaacggtggccaacccatataccaccgtcctcggcgacaaacgcttcgcagccactcgcatcaacctggctcagtcctgcaacggcgtcggctggatccttggccccatcgccggcggcctcttcttttacggtaccgatgaaacaggacgcagcaccggtgccgaaaccttgtggatcccttatgccggtgtggccgtggtggtcatcctcctggcggtgattttctttttcgcccccatgcccgacatcaataccgaggacgactatcacctcgacgataaaaacaatgacaaaaccaccgccattaaaccggcttcccgtgggctgacctacgggttgttactcgtgaatatcgccatcctgcttttggtgtttggaatgataacatggctcattctcagcgcgaccaaagttggcgaatccctcaaaggcctggccgctgccctgccgcatccttcctccttcaccatcaacgcagaccacgccttgaccgtcgtcctgttttgggcgggcgtcgccatcatgatcgtagcggccattgtcatggcccccatgaccaaaaaaatctcccaccacagcatctggtcccacccccatttctccggggccgtggcggcgcagtttctatacgtggccgcccaggcgggcatcttcagcttccttatcaattacgtgacctcagaagtcccggacctccccgcctcgtggcaccgcgacagcaccaaaaaatggattgaaatcaacacctccttcacacgcgatgacctcaaggatttgcctgcgctggcggctcgattgaaaaaccccaccgaccccgtgacagccatggtggccggcaaattgtcctccgacactcaggcagccctcgcagagtacgtccccgacaaaaccaaccccaaattgctcagtgtgcccttggtgcaggatttgaaaagcattgtccgcggcaccaacatctacaatccccagctcttcgctggtgtcaacctcagccccgccacccgcgaaatcctggccctccctgaaaaagaacgaaacacacccctcctcaaccgcctgctccttacagacgcctttgccggtttacttaattataccccaggccgttattgcatcagtgacgccggcgcttccaacctcgcctctttcggattcttctgcttcttggtgggccgcttcaccggagcctggctgctgaaacgtttctccgcccaccgcatgttgggcctctacggcctcatgaacgtgctggtctgcctgctggtgttcttcaagctcggctggctgtccgtggtgtgcgtcttcctcagctatttcttcatgtccatcatgttccccaccatctttgcactggggattttcggcttgggcgtccgtgccaagcgcgcctcggcttacatcgtcatggccatcatgggcggtgccatcctgcccaaactcatggggtacgttgctgaccaaaccaacatgtcccgcggtttcatcgtgccgatgatttgcttcgtggccattgccctttacggcttcggttggagccgcctcagccaggccgaatccttaagcggcctgaaaaccaccgccggccactaaaaacaaggctcccattcttgcaccacccccctgcgctggggccggggctcgtcttgtcttcaaccaatccgcgctcacactttctccggcaccacaaacggcggacggtactcgcgccgaagcagccgatccgcctccggattgttcacaaacttttccttgtcggcatcaaacatcaacttgggccccacccacaacgtcgccttctgcgggtccacaccaatcgccttggtgttttccaaagtcgtcatgatgctctcgcccaccacctcgttatcgctgaaatccttcggcttctcaaacggtcgctccttggccaaccggtaggatatattgcccaaatgacagcacgcgctcgaaaggtgcccctccaaaatgtctgcgtgcagattttcccgcttgcggctgcgcacgcactcgatgaaattggcgaaaatattacccgagcgcgacggcgcatccaccttggccaacggctccccttcggttttgtctttggggaaaaacttcccatccttcaccacaccggcctcaaagaaatattcattggcaactttgttgggatactccttgagcttgcccacaagcccccgcgtctcaaacaacagcaatgtcccaccaaaatcgagcaccgtcaccatctgattcggcgtctgcccttggtccttgtgatccggcccctcaacgtaccgcccgcccaaactgatgaccgatcgcggcaacgtcccaccaatcacccaccgcgccacatccatctcatgcacaccctggttgccaatgtccccgttgccgaagtcccaaaaccaatgccagttgtaatgcaccaaattccggtgaaacggctgtttgggcgcaggccccagccagatatcaaaatccaaattggctggcggttcctccacaggcttgaaaccaatgctccatcgtggcttgcaacaatatcctttggccaccaacaacttcccgtaaacaccgcttttggccaacgccaccatccgcacgtccccaccggcgcgccgctgcgtcccgtgctgcacaatccgattgtacttccgggccgcctccacacatttgcgcccctcaaacacattgtgactgcacggcttctccacatacacatccttgcccgcctgacaggcccaaatcgtggccagcgaatgccaatgattcgtcgtggcaatggagactacgtcgatttccttgttctccaacatcttgcggatgtcctgataagtctgcaccccctgcaacttgctcgcacgtccctccaacaccttcaaatccacatcgcacaacgccgtcactctgactcccggcaatttctgaaactcgctgatatgattggccccacgcccgtttattcccaccaccgccacacgtatggcctcattggcacccacggattgcgcatacacacgcggcgccagccagatgccggcggcccccaaagttgcggttttcaaaaaagcacgacgcttcaacgacgaagactgcatgtaggctttcatgcccccactctaatctctccgcgccccgcttcaatcccaaactccaactcccaccaaacaccgactaattatagatgaatggcagtgcaggtcttcccaacataagatgagcttgcgcttgcccttccacgccgcggccttacattgagcgtgtgcatgatgcttcggatgattggcgccggcgttttgaacgcctgcaacagttataccacgtcagccaggtgctccattccactctcgaacctcagcgagccctggaactgattgtggaacaagccgtgcagctcaccggcgccaccagtggttcgctggttctcctgaatcctcataccggttttttggaaattgaagcctctcacggccttccacccgaggctcaaaaactcaagctccgcgccggcgaaggcatcaccggctgggtcgtccgcaccggccagccggcactcgtcggcgatgtccgcaaagacccccgctacatcatggcacggcccggcgtccgctccgaattggccgtccccctccaagtcggcgaagaaattcgcggcctcttgaatgtggactccgacaaacttaacgccttcaccgccgaagaccaatccctgctggaagaactctccgctcaagccgctctggtcatccgccaaacctggcaatacgaacaacaccggttgaaagcccggctgtttgaaagcctcgtcgccgtcagccaaatcatcaattccaccgtcaatctggacgaagccctcgccgccatcacccaacaggcctgccaactcatgcaggcacgcctcagctccttgctcctgctcgatgactccggacgctggctggacctccgcgctgcgcacggcgccggccccgactatatcaacaaaccgcgcctggcagtcgaggacagcctggtgggctccgttgtgcgccgccgcaaagtgcttcaggttgagaacgtccaaatctcccagcgctatcaacacgtcgaagtcgccgcccgcgagggtctggtctcgctgctcagcgcacccctcttgtttgaccaacgttgcatcggcgtcctcaacgtctacaccggccggccccacgtcttttccaacgaggaaatccgcatcctcaacgccctggcgggtttatcggccgtcgccatcgaaaaagcccgcctctacgaacgggtggtggacctcgaagaagccctccgccaagctgaaaaattcagcgcactcggcctcttggccggcgaagtcgcccacgaaatccgcaaccctctcaccgtcatgaaaatgctgtttcattccctgaacctgcactttcctctgatagacccgcgcaataccgacgtgcgcatcatcgccgacaaaatggaacaattggaccgcaccgtcgaacgcgtcctcagcttcgcccgcacagccgagccccagtttggccccgtgcacctccaacacgtgctcggcgagctggaactgctggtccgccacaaattgcgccagcaaaacatcctttggaaactcagcctcgaacccgccctccccgccgtttggggcgatgccacccaactggggcaagctctcctgaatcttgtgctcaatgccgtccaagccatgccccaaggcggagaattacgcatctccgcccgccgcctgccgcgcgaccccacccgccccgccacccatgtagtcttggaagtagccgacacaggcgaaggcatgagccccgaacaatgccgccgcgcctttacccccctcctcagcaccacccgcaccaagggcaccggccttggactggtcttggtgggccgcatcattgaagctcaccacggacgcatccaagtcacctcccgccccaaggcaggcacacgcttccgcatcacgctccccgttgaaaaccaaaatcctgcgtaattccccccaatcgcctccggcggcccccttgacatcaagttgaacgtgggacaagttgccattgttgtattatgaattttgcgtggcttagcctggaccttgttttgattgtgctgtttgccttttcgctaccggcacttttcctatatgtcatccgccggtggctccaaaacagcgaatcggcaaacccatcggtggacaaccaaacaccggacccaggcaaccattcatctcactgaatgaccaacggattttttctcgccttcttcgcggcttcctcaaaacaggctttctaatatgcttaagccctaaggaggctcaagccatagggttgtatgccgctcactctttgctcgggaaaaaacagctccaccgattatttcaccattagatctcccttgggcactgaaaaactttttcgctctatttttgctgtaaccgccttttttgatttgttctgaccccgcggctgggcttatcttgaagcagtatagcgatggaccctgcccactcaacgtccagccgcaaccatcgggccacgccacacgcgtggaggaggtgttcatgttgacctttgaccccacgcgattgcaagcggccttgcggttggctgcttccgagctggtcaaagctcgtccggcaggttctccctggcagggtgaaatttccagcagccccacagccaccgctgccgccatctgcgccctcagcctggcggataccgagtggaaaagcgccgaggacaccctgcgccggctcgcgttacatggggcggagtggttgagccaccacgccaacggcgacggcggatggggcgacaccccgcgcagcttcagcaacctcggcgcaactgccctcgcttgggcggccttcgggctggcaccgggaggcgaagcagcctttcaggaacccgcccgtgccgcagagcgctggatatgccaaaaagcgggcaataccgcccccgccatcttggcccccatgattcgcacccgcttccgcggggatttggcgctggccggtggcgttttgatgtgctgcgcactggcgggacgactcggcagtgacattcgcgcctggcgccacgtcccctccctgccttttgagcgtggagcactccctcccgaatggtgggcgtcagtccaaccgcccgctgccagttgggccatgcccctcctcctcgccacaggccaggctcgccatcacaatctcgcaggcggctgtttcgtggtccgactgctgcgcgaattctttcgcaataccactctgcgccgcctcacggccttgcaagcagaggacgggaattttcaaacctcccccctcttaactgccctgaccaccatcggcttgctcgccgccggctacggtcgccatccagccacagaaaaaggcatccgcttcctggtaacctccgcacgtcccgacggcagttggccgctgattacaagccaggacgtccgccttaccgcgcaagccacgcaagcctgcaccaaccccgtccccgggcagccgtggctgccgggcctcgacgaacttcatgccttgcgccattggcttctcgcccatccgcaacacgatgacccggagggactccgcctcccagccatcggttggtcggccagctcacaccccggcgcgtggcccgacaccgtttccaccgcagaagccctcttggccttgcgctcgctcggtgacccgggccctgaggtcattcaagccgtcctcggcggcgtcaattggttgctgttgacccaaaaccgcgatggcgggctgcccccttatcgtcgcggctggtgccacccggaacaagaaggcagttgcgccgaggaaaccgcgctgaccttgcgggcttggctggcctggttgcacgtccttcccccggaccaacaacaccgtgttcaaacctccatccaccacgccatccgttttctcatggacgagcaacgtcaagatggcgcctggcgttcacactggtttggcaatcaatacgcgcatcaggaggaaaacctcaccatgggcaccgccggagtcctcatggccctgcccgaactggtggcccgctcctatttcgagttggtcgaaccactcaacagcgccgtcctctggctcgtcaaaaaccaaaacagcgacggcagttggggcggtggccacggcggccctccctcagtcgaagaaactgctctggcactcgaagccctggccgaaacactcctccaacctggccccctcttgctggaaactcgtgaacaagcacgcaacgccgccgcctggggcgccaactggctagtccaacatatcgaagccggcaattggaccacacctgcccctctgggcttgctctggggacaattctggttctacgaaaacctctggccggccctcggcgtcacccgcgccctggcccgtttgacacgcctggtttaatcccgccaccccccggcgttgtcatccgcggcaggcggctcatgtgccgaaaaaccatccgcgacaatggcttcttcggcgaataatgcaccatcatgtcctgcatccgcatcaacacccacggctcccgcggcgcataaccgtttttggtgaacacaatgtcatcagccacgtacacacacatgtgcacagtccggacgtcctgccccatcggctcatacaacaggatgagatccccaaacaaatccgccttgggcacaatccgatactcgctccgcaacacctgctcctgaaatcgtgcatcaatgaaccggtcctccaccttgtcccggtgaaaattatacgacgaccaaaaacaatccggccacctccccgcaataatatttgtgggatgcggatacgaataaagcaacagccgcggcaccggcggaaaaaaccatgccacattcacactccccccctgcggcaggcgcttcaatgactccaacaacggccgcacctgaagcattcggttgggcagcccccaatagcccatcagccgctccacatcgctggtgggagtcacccgcaaattcaccataagcgtcggcactcgtgccaccgtccggctggcttgcagataatcctctctcgttaacagttttggcaggacatgccggtccgcaaaacacagcaaaccatctttccggtacatcatccgctccatgagcttcagcgcatcttcagacaaactgcattgcgaaaaccattcggaaaactcagcattaaccgcaaacggataacaataagccacattttgttcatcctcggccaaaatggagtagatcttggcccgcggctccggcggcatgtcccgcagcacttcaactgtcggctccacataaactcctcctgtcgtcgcctgccaacggttcgtgtccaacaagctcgcctccaacaaactcggcaacccgcaactttttatgaaatccctcaaagtctccggcttataaccggcaaaaaaccacctgttcgaggaagggggaggcggatcgtacgcaaaatattccactggccgctccaaccaaattgggatgatttccaatattccccagcggtttgttgaggcttcatccttcgccaccaaaccgttgttggatgagcttcgatcagagcgcgaccataaagtgcgaccaataaattgcgcacccaacgtaatcaatacccctgcaagaaccagccataaacttgggagaaattgccggcgaggcacggccccattctgccgctcgctccgtgatgaagtcttggctgggcgcattttcataaacagcctcccttaccactcaaacagcgcccaaagaccagccggcccaaaaacacccctctcccgtcgaagtgtttgcctgttattcgccggatgtattaatcgcccgcccttaaggacgttattcccttgcagccatcccattcaaataaagagacgggacattacctgcgaaaggttacaaggacaacggttttgtgaaaaaaattagcctgaaaaccctcacattgtgaacttacctaccagacggtaagttccgccagggacgcaaagggttgacggtcaaatccgctcacagcctccagcttcaaataacggacctgtaccggtgccggaaacgtcaattcctttggattggcatcggcggacaatgtgccccgcatcaaaggtgttccccagttttgtccgtcgctgctcgtgtaaatggcaaactcgcgtatccacccatttttattgttgtcctgcctcggcgtcagagtcacaccacgcagagtggccgattgttgaaactccaaaaccagccaatgcggaaaagccggagcttcctccccccatggcgtgtgccaaagcgtttgcacgtccccatccacgaccaacttgcccggatgctgcggatgttcactgctcacccgcgatacccggacccccagtttttccatcaaggaaggcggcctcaacaacttttgcacatccgccggcgtccaccgatgcgcgggtttgaaacgtggaccgctcatgtaattcaaaagactgcgccgaagctgccttgccaccggacgctgctccaagtctgtattcaaatccatcgcacacgccaacaaacgcccccgtcccacttgcgcctcgatgattaaccccagtttgcgcgacgtaaaccaatcgtctatcgcatacaccaacggccggaatgtcgcctccgtgcccgtcaacacaaacggatgcgcccgcgacaccaactcccaccattgccagttggaatgatattcagtcggaaaatccgccagcgccggatgcctcggatcgcaataaatgcccaaagtatgcggcgcctgacgccgcgtccacgctgtgttccaaaagatgctcgaaaaaccaatttgcacccgccccaacgcatccccgcgaatggccgatggcggcggattcaacaacaccttgcctccgcgctccaaaaccgccaaggccgccgaatccaaatcagtcgcccaatgaatatcctgcggcacactcacatccaccttggccggatacacccacacatcccaatcattcgcataaggcgtgccttccaccgccagctccaaattcaacttcgcaggcgcaggcatccccttcaatggcacctcaatctgccccaccggactgcagattccagtcggcaacggaccagtgaacatcgtccccgtcgccaactcacgcttcccctgccgcaaccgccagcgcaccacaccctgcggcaaatcctgcggtgcaaaccatcccaactccaccccggcctgcagcgtgtcctccgtggtgaaaatccgtctcggcaatcgcgcaatcggcaccaccggcccggcaaaccggtgatactccgcagccgtgatatagcccttgccatcccaaaacggatccaacacccccaccaacgccgtcccctgcccaggaaaatcatgcaaatccaacaactcgaatccccccatccccggcgtgcgtatcgccgactcaatatcctccttgtaacaaagcgcctgcaatttccccgacgccagcaaaaacgcccgcgccataggcgccaaaccgttctgcttcaaaaagtcctgaaaaatctcaaaattcttcggtttcagccagcccttgtatttcggcatctccgcaaagttgggaaacacacaccattgcccaatctcatgactcaccaccggcgccgcagcccgctggataaacgcccggtaatctgtcaccgtctcaggcggacgcgcattgatgcgtgaattcaatcccccgccccatgcctgaatgcgcggctccggtgtgatgtgaaaatcattttccggaatcatcggccaacccgccccgctggtgtaaagccgccgcgtatccaggcccttgcaataattgatgaaatcccccagccaccgattctgattctttcccgccggttcgttgccggctgaaaacatgataaacgacggatgattgcccaacacccgaaagatgcgcgctgcctcctcgtgcaaccacgcatccaccttgcgcccatcccccacactgctccccgaattcgcccaaacaccggcctccacatacaacaacatccccgtctcatccgccgcctgaaacgccgcctccgggggagtatgcgaatgaaatcgcaggtgattcaacccatgcgcctggcaaatccgcataatgcgcttccacgccgccacatccgtcggaggatagcccgtcaaagggaaaatgttgcactcaagagtgccacgcagaaaaagtttgcggccgttcaaagcaatttgcgtcccctgccgcttcacctcccgcaatccaaacgacacctcccgttgatgacgcaatacccgtccttcatccctcccctccaacgcagccgtcaattcatacaaaaccggcgaaaattcatcccacaacaacgcatcctcttccatctcatactcacactccaccaccccaccctccggagtccacgaaaccggcacagtcaccggcggcacccgatgctgccgtggtccattgtaacttcgcgccgtcaacgtcaacgtcccactgccggagcgccctgtgagattgcccaaccgcgccttgataaccgcacggcggcgagccacgtccggatacacctgcaaatcgtccaaccacacagggtccgtggccgttaattccaacacccccacaatcccattccagttgccttgcgtgtgatccgaaacactgtgcgcattgatccccacctccacatgaagccggttgtccacacgtaccgtcagccgatgccgcccaggcgtcaacgccgcagtacaatcatattcatgcggcgtccccaaactgttccgcgacccaatccggcgctcatccacccacacagtagtctcccaatgcggccgctccaaccgcaacaccacccttttgccctgccacgacgcgggaatctccacctcccgctgataccacgccacccccacataatgccgctccggttgcaaccaaaacggcaccttgatattgcccggttgccggtagggcgcataacgctcatccttgaaaaaggatcggtctatgatttggcctgtccactgcgtctccatggtcaccgggtccccaaatccctgctcctgcaatgaaccaggcaaccgcagccgctcctttaacacccggccatgccacccctcccccacaccggcatcctgccggtccagctcaaaccgccatgtccccgccaaattgatgcgctccgcagctcctgcgtaaaagttggccaatgcaaaaacaatgcatccaaaaaatccaactgccagcctttgggcgcccttgagattgaggtgttgggtcatcatgttgcaagggcagtattgcaaatgccgcactccagtttcaacacccaacaatcacccctctccaacggtggacaaaaccaaacaactcggaaatacttccaccatgaaacatacccttgcctgcatcgcactcctggcttggctggccacggccctgcccgccgccgaacgtttccccaacctcgcagccggtagcaacctcccccaaggccccggctttgcaagcaagttcaaagcagactccggcatcgccaaccatccctccgtcatcttttccgatgattttgaacagggcgatttaggggcacgctgggacgaaaaaggcgccggcaaaggcaaggccctaagcctcgtcccaccaaacgatacacgttgtggccgccgctgcatgaaagtcgaagcccgactcggcgaaaaccagggcgacggcctcaccaaatggttcaaccccgtggacaccgtgtacatccgcttctacgtcaaatttgaccccaactgcgactatgttcaccacttcgtcacacttcgcgccaaccgcggcctccgcggcgcagaccgctggagcggctttggcggcgcaggactcaaaccacgcggtgacgagcgcttttccacagccttggaaccttggggcaattgggccaagtggccgcccccgggcaaatggaacttctacagctattggcacgaaatggatgtctcccgtgatggcaaatattggggcaactccttccaagcagaaccccaggatgtcattcccaaagaccgctggatttgcgccgagttcatgctcaaacacaacacacccggcaaacccgacggcgaacaagccttttggattgatggacgcctcctcggacattggaaaggcatcaactggcgcaccaacccctccctccaagccaatgccctgaccttggaaagttacgtcaccgaccgctggacaaaaaaccccaccaacaccgtctatttcgacaacctcgtcatcgcccgcgaatacatcgggccggccaccgccccctaaatgggcagcgtgggctgcggatttgccgtccctttgtccggcactgcggctgccgcagcttgcgcagcgccattctcaacctgcaccaacgccggccgcaacaccttgccctgatacgtatatcccggcgccagcgtcaaaaggatgcgcgtgcccgcagccggtggctccgcacactgatgggcctgatgcatctgcggatcaaacccctcgcccgcctccggagaaaacgcttgcagccccacccgccgcgccaaatcacgacaaacattttggaacaacccgatttgctccaccaaatgcggctgcccgctctgccgcgccgccatgtacaacgcaaacacctggtccagcagacgcaacgtcaactgcagccaatcctgctcctgccgccgcaacttgtccgcttccaaccgcaacgtcgccttctcggtatcattggcctgccgcagaaaatccgtgaatgccttggcctcagccgccatcccgtcggccacttccttcgccgtttgcaccgtccgcgcacattcgccctggatgttcatccacgcgcccgtagcctcggctatctgctgcttgatggcctccaaattttgaatctgcgccactgtcgaacgcaacgcatccgcctccgccagcttcatctcagcccggtgctggagaataaacggcgtcaccaacaaccacgccccggcagccaccgccgccgtgcacagcgccatattcgccgtgctcaacggccactcgctttggtacacaatgccaccggccaccgctaataaaagcaggtcgcccaataaaaacggcaacaccgacggtctgggagtcgcaacgtcactcatgcgcccgccagcttatgtccttaggcacaacccatgcaacagcgttttaccccacccacaacatcgccactccttttgtccaaatcaaagaacccccaccccaaagcaccccgcccctctcacaccccctgccccactccttttccccgcaaaatatggccattccttgccaaagccggtgtagcaaacaaccgccggtattcataagtttttcctgccatgctgagacaccagcctgtgcgtgttttatgaaaacagtccccttccccagaggaaggggcgaataaccggcataccgccacaaccaacgcacaggcccggaccccggctggccatgcaaatgagcggaagtcattccatgggcgcgcccacggccgcagccaacgtccccgaccttcaggggaacgggatcgaaggcttggcaagccccttgccggccatgtccagcgcctacgacttcctccaaaaccaatacgtttacgtcatcgtctccgcccgcgcccgcggattatccgttggcgtcaacctgaaccccgaacgccgctgcaacttcgattgcctctactgcgaagtcccacgccccatggccggtggaaacccgccggtcaacgtcgaagtcatggcccgcgaagtcgagcgcaccctcgcctacgtccaatccaaccgcctgcagcagcaccccgtcctcggcacgctcccacgcgaatttgtccaattccgccaccttgccctcagcgggttgggagaacccaccctgtgccccaactttgtcgaagtcgtccaaacactcgtccacctccgcgctttagggcggctgccctacttccacctcgtcctcgtcaccaacggcagccagctcgaccaccccagcgtccaggctggccttaaatactttaccgccaccgacgaaatctggatcaaactcgacgccggcacacccgagtacttcctcaaaatcaaccgcacacccgtcccctacgaaaaaatcctcaacaacatactcctcgtaggccgacagcggcccgtcgtcattcaaagcctcttcgtctccgtggaaggcgaggaaccgcccgcccgccaaattgagcagtacgccatgcgcctcaaacaactcaaacaagacggcgcccaaatttccctcgtccaagtctattccgccacacgccccacccaccaacccgcctgcagccacctccccttgaaatccctcagccgcatcgcccaaatcgtccgctgcaccaccgaactccccgtagaagtcttctaacccccccgacctccgtcccacttgacagcccgtggcaaactcctacgttgccaaccatgcatcgcccttccgcttcatcctttggcatcgggcttattctggggttgctcctgaatgccccggcacccaccttcgccgcgttggatactcgcgagctgcacacagaagtcaaaatcaccattcaactgaaatacctcatctggctgccggaaggttatgccttgccccaaaaccgctctactcaatacccctgcatccttttccttcatggtgcagaaaaacgcggcacaaacataaacgctttgcaggaccttggaccgctgaaatatgcgcgcacacatcctcaagccttcccttttatagtagtagcccctttgtgtcccccgggacgccaatgggagccgttggcgttactgacattgttggatgaaatccagcgccagtatcgcatcaaccaacacgccatttacctcacaggctacagcatgggcggtgccggcacttgggccactgccatggcggctccagaccgctttgccgccatcgcgccattgtgcggcagggtcattccactgcttgcaggcaacttgtaccgcacgcccgtctgggtctttcatggtgaaaaagaccaggtcgtgcccctgaaccactccaccgaaatggtggacatccttaagaatcgcaataacccccacgttaaattttcactgctgccgggaaaagaccatgaaatatggcacgatatttacgataactccgccctctactcctggttcatggaacaccgccgcccctgacttgagtacaaccccacgccgcgatccatctaggtgaggcaaaaaacaattccccgcgcaacaacacctttgcctccggagacacgccttcacaatccccgctgctccttcctctgcccataccggccaccatgccgaaaagcaaaattcgccccccttataaattttccatttttcttttgacaaccaaacttttcggcctagagtgacctcatagcttggcaaaccacgtggattaacttcgaggtttcccaacatttaaaatttaaaaggcctgcttatgaacgactttaacctgatagaggagccgtggattcctgttatttaccacaatggcaactattgccgtgtcggcatcaagcaggctctttccgatgcccatctcatccgcgacatcgccacctccaaccccatggaccgcgcgggccttctacgctttctcctctctatagtttattggtgccatggaatgccagcccctcaagaaacgtctcggctaggtgatcctttaccggattgcacaccacatcttggtgcaaagacaaattttttctgccttttcgggcagaaacaccgtttttaccaatcaccaacggcaaaccgagaagtaaaaattggtgaactgtttcaagaaattccatccggaaacaatttctggcattttcgacatgtcaccgataaagaacatggatattgcccagcctgttgtgctctaggcctgctgcgccttcctcttttttcagtcagtggattgccagacttgaaatcggggattaatggaactccacccatctatgtctttcattatggcaaatctttagctcaaattctccgaaaaaactggttgccaatgaagcaaaacttgctgggcacgccatgttggatggaccccaccttggttccaccaatcggagaccctatcccgctgttaatcggattaaccgtcccagcacgcaaagtttggctcggacaacccattcaccatggccgttgctctttgtgcgggaacccatcaaaacacctggttttcgaggctcacattcaatccgccggtacgttggaaaattcaaattggcaagacccacatgttgtttatttcctaaaccaacaacaacgaaagtcatgcaaagctcccaatctcgtcgtaggcggtgaatttcaaatggaccgcccttatgccgatcttatggcatgtctcttggaacgggtccaatttcccgcaactgcgacaagccaacttctaattgtcggttttgccacggacaaagctaaaaatatagatgtttgggagagaactgtaactttggtccttaacgaaatgcagacaaccgcagccacagctttttccacctggtggcgaagtgtaagtgcattgtccaacaatgtttacactattattaaaacaaccccctacaatcggcctcgtgggtccaaaccctcgtatgttcactgccatttttcccacatcagaccccatgtggaacatataatatcatctaacatgcatattctagtaagtgaaccaaacgaaggttggcatgaagcacgccgtgagttcagcgcttttttgccgatgttggctcaatccctctctcccggcgtgacctcccaagccgttcaaaagcgccgtgccatcgctcaggccttgccacctaatccctgcccgaaaccggaaccatccagttcaccctccactcaaaaccccaacttgtaattatgagcgccacccttgaatacattacaaaactgtcccatataaaggccggctcccgcactttggttcgcactcatgccaatctctcattgaaccattccgtggatgcctttgatttgttcaccggtctttggtggcccttgcgccaacaatcacaatttgcaccccgtcgccgcgtggcctggctggtcgccaaacttcacgcagtcagtcctctgccacaccaaccaggccagaccctccccatccagctcgcgaagatttggcataggcagccagacaccaatacaaaaaacaggttccagcgcaaattcgatgatctcctttgccgtcccctggaccaaatggaacccgctttgcaatgggccttgagaacaattggctctgcaaatgagccatccttggactgggtgcaactcaccgacgacctctcccggtgggaacaaccgcaagttcgcgaaaaatgggccgaagtctttttaggcaggtaaactcaaaaccaaaaaagaaaggagcatactcatgaacaatcaaaataccacacgcatacaaatccatctgcttcaaaaccacgcaccggccaacttgaacagagacgatttgggagcaccaaaaacctgctacttgggcggcgtcctccgctcccgcatctccagccagtgcctcaaacgcagcatccgattgagcccctacttcaaagacctctgcggcggtgttcgcacacgccgcctcgcaaaactcatcactgaccaggttgatggcaacaatgcgacgaagaaaaaagtggccgccatcctgaagaaatgtggtttggaggccaaagagaacgacgaaacaaatatggtcgtttacaccacaaaagaagccatcagggaaatggcaacagccttgagaaacggactcgaagaacccgacattatcgccagattcaaagagcttttgagcacgaatactgctgtcccggacatggcactgtgtggacgcatgttggagacaggagaaatcaaggacaccaacgtcgaagccgccctgcaagccgcccacgccatttccacacacgaggctcgccccgaagtggattactatgtgacggcggatgacatccccggaactgatgccggcgctggttatgtggacgaagccatattcgtttccgcctgttattacaaatacttttccattgattgggcacaattgctccacaacctcaagggctacccgggcaacagaatccatctcgcagcccataccgtcggcgcctttatcaaggcagctgccttggtgactccatccggcaaacaaaacagctatgccgcccacaatccacccgatggtatcctcgtggaaatctcccccacacccatcaattatgccaatgcctttgccaaacccgtggacattggccaacgtgatttaatcggccaaagcattgctcaactcgcccagtacatccacgagatggatgccggtttcaaagtcgttgacccgtccaagcgcttctggttttcgccgggcatgcgcaatcgcttggagacctcacagcgcgccggtgatacagcaggcgaccgccaaaccatccgagtccaggcggtggaggttgatcaactcgaaaacctgatccatcaggtcatcaaggccattgacccgatcctcgactggcaggaagtccaaagaaccattctcaataaccatgaagcctgacacacttcttcttagactggaaggccccttgcaagcatgggggcattacgagtccaaatttgccatccgccgtgccgccgaggcccccaccaagtccggtgtcatcggccttctgctggcggccctcggcatcccgcgcacctccgctcctgatgattggttgggccggttaaactccctcctcatgggcgtgcgcgtggaccgtccaggtgtccgttggtgggactaccacacagtgggagctggccttaaaatgagaacagccgagggcaaaaacaaggatggccccctcctcacacgcagagaatttctctgcgatgcctcattcttggtagcccttaatggagagcccgcccttataaaagaactataccaagccctccaacaacccaaatggactctttacttgggacgcaagtgctgcccgccttcaaggccaatactggctcacgcccccggctgtcacaaagatctaccatcggcactacagtctgttccatgggaaaaacggtatgcagacgacaccacaccggaaaaacttgaagccctgctggagtggcgtccctccgaccaacaacccaatgcccccgatgacgccgaaatctggtatgatgccccccaatgcttggaacctcccgctcacggtccccgttttattacgagaactgccttctcagtcgctccagacggccaagtcaccgtggcgccccaacaccaacagcagcttcctttgccgcctccacgcccaagagcaaattacaacaactcagcataccaacgcgctcgtgataagcgtctgcacgccgatcatggcctgtgcgtgttttgcaaaaatcctgccaccaccgtccaacacatcacctaccgccgcgccggtggcaacgaaacaacagaagacctccgctccctctgccgcctttgtcatgatgccgtcaccatgatcgaatacggtttgggtttggagatgggccgcatcaacccggaagacccccaatggcgcgatgccatactcaagaaacgcaccgaaatcatccaattccgttcactcgaaaaccgcagacgttttttgcaaccagaggaggtttaaccatgtatttgagccacttattgattgatgtcggcaccaaccccgaccggccacgccccggccgactttggctgcgcaatatttaccatgtgcaccaacgcctgagcatggccttccccaccactcagcggaaaaccaacgacccccacttcttgaaaccctacaacccggccgattttcccctgcacaaccttggcaaccatgtttcccgcaacgaaaacaccggatttctcttccgcattgaccccgtgccggggggcaatcccctgatcatcgttcaatccagcctcaaacccaattgggactacgccttcaacaatgcggcattccttctggcagcccctccccaatgcagggacttcctgcccaatttcaacaaaggcgatcacctgcgcttccgcatcctcatcaaccttagcaaaaaagccaggacaagccatgacggcacccctctcaccaaagtcaaagaaaacatcctcgataaccaaaaccgccctaaatcccagtccaaacgtgtcgcgctgacatgggatgcaaaccaaaatccacaagatgtcatcattccttggttttcccgcaaggcatacgtcacatgccaaaaccaaacccaacccatccaggcatttcatctcaagcaatgtgaaatcctgcgcatgggttggattatcggatggaaaaaccaccatgcagccccggaaccgacctcacaaaaaatgaaattccgctctgcccttttggagggagtcttggaagtttcccatcctcaagccttcgccaaactagtagcctcaggcatcggctcggccaaagcattcggttttggtttgctctcgctctccccggtttcctccgctcaatgaaactggacgacctccatatcctccccaaattctccgatggttggagctacctctatgtcgagcattgtcgcgtcgaacgagaacaaaacgccatcgccatctatgacacagatggcatgatccccgtcccttgcgccaacctggctctcttgatgcttggcccgggcacctccatctcccatgcagccataacagttctggcggaccacggctgtttaatcatctggtgcggagaacaaggcgtccgcttctacgccaccggtatgggtgaaacccgcaatgccgcccgcctcctccatcaagccttcatgtggagccacgaaaacctccgtttcgaagtcgtccgccgtctctacgcaatgcgttttacagaaaccctgccatccaacctgtcattatctcaaatccgcggactcgaaggccgccgcgtccgcctggcctatgacaaagcggcccgtgccagcggcatcccctggaaaggccgccagtatgaccgccatcattggacccactccgaccccgtcaaccgtgccctttccaccgccaattcctgcctctacggcctctgtcactccgctattgtctcctcaggtttctcccccgccataggctttatccatactggcaaaatgctctccttcgtctatgatatcgccgacctctacaaaaccgaaatcacagtccccatagctttccaagcggccgcccaaggagacaccaacctcgaacgccgtgtccgcatctcatgccgtgacgcctttgccgaatctcacctcttggcccgtattatccctgacattcaaaaagctcttgcttggcaaccatcccaaaacgaaaactccccccttgattcagaccccgcccttccctctcacctttgggacccggatttaggggccgtgcaaggcggaatccaacaacctgccacatcccctttgcccccaactataccagccccagccccggaatctcatgatggtgctaatccttgaatcagtcccaccttcactgcgtggagaactcacccgctggctcttggaactcaaagcgggtgtcttcgtcggccgcgtctccgccctcgtccgtgagcgcctttggaataaatcctgccaccacgcccgcaatggcggctgcctcctcatctaccacaccaataacgaacaaggctttaacatcctctcctatggtaatacatccagaactatcgccaacttcgatggactcctcctcgtcaaaatcccaaaataaccccattttccaagggttttccccacgcacgtgggggtgaaccgcgtggtgcgaggtgaacaagaagatgccaagcgttttccccacgcacgtgggggtgaaccggccgtcacctgcccctcccgatccgtccccacgttttccccacgcacgtgggggtgaaccgcggcaggtggtgaagagttcggcgaagtttgcgtt

SEQ ID NO: 512 - DNA, 130839 bp, Artificial Sequence; identical to SEQ ID NO: 511
  Synthetic Oligonucleotide

SEQ ID NO: 513 - DNA, 124044 bp, Artificial Sequence
  Synthetic Oligonucleotide
cctgttccacctgctgtttgaccacctgaccgttgaccttcaccgtgatctcaacctgctgcatcgcaacctccttgtgcttcgcacgacagcaccatgctatcgtcgcgtacaagaagcatagatgtaattattcaatggcgccaccctaaatgggatgcacccgcggtactatcggactccggatcaaagccccgtctcacccgcggtactcggacgtgtgccgatttcggatcgagcgtcatgcacgatgccgctcaaccggcgccgggccgattccgaaatccatactacacgggacagacgttgcgttccatgcgccccgcgcgcggatcggcggagccgggtccgggcggggcggtgcgcaacccctgaacagcggagtcacgtgttgtccgattcaaagaactcaagcgcataccagcaactcgtcgccaagacgcggccccaacgcacgccgatgaagtccgcggaagccgacctcgacgtgctggtgtcgtcgctccacgctccggcccaggggcaacctgcgggtgatgcggccccggtgcgcgatccgttgcagacgctccgcgacatgacggtcaacgagttcgtcccggccttcgtcgagctcgtggagaagtactcgaaggcgggaatcgcgatgcagatggacgcgtcgagcttcctcgagggcgggcgggagatgaagttcgagttctgcgtggccgactaccggctcgtcctgcacgggaccgtcacctccgagggcatcgcgttccatgaaacccgctacacgcccgagttccacggcgagctgaccagcggcccgatgctccgcctgcgcagcctcaacgccaagactttccgggagttcatctgcgagcgtctgactgccctgctgcgcagcgccatgcgccgcaagctgacctgaggacgtgtctcacaagatcgctttcgaacggcgccgcgaccgtgagggagcggtttttccacgagaacggaccacttccttaccggcccggctcggaaagaacacttccgaaacacgttctgaggcgtcaatctcggtgtgtcttgccgagttcgacgtcctggcggcgggccggggcgcggtactcgagctcgagcccctcctgacggaacgcgtccatgcccgccggttccggaaacgccagccggacggaccacgccggctcctgcgcggcgcaaagctcctcgaagtacgcggccagccgatcccaggtcatccggcggaactcgagaggcagccacgcccacagccgagccttgaacagcggatccacgttccgatcctgcataaacgacgcgacttcgtcgcggaagatgaccttcggcggctggagcttgcggcggtcgttgatgtcgcggcgggtgtcgatcatccagaactcgtagcacttgcgggccagcaccatggagttgagcccgggctccgtctgccccagagcgaattgtttgagcgctcgctgcacgaagctgcggatcacggccgtagccgcccggtaggtctggagctgatcgaggatctcatccatgacgaaggcgtcgatcgtcccgaggtactgcccctgcgtcgacccgtcggggtgagggttgtttttcctgagccaggcgaagaagttttccgccagctcccggttgttctcgccgccctccaggtagaggagctgaatccagttgtgcatggcggtgacgaaaccggtcaggtattgcgggccgggggtgccctcgacgtagcgcgggtcgtccttgaactgctccctgccgagtcgcatgtaggtctcgtacaggtacgggatgaagcgggtgtccgcggtcatgtcgaggtacgacgagaacgggtcgtcgaagtcggggtagagtgtgattcgcccgcggttgatcaggttgttcagcgagaagaagacgtaccgcgcggtgttcatggcgtccgcggcgtcgacgttggcgtagccccggcaggtttcgtcgccgtaactcgaccaatacagcgaatgggagaatgcgttgcgccaatccagaggtccatactgctcgaccatcagcttgtacatgtagtcgagtttgaacttcatgtcctcgcggaggaccttcgaccgcaccgcggcgagcagcctgtcgagtgctccggcattgtccgggtcgcgaaccagcttcagccgtcgtgcccgaagtgagtccggctcgcgctcctcggcgacgagattctcggggcggatctcggggcggagatggcgggcgacgaactcgagcagcgtcagatcaggtccgagttggacatcgtcaaggcgatcgaccagttcgccgacgtccgggtcggtcttgatcaatgcggtcaggtcgcgcggcgcgtccacgatcttcctgaaccaggcgaaatactcgtcctcggtcagagcgatgggtggaggtccgaggacgcgctccatatcgacggccagagcgcgcttgtagttcatgtgctcgtcgtcgaggaagtctccgatcttgtgccagtagatccacgccagctccttgtagagggtgaccgatcgcgggttgtaccggatgccctgatcgcggaggatttcgaggccgttccgcacccatttccaacgcgcctcgggggtgaactgccccacggagatgttgtacgccatgttccacgcggcgtacgcccacaccttcgggaatcgcggggccagggcgcagatcgtcttgtgcagctcgagggcctcgtagttcttcccctcctccttgagtcgctcggcgcggatgaacgcccagtcgatggccagggcgcggaacgtccccagcttgcccaccagggcgatgtcgggcggcagggtcccgagcgagtcggggttcgtgacgagctgccgctccttgcggattttgttgatcggatcgaccagcaggcccgccgtcgtgagggtgacgacggcgacgagcgcggcgaccaactgaatggaccattcccgccgccgggccgcctgtcgtgcggccaggtgctcgggcagtgtgtattggagaacttgcgacatcgggcattctcagacggacacttccgccacctcccggcgctggaacagcagcatcgccagccccagcacgatgaacgtcttcaacagggcgagctcgaatacggcctggagcacccagaccagcccgacgttccggcccgaaacgagggactccaccgcatcgtagcgtgagaagtccggcaccacgaagcacacggcctggaacaggaagatcagcaactgagcgaagaactcctgtgccgacgagaacatcgtcgcgtagtcgtcggacaggaaatcgagcgaatccagaaggaactgctgcgccccggcgaagacatagaccgtcaacgcgcagaggcaggcgacggggaacgagaagatgctcgccgccagaatggccagcgcggccaggaacatgagcttgcacatcatcaggatcagcagccgaaccaggttgccctcgaacgagccgacgatgaacagcacctcgacgggctccgagggcttgaagtcgatgacgttgcggaaatcgggctcgtccgcgaaggggttccggttgaggaatgtgaccttgagcgtgccgtccggcgccaccacgtcggcggccacgcggacgatgtggtagcggccgaccatgtgccgcacgtcggcccgccgctcaggcgtgcctcgggcccggtcgccgaagatccacgtcgcccggaagatctcgtccggcgcatagttgctcacgtcggccatgtaccgcaactggatatagggctgccggttgcggtcgaccaggacttgctcgaagtagaagatgcgaccttcccccgggcccaccacgcgccaccgtgccgagtacttgttggccagccgcgccttttccgcctgcggatcgaagtcgggcacggcgtcgtagagcccctcctcgcggttgcgctcgaactcggcgtcaatgtcccgggagaagtccggcctgcgcaagggtcgtgcgtgccgcgccacgagcacctcgttggtcagctcctgcttgtcgaaacgatcgtcgagcggggggtgggtccgcatgatgtagtggaccatgccataggctgtcactcccgcagcgcacaggaacatgacgttgaggcccgtgatacccatccacttgcccgccaggaactgccaccgggcgacgggcttcgtgacgatcaggaataactgccggttgaccaggtcgtccgacagcgagcgggacatgaagatcgtgagcagccccagaagaaagcccgtggcggtgaaggcgtaggaaaggaagctctgtaccgcgccggtcagcgacgcatcgccctcgatcgagaacggaaggccgatgacgatcgccccgatcagcaccagaaagacgagggcgaccttcatgcgaacgccctcagcgatggtctgtcgggccacggcccagatcggcgtcacgactcggcgtccggcttgttcgggtcatcggtcatgtcgtcgccctctgatccgcgacgcgcgtcgttgtggaggagtgcctcgatgacggcctcatcccgcgcgatcggcacgcgcgtgcgctgcggcttgacgggaatgggctcggccggccgggcggcgggcctggcggcttcgtcccggcgctcgggccgctcgcccacaagttcttcgatgacctcgcgtgagggttcggcctcgggccggggcgccggcgcgatggcggccgcgcgatcgcgcaagacgtccggcttgggtccggcggccgccacgagagagtcgacgacctgctcggtggtcgcctcggcttgaaggaagtctggaagatccccgccccggcgtgcgccgtaggtgcggatgttggcggcctgggcctcgtcaacgatccgcagaaaaaactcctcgaggcgcacgcgggggttcgtgacttccagaagatccttgtgttcgcagttacggatgacctcacggacctgctcgatggtgcgctcggaaagcgacggggcgaccatttgcgtcacgtcgccctgacgaagcagttcatgcacctcgccggtggcccgctcctggcctccgtacaggatcgtgacccggtcgcacacgtcctccacgtccgcgagcacgtggctcgacagcaggatggtcttgcccttgcggcccagggcccggatcacatccttgatctgcttgctcccgatcgggtccagacccgccgtcggctcgtcgaggatgaggaactccgggtcgttgatcagcgcctgggcgagcccgatccgccgggccatgcccttgctgtactcgccgacgggccgcttggcctcgtgccgaagtcccaccatgtccagcagccgctccgtgcgctcacggcgcacgcgggccggcagacgaaacagccggccgaagtaatccagcgtctcccgcgccacgagaaaccggtagaggtacgactcttccggcaaaaagccgatccggctcttgaccgagacgtcggtgggcgccttggcgaacaccgagattcgcccgcgtgtcggatagagcagcccgagaagcatcttgatcgtggtggtcttgcccgagccgttgggcccgagcaggccgaacacctcgcccgggcggatctcgaagttcaggtccttgaccgcctcgacccgcgggcggcgccagaagtccctgaaggtcttgcagaggccgacggactggaccacgggttggctgcgatcaggcatgggcggtgctcggcaaggcgttcgttcgcgtcgctgtttgaatcggctcggacatcgccgcctgctactcgaactcgggcccgatcggcgcatatcgctgcgggcgcagcttggatacgtcgaactctctctcttgcaggcgtttctcttccgtgatccgcgactgttcgggatcgatggggaccaggagccgtacttcggtcatgtccggccggaagatcttcacgacgccgtcgtagttcatgatccgctgtttggtctgttcgagaatccgggcgatcagcagcgacggattccgcttgtactccggaagcagcgtctcgtacaggctcacgtcgctctggatctggctcaccaccagcgacaggtaggcgctggcgtccttgatcatacgccccgcctcaccctcggccttctcgtgcaggaggcggtcgacctcggcctccgcggcggcccggacgcccggctccgcatccgcgtcgtcgacgacggccagtttcttgagcaggtcctcatgcgcagcgccggccacttcattgaggatcttgctgctctgctgttttgcgtcgctgatccgcttttccttgtagttctcggctcgaatcgtctcgtcgaacgcccgccggacctgaatgggcggagtcggctcctgcatctcgatcagggtgatcgtgatgccgctgttcaggctttccagggattcgttcagccttcgtttcatctccgcgtggacgtcgctgacccgcgtgcggatcatctcttccgcggtcatctcgctggctacgtggatgccggcgttctccaccaggatccggatcagatcctcggcggcttcgacctcgcggccgctgatgttcgacacgtacttgaccacgtcgtcgccgtcgaacttgtaggtgaccctccagcgcatgtggacgagcccggcgtcggccgtcatcagcgccccgtcgagcgtcgggcggagcccctcggcgggcccgcggctgatgaacgccagcggcttcccgatctcgtccctcgtccgccggaaggtgtggctgtcaatcgacagctcgttgctctttcgcgtcggaaggggaacgatctcgtcgattgggaacgggaaggccaagaccagacccgcttcgtggacctcgggcttcaggcttccgagcctcactaaaagcgcctgctcgtggctctcgatccgccggaagttggaaaacaggtagagtacgacgaggacgagcatgatcccctttagaatccggaagctcgcccgcagagcgtccgccagggactggttcgccgcgtccagcggtgcatcgcccgacaggtcggcggggccgtgatggggatcgcgttgcgtcatggcggcttattccgggcccgcgagattcgcgggctgcggttcggggattccggaaagctccgtagcgtcggttcgcaacttgcccggcgcaaaccgctccggcgccgtctcgtccaggacgtcccacggcggcgtcttcgtcgaggttaccagcgtagtgcggtaacgaagcgcctcggccaccgtgttcagcgtgtcgaggaaaatgcgcagctcggggtgctcgtggaacttcttgtagtattcgctgaccacgccttccgcctcggttcggatcgcctgcaccttcttgtccgccgcggccaggatgcgcgactcggcggcgcgggcctgggcgaggatcgcagccgcctgcgcctcggcctgcgccgtgtactgcgaggccttcttctcttcgttcgacttcatgctctcgaagatcgccgtcgtgacggcctccggcagcccgagtttcttgatgccgaagtccaccacctcgaccccgtactggttcgacgcgtcgcgggcgatggcccgggtgatctcctcctcgatctccccgatcttgcgaacctcgccctcggtggagatgaactcctccagcttccgtttgccgatcaccgcgtgcttgtgcgcctgcaccgtcgtgcggagcttcttctcgccctcctcctcgcccgcgggaaagttggtgtgaaaccgcgccgggtccgtgatgcgccacagcgtgtaggtcgtggcgaccaggttcttcccgtcgaccgtccgcgtttcctccgtacggtcttcgagaatacggattcgcttgtcgtacacgacgacggtctggatcggcggcggcaacttgaagttcagccccggctcggtgatcgcctcgcgtgccggcttgccccacgtcttcttgatcgccacctccgtaaaacgcacctcgaacgtgcacatgtacaggataaggaccaccgccaggaagacggcggcgagtacggtgcccaggttcttcatgatccagttgctcctggcggcggctacgggctcttcttccgttcctgctcgacgccttcactcaacacgcggtccagcccgcccggttccttggtgtcgtagatgaccttgacgttggacgggtcaccgataatcaggtacttgcgaacgtcgtcgaggtcgctgtagatctggaggatcttccgctgcttgtacagggccggcgccgcctgataggccgccagctccgtgccgaacgcctgggccttggatgcccactcattggccagcttcgtggcatcggctcgcgcagtcgccatatccgccgcgatccggccgctcggcgcagcgatctccttctccgcattgcccagaagcaggtcctgtacgcgctgttcggcgtccgccagcttctgggggttggcgtcgggcttcgcgccgagaacgtcgcgagcctggattgcctcgtccagctccttcgcccgcgcctcagtgcccgcggcggcgatcaggatccgccgggcctcgccctcggcggcgttgatcgtggcctgcatgcgcgtctccgccgacaccgccgcctggaacgactcggcgacctgttcctgggacggcggatgcgccccgcggatcccgacgaatgcgatctcgatccccgtgtcgaggtcgtccaggcgctgttgcagcagccgctcgagctcggcgttcagccgctcccgcccgggtcccatcaacgcgtcgctgtccacgctcgccgcgtagtcggaaatgaactgatacgccaccgcctccatcaccgccagcgggtcgctgtagtggtacaggtacttgtggatgtccttgatgcggtactcgatcggaacggagaccatgagcaggctgacgggtacgctccgcccgccctcggattccgcatccaggcgcgaggcccagttcttctccgccgccgacttcgcctccttcggcgccgcgaccagcagcatgagctccggaatgtagtcgtgcttctccgtccagaggactgcatggtcttcatgctcgtcctcctctgccgtcgcctcaccgatgaccagctcccggattcgcccgaccggcgcccggcgggcgatgtcaatcggaaacggccacttgacgtggaacccggcccgcagaacctcaccaccgtcttcgcgcacgcggccgaaccgctcgaccaccgcctgctcgtccgcgtcgacgatcacgatcccggaaagggcgatgatcaccacgatggtgaacaccgtgatcggaaacagccagcgctggaggagttgatagaaccagttggaagtgacctcaaagccgaactgatagttgatcgcctcggcgatcgacctggcgacgctgcccggttcgctgatcacccccaacagccggctgtcgaacgacggccgcggcacgaagtcgggctgccgcggacggtaaaggtcaagaacgaagttcgcggcgaactccagccccagcacgatcagcccgacccggatcaggtaggccaccgccggctccgcccattcgaccgatctcgtggccatcagcgcgaccagcagtgccagacagaccagcgcattgccggccatacacgcggcgccggcccgcagcagccgccagtcggggagccgcgccagtcccaggcagtaactcgcgtagaggaagttcgcgagcaggacgccgacgacgaaccacatcatcatcgtcggttcatcagtccggtggacacccccttcggtcgccttttggaatgcggtgtccagcgaccagccccagaacagaaactgcccgcccagcagcaccgatgcgagcagtacggtcgcggacgggagcacccagcggatcatccagcgcagacggttctgctcgatcagcatctcgtcgcgctccatgtcgaacagcgcgctgtccgtgccggcctcccgcgcccgccgcaactcggcggattcgagttgctccgcccgcacacgccgcacctgtttgaagaccaggaacagcaccacccagatcggaatcccgacgaccgcgaaccgagcgcctgccgcgatcggcgccgactcgctccagtacgcgatcccggccagagtgccgaacgaggcgagctggagaaggagccccagcagcgcgaaatgttgggcctgtcgctgttgcgatcctgacgcttcagccatatcgctcatcactcggccgcggaaccggcccgccgctccggtcgaaccactctcgccgggtcatcgtagatgcaactagattgaccacgcgtgggcgaagcttgtcgccacggcgcgacagcttacaataacggaagttcagtgcaaaccgacggatcttgactgagtacgcgcccgcgggaggctcggatcggcagacggtccggatcaggctcggtcacacggcgtccgactgatgttccaacgcgtgtacagcgtagcccacaacgccttcgtggagaccatccgccagccgatctacgccgtcatcctcgtggccaccgccgtcctgatgatcctcaacgtctcgctggcggcgtttacgctcgaaaacgacaacaagctgctgctcgatctgggactctctacgctcctgctgagcgggttgttcttggccgccttcagcgccgcgggcatcgtcagccgcgaaatcgagaacaagaccgccctgagcgtcatttccaagcccgtcggccgcccgaccttcattctgggcaagttcctcggcctgctcgcggccctggccgtggcctattacctcagcctcctggtcttcgttctggcggtccgccacggggtcatgcagaatacctccgatccctgggaccttcccgtcctgatcctgggcttcgggagcctgtttctggccatcttcctcgcggggttctgcaactacgtctacgggcggcacttctcgaccacggccatcggggtcctcgtgccgctgttgaccgtcgccgtgatcgtcaccggcttcttcgacgagcacttcgaccccatccccttcggcagcaactacgtcggcgggcagatcatcctcgccgcctacctcgtcatgctcgtggtgatgatcaccgccgccgtcgccctggccgcctcgacccgtctcggccagctcggtactttgctgatctgcaccttcgtgatggggctgggcatcgtctccgactacgccctgggccagcaccgcgaggcgtcgcagctcgccggcctggcctaccgggccgtgcccaacgtcggagtcttctgggtcatcgacggcctccacgccggcaccgcggagaccaccgtcaccttcggctacctcggccttaccaccgcctacgccgccctcatcaccgtcgctatcctcagcctggccgtagccgcgttccagaaacgcgaggtgggataacggcgctccgcgcggcgcgctgagcaagccgctttgatcgcaacggcgcgcccgcgtgtttgcggcccgtgcgattgcttccgcggcctatgccggagcttgcccggcgcttcgacccgtccggtcacccagccgagccgtccacgtcgctaccgaggcgtaccgacaactcctcgggcggatctctcatccgctggtcgtgcaaacctcgcgtgacgcacaccgaacccaatcggacccaccggttcggagccccaagcgccagcgcggggcctgcccggaacctcgtcgaacggcccgcatcgccgcccccggccccgccgatcggagccgcgcccgtcaggaagcggtcccccgttgccccaccccgaccgtcacggaacgggctccacgtcgcgtcattcgccattcgccgtcccccgccccctcgccctcggggccggcgttttcccgccgcaggccgcctatcccggcgaatgttttacaatcctcagcagccctcgagtgctctggcaccccgaatgccggtcttttgctcggacggatcgttcggcaagcggcgatctgggccacggcggccaaggccaaactggaccgaatgatggcggcgtaatcccgatggtagcctccactacacaaaaacgccccaaccgattccactggaaccccgtaccaagacatcggctcggggttcggccccagcggtctgcacgcgttcctgatgaacccggtcccgcagcccttggtaccgacgctacatcctgtagccaccgcgatcctggcgctgttgatcctggcggccggcattgcgatttccgcgcgcgggcggggtgcccgcgcgctttgagagaaaagaggccgctggatgcggcgcagaccacacctttttggcgcggagacagaatcatgtcacgaagagcgtgcgtagtgttcgtctgggcaggttccgcttgtatgctcggtgcccggttaccaggggtggagttggtcgtctcgcaggacccgggggtgacccgcctggcgatagcggggttcccggcgttccactcgaccgacggccacgtggaagaggcgcggttgatcgacatcccggactcacccttgctgctggtcctttggggtgagcgtgacggacaaggcgtgccgcggcacataccaccgccgtccgtctgcgacctgaacgagcgttgaggtccgcacgtgcaccatgtccgggcgttcgagccgcaggcgtaccgttgacatggagggccacccgaaacatgatcggtccggccgcgccgaatcgcttcgagccggggagccaccgatccaagctgccgcccgcgacatgtgtgtgcacgaggtcttcgaggagcaggttgccttgtctccgggtcgggtcgccgtcgtcctgaacgaggcacagcttaccttcgcggagctcaacgcctgtgccaaccgcctcgcacgactgcttcgcgcccacggatcgggcccggatgtattgatcgggctccttgccgagcggtcgatcgagttcgtcgtcagcatcctggccatcctgaagtccggcgcggcgtacgttcccatcgacccgtcctggccttccgagcgcatcgcctttgtccttcgtgacaccgccgcgcccattgtcgtgacgcaggatcggtacctcgaccgccttcccgactgcggcgccgaagtcatccgtgttgaaccggccgggccggaggcgctgaggcagcggcttgcggaccctccgaacgtcgcgatgccgacgaacctggcctatgtgatgtacacctccggctcgacggggcgtcccaagggcgtgctcgtcgagcatcgcggcgtcgtgcggctggtcaccgacagcaactactacccgttcgggccggacgacgtgttcctccagattgcgccgctttgctttgacgtatcgacattggagctgtgggggccgctgctcaacggaggaaaggtcgtgcttcatccgccctcgccgatctcgatcggcggccttggccgcaaaatccggcgccacggcatccggacgctggtgctgatcccgccgatgttccacgctgtggtcgacgagagtctggaagtgctttccccgctcgcgcatcttatcgtaggcggcgatgtcgtttcggtcgcccatgctcgaaagctggtcgaacgcttggatacgcgtttgacgatcgtctacggcccgacggaaaacacctgcatcacgacggcgttcgcacccaccgcggaagagctcgccacgttcacgtcgatgccgttgggccgcccgatctgcggcacctacgtgacgctgctcgacgaatcgctccggcccacaccgaacggcgaggtcggggagctctgcgccggggggctgggtgtggcccggggttacttgaatcagccggagctgacggccgagcgattcgtcggcgacccgcgcggcgtttggccgggaccgaggctgtaccgcacgggtgacctcgcacgcgtgttgcctaacgggcacctcgagtttcacggccgggtcgatgcccaagtgaaggtgcgcgggcaccggatcgagccgcaggagatcgaatgggccctgcgtcggcacccgtcgatccacgatgcggtcgtggtggcccgcgaggaccgacatggtcagaagcaactgaccgctgtactcgtgttgatatcgcgcgaggtgcctacaagcgccgacctgagaacgtttctcgagacgatcgttccggagtacatggtgcctgcggaattcgtcgtcgtcgactcgttgccgctgacggagcacggtaaaatcgaccgacgtgctcttggcgaccggttgtagcgtgccgccgcgacttcgttccgtagccgccgagcgagcacgcgagtagcgccatggcacaagtactcggcctgagcttcttctatcacgacagcgcggcggccctcgtccgcgacgggcgcatcgtcgccgcggccgcagaagagcgcttctgccgccgcaagcacaccgacgagttccccaagcgggccatcgagtactgcctcgaagccgcggagctggagtcgatcgatcagctcgacgcgattgtgttctacgagaagccggtgctgaagctgttcagggtcgtcgagagcctggcccgagcctggccgatgggcctggccagcttcacccgccgcctgccgcatttcctcagcaccaagttgaacgtccagcggctcatcgaaaggacgctccctgcgtacaccggcccggtctttttcgccaggcaccatctcagccacgcgggatcggcgttttattgcagcccgttcgatcgcgccgccatcctgacgctcgacgcggtcggtgagtgggaaaccacgacgatcggcgttggaaacggggatcgcgtcgaactgaagcgggcaatccactttccacactcgatcgggatgctttattccgcgttgaccgggtacctgggcttcgaggtcaatgacggcgaatggaaggtcatgggcctcgccgcctacgggcggccgacgtacgcagagccgtttcgccggctcgttcagcaggggcccgacggtagttttcgactgaacatggcgttctttcgacatcgctactcctcgcggtggatcgcccacaaccggcggtgggagcggtttttcgggttcccgccgcgccggcccgaggccgatctgacgcggcagcacatggacctggcgtgctcagggcaactcgttgttgaagagctgattctgaacctggcgcgggaggcccggagggtcggcggatgcgataacctcgtgatcgcgggcggggttgggctcaacggcgtcgccaactggcgaatcgaacgcgagggggtcttcgacaacgtctggatccaaccggccgcgggcgatgacggcggcgcggtcggggccgcgcttctgatcgcaaaccaggtgttcggagacgaacgctgcccgcccatgacccacgcctactggggtccggcatggccggatccggagatcgtcgactttctcaggttgcgcgggattccgttcgaacaactcgacgaagagcagctcgttgagcggaccgcggagctcatcgcggacgggcgcgtcgtcggttggatgcaggggcggatggagtacgggccgcgggccctgggtgcccgctcgcttctggccgacgcgaccaatccgcggatgaaagcggtgatcaacgagaaggtgaagttccgcgagttcttccggccgttcgcgccggcggtcatgcaggagcgcgtacacgagttcttcgaggttccgcagggagcggacctgtccttcatggtgaaggtcccgcgcgttcgcgaggatcagcgtagcctcattcccgcagtgacccatgaagacggcacggcccgggtccagacggtgcaccgggagcagaacgccttattccaccggctgctgcgggccgtcgagcgacgcaccggcgtgcccatcgttctgaacaccagcttcaacgtgcggggcgagccgatcgtctgctcgccggaagacgcatacaactgtttcgtcaactccgggatcgacgcggttgtgatcgggccgtgcctggtcacgcagaagccggcgccgacggccggtactgagcgtgctcctgtcatccaggtgcagcgctacgaggatcggcacgatccgaatcggcattcaaccaccgttacggagaacgtgctcgccttctacaaggaactgcccttcaattactactcgaacgccgtggacgccgcgcggcagctcctgcgatcgaaccagatcaggacctaccctccgctgcaccggtacctcacggcagcgaccgagccttcgatcctcgacgtaggctgcggcgtcgggtggtttgccaactcttgtgcccgtttttaccaggcgaacgtggttgcactggacatcaacccggtcgtcttgaagcaggcacgctccgtggcccggctcctgccctgcaaacggtcaaccgagttcgtcgaatgcgacgtgttcgactatgagccgcggcagtccttcgacgtagtcaattccctcggcgtgctgcacagcacccgcgactgccatgccgcgatccgccgggtcgtgaaatggatcgcccccggcggttacctgcacctcgggctgtaccacctctacggccggcggccgtttctcgaacatttccagcgcatggagcgggccggcgcgagcgaggcggacctttacgaggaattcaggatcctctgtgacgacatctccgacgaagtgcacctccgctcctggttccgcgaccaggtcatccaccccttcgaaacccaacacacctacgaggagatccagggtctcctcgccgacgagggcttcagggtcatcgcgaccagcatcaaccgcttccgcccgctgccgccgccggaaaagctcatacagatcgagcgggcgctcgaggtaacatcgcggagggcaatcgaacgcgagcggcgctacttccccggcttcttcctggtctgggctcggcgcgcctcgtaagagtgcaccgacctgccgccggggacaagccccggcgctacatggggccgtcatctgactcagtcctggaacggatcggagaactgccgggccgtcaggaaggcgtcgtcggtcagggtgtacagaaacgcgacgagcgcttcgacttcctcgtcggaaagctcgtgccgctcgaccgggcggtcggggtcgttgttctctctcagtaaccggctcagacccgagtgatcctgcacgccggttgcgtagaaccggacgacatcctgcaacgtcgtgaaacgcccgtcatgcatgtagggagccgtgagggcgacgttccgaagcgacggcactttgaaccgcccaccgccggccccggcgtcctcagtcaccaggtccagtccggtgttggtcggctcttccgcgacgtgcgccgccgttcgatggcattcatcgcaggccagagtccgcaccggactgttcgcctgccgcgtgaacagatggaacccgagcttctcccgttcggtgaagccggccgcatcgagattcggctcctcggcactaccgagcgccagcgcctgatcgaacttggactgatacgacaccatcgaccggacgaactgcgccagcgccttcgctacgcgctgaccggtgatccgatcgtcgccgaacgccgcttcgaacagtgccggatagaacgacgcagccgccagtttcgcctccagcgccgtcagcgtcatccccatctcgtgcgggttctggatgacctgaaggtgttgggcctcgagcgactcggcccgctcgtcccagaaggcgaacgtgcgcggctcgccgggcgtgccgtagtaccgcgcgttggtcaggcccatcgcattgcgccgggttgctcgcccgcccagcccaacgctgaaccgccgcgaatccgcgaaaccccgatcctgctgatggcaggacgaacaggcaacggcgttgttcgccgacagccgctcgtcatagaacagcacgcggccgagcgtcgcgccggcgttggtgatcgggttgtccggcggcgtgttgtcgagggtcgacaacggggcgtaatgatccggcaacccggcggacgcgtacgccacataatcgaaccgcgcctccggcaacttcgggacacggtgccccggcgtccctcgcccgaatgccttctgaaacgccgcgaagtccaacaggtcgatatcgccgtcggcgtcgttgtcgaactcccccgactccggtcgcgcccgggctacacgaaaaccgaggtagtagtatgagaccctcggcggcccgaagtagtaggcgtacagcgcatgcagcccaaggaagttggccgagtggaacgacccgccgcgcacgccgcgaaagccgccgatcagcagcgtctcgttccattcccagacgttgccgccctgatcgaacgtcccgtacgggccgcgtgagggcttcccgccgtacgcgccgacctcggtcgtgtagtacaccggatcgacgtatccgccgaagtagtagttcgccgacccgtaggtcatgtccgaaccgggtggaagctcgggcgtaggccgttcgtgggactgggtcggatagctccagtattcgccgtggcccgcatagtacgcggccttgtaccattcgttctccgtcggcagaaagacacgggcgcggaacttgcgcaccacgccgtcctcctgcgacatgtcgtaggccccatcctcggtcgtggcggcgtcctgcgggccggtggcctcactgttgtgcatccagttggcaaaacgcaaggcgtcgaaccaactgacgtacgccgcggggcggcggccgcgattcggccgcacggtgtaggcgtagcttccgggcgagccgttgcgcacaatgccgccgatgtcgtgccagccctcggccatctcctcgttgtaaagggagttgggatcatcggcggcgacggcgttgagaaacgcggcgtactgggcgttggtgacttcgtacttggcgatctggaatacgtagtcgacctgcccgtgccccggttccccgaaccgcaggtcgggcgcgttccccgggtcgccgaccgtaacccattccatatcgacggcgaaagccgaaccggcgagtaccagcacaatccccgcagatctgacgagtgttgccacgaacttcgctctccggcgcccgttccaccgcggcgggtaggataaggaacaggataatcgcagcgccgccgacttgcaaggacctcccggccccatgaattgatcagcgccccgcgtgccgccgatgcggcaaaccgcgtgcccaccgcaccgcggacgacggtacggtccttgaccccgtcgggagggcgtgttacactggcgccgtcgtacgcgtacgttcgtaccgggtcgggaccagtattcgtgcagcctgtcgacgatccatcgcccaaggtcgcccgagcggatctgcggaccggtccgcgaaccggctccttgcgccgcgtggtcaccgacgtcctcttcgtcgcccgccgcgagaaaaaactctggctcagcccgttgatcctgatcgtgctgttgatcgcggcgctgctggcgatcgccacattggcgggcccggtggcgccgttcatctatcctttgctttagcgggcgcggcaacaaacgcccaacgctcacgccgggccccggatccgtccgcgccggatcgcggccgctgacgcgagaacgcgagaaacatcgtgggaacccgtcgagcggcgagactctatcgctggtggttgcgagtagcggccaggatacagaccgtcgtggtgaccatcctctttggggcgtgctacctcctcgtggttccgttgttttcactcatgctcgtgttacgcggtcggcttcgttcgcgccggggcgcggaacggagcgactggatcgacgtgcccgccgaggatacaaccgtggaatcgttccagcgaatgggatagcgattcgaggaccgcggcgttgaccgacgaagtaccagccgttgcatcaggtaagccgagccgccggccggcccggctgattgccgcgctggtgacactcatcggagtcggctttggcttccacacctccttcgatccgacgatcctcggcaagtacaacctccgatacttcatcgccctgtgctgctggttcgggatcctcacgccctgcgcgtatctgctggcccgttacgtcagcacgccgaccgaggtccacctggcgggccgccgccggacggtgatcacgccgcgggccaagctcgtcacgctactgatcctcgctctgtgtttcgccggtggggcccgcgcggtggcacgccgcgtgcgggagcgcgtcacgccctggacgttccacccgtacctgcaaaacgcctacaagcccaaccgtgcggagcttcacaccaaccggtgggggttccgcggcgagcaaatcgaggttgagaaacccgacgatacgttccggatcttcgcattcggcggctcgaccgtcgcctgccaggaaagcgcgttcgagaacacccattgccgcctgctggaaaaccggttgcggcgcgagtacccgaacatccacgtcgaagtccagaacgtcgggatgccctggcacggcaccgaacactcggtcatcaagctcctgttcaacgtccaggacttctcgcccgatctggtcatcatctaccacgcgatggccgatctctttcgtggattcgagcagcctgagttcagcaagggcgactatcgcgacgactacggccattactacggcccggtcgcgggcctggtaaagggccgacgttccgaccattacgggttcccgcggagcacgttcctcggcttctggctttcggacttccgcttcgaccgggtccgcctccttggcccggagggcgagggaatccacgggatcggcatgcttttcgtcccgaaacacgaacccgtttccatcgagacgtggcgcagcctcgacgccttcgagcggaacatgcggacgttcgtggacagcgccagaagccggggcttcgaggtgttggtcgcgtcacaaccttacctgtaccgtgacgacctgacgcagaccgagcgcgaggtgctgatgctgcccatggcctgcatggaagacggcaaacagcccgacctcgcctccatgaagcgcggcatggacgcctacaacgaacgggcccgcaaggtcgcgcgcgaccgccaggtccggttcctggacctcgagaaacggatccccaagtcactcgattacttcttcgacgacgtgcactatacaacgaagggcaaccggaccgtcgccgaggcctttgcggccgacatcctcgattggggtatcatcccgcgtaaggtgcacggcaactgaccgtcgccggtcggccccgaccacgcaacgaaccgcccggtcgtcttcccgccgcacgctcatcgaccccgcggacgcaggctcatccgcaggccgccgcgaacccgaagcgacatctgcgcctccggcgtgaccgaacacccagtcgcgaggtccaggcaataacactggagcacccgaaccagcacggccttgatctcggttacggcaaacggcgcgccgatgcacctccgcgggccgctgccgaaaggcaggtaggcgctgcggttccgccgcgacacggcctccgggaggaaccggtcgggatcgaaccgatcggggtcgggccagtggtccgggtggcggtgaaggacgaaggggctcagaatcacctcgctgcctgcggcgacgggcgtagcgccgatgaccgcatcgaccacggcccggcgggtgaagacccagaccggcgggtacaaccggagcgtctcacacatcacacgatccagcagcgacaatcggtccagaatttccgctgtcggctcctgaggcccgaccaccgaatcgatctcttcgaccagccgatcgcgccacgacgggtttgcgctcaggacgtaccaggaccagaccagcgcgttcgcagtcgtgagctgcccggcgctgcacaacgtaatcacctcgtcgcgggccgcaccgggcgtcacgccggaaccgttcgccgcccgcaggcccgttacaatatcctcgaccagagtggactcgccggggcgtgacgccccgcaggtcaggaccgagccgatgaggtcgtccaggaacgcccggtcgcgccggaaccggcggtgggcgccggtcggaacggcgagcgggagcccgacgatgcggaaccactgccggttgatgaagtccacggatcggtttaccgacgtggccacctgaccgaggtggtcgctgaccgcggcgccgaagatcgcccggaggatcacgcgcgtcgacagccgcgtcatctcctccgagatgttcatcgacgaggagggcgcggccgcccaccgcgagagcatcgcgtcggcctcctcgagtatcgtcggaaggaaggcatcgacccgcggcctggtcagcgactgctggatcagccgtcgctgccgctgtgaatgttcgccgtcgctgaccagcaggccgttgccgagcaacgggcgcagatgtcgggcccggcgcccgttgacgtaggtcccctcgggcgcatggagaaccccgtgcaccaggtcggggtcgcacacgaggtacttgcgcccgcgaacggttcgaaaacagagcaggtcgccgtgtcgttcacgaagacgaagcagtagacgcaggatgtcggggcgttcaccgttgggccccttgagcggaccgtgggcgagccaacgggcgaccgccagccgaagggccagcgggccgaggaacgtacgttcacggtgtgacgctcgctccatggaaatcgacgccgtcccggccccgctacatgatccacgcccgacgcgagatacgatagccgaacgccggcgccgattccactgactcgacgccgccgcggcttgccggatcgctctgcggcagctatcctgcgacgctgggcaatgcgttgatcgttgcgggcgacggctcgaatccggctggatgcggcctcgatggagattggaccggaaaccacgcctgaccggttgctcgaggtcgcgcatgacctcgcgcgacgttttgcgccgcgggccgccgagtacgaccgccagggaaagttccccaaggacaacttcaacgacctccgcgacgccgggttcctcggaatcctcgtgccgcgcgaacacggcggggccggggcgagcttcctgacctacaccagggctctcgagcgcctggcgatgggcgacgcctcgacggcgctggccttcaacatgcacaacctggccgtggggccgctgaccgacccgcggctcgccgagctaccggaccgacgcggacagtcggttcgcgacttctgcgcgtgggtcttcaaggaatgcgtcgccgggcggaagctctttgccaccgccgccagcgagcccgggatcggctaccggctgagccgaatccacacccgctacaaacgggtcgagggcggtttcaccgtcaacggcgtcaagtcgttcgtctccatcggcagccatgcggattactgtgtcgtggcggcccgttccgagcgggacgccggcgacgtcccggggatctcgttcctggtcatcgagcgcggcagccccggcgtccgcatcgacgacgcctgggacacgctcggcatgcgggccacctgctcgaacacgatgcacctggaggattgcttcgtcccgtccgaccggctctacctgctcgaagcaatggccctgtacaagagcgccagagaggcgcattggcacgtcggatcgtgcaacggcgtctatctcggcatcgcctcggccgtcctcgaattcgtcaccgggtacctgggcggccgagccaaggccggaacgcaggagccgctcgccgacgacgccatgatccagcatcgcatcgggaagatgtgcaccgaccttgaggcagcccggtcggtcgtgtatgaggcggcacgcatggccgacgaggccccggggtcgctcgagaccaacgtcgccatccaccgtgccaagtacatggtcagcgtcgccgcatgcgacatcagcgctgacgccatccgggtctgcggcggtggggcgatcttcaagtccaggccgctcgagcggtactatcgcgacgcgatctgttgcagcgtcatgccggcgtcgaacgacgactgcctgacctacgtgggaaaggcgcagctcgggatcgacgtgatgtccccgcgcggctcatactggtgacgcgcccacgagcacacgggcgatggaactcgaagaacaactgcggaaacacctagctcagcggatctttcccggctccgatcccgaccggctcgggctcgatgacgacctgctcgaactcatcgactccatcgaactgatccgcgtcgtcgcgcacatcgaaaggacctacggcatcgaagtcgcggatcacgacatgcatccgcagaacctgagttccgcccgaaagatggccgacatgatccgacgcgcacaacgccgttgaccgggcaaaccgagtggccgcgacccgaaaacccgccgtcagcgccctcaacacctgcgatcggatgatcctccacgctcacgacgcccttcgctcgatgggctaccccggcttcctgaaccagacccacctctggctcgggcggcgcgtcgaggtcggccggctgcgccgcgcgctgacccggctcggcagacgccatccggttttcgtgtcacgggtatcgcgcacgcggcgtcgtccgtgctggacgttccgggccggtgacgagtgtacgcttatggaggcctcactcgacgatgccgctgacgacggcgtgctgcgatacgcggaggcgctgctggcagaaccgatggacctgtcacgatccgcaccgatcagcttccacctgctgcacctgcccgacggtcgcgacgtgcttttgatccataacgatcacacgctgatggacgccaacggcgcgttgccgctcgtcgcggagatcgtccggcttgacgagaacgcggatgaacgcatcgagccaacggtcgccggcgcccccgacgtgctccaccaagtcctccgccgaacgccgctgacgacgcgcctgcgagcggtacgctaccgacgttccgtccggtccgccatctcgcgccacccgacccttacactcgtggaccacagtgccccgcactcggctgatacgcggtcacggttggcggttcggctgctggacgaacggcaaaccgcgaccttcgatgcccgcgttcgccgcctcgacggactccccagcccgtcgatggccctattggcctgcgcattgcgggccgtgtaccgcctggccgggaccggctcccgcgaaacggcgagactcaacgtgaccgtcggaacgaacctgcgggccggcttcgctgaatcgccgaacttctgcaacctggcatcggtcctcgagctcagcgtcgccttgcacgaggccgacgatcgcgacgcgctctacgcagccctcacccgtcagctccgtgagcgaatccaacgcggttacgatctcggccacttgcaggtcacggcctggttcgcgggctttcgccgcctcgtacggcgacgcagccttcgtcggctgacccacgaccattctctcatctacggctatgtgaactggccccggcgcgccgtcgatcgcctttgcgaagcgccgataacccgagtgcatcagccggtcggagtctggtccccacccgggctggcgctgtcggccacacgattcggcgggcggctgagcctgatcgcgacgtccagcctcgacaacgtacccgaggcccgcgtcggacagttcctcgatgggctcgtcgcggacaccctcgcctgacctgacctggactgattcgatgccggacgggtggcaccgctcgccaaacgcggtggagtgattctgcactgcctgacgtgccattcgcccgagcgccgcgggaagcaacgcccgcggggatggacgcgagcaggaagcctcgcaccgcgaaacccgtcacggcaactcgagtcccgtggcggtaatcagccggtgatgagggatcgcgggatgtcgacggttgggccgggctcggggcgcgcggcggtttcgacgaggcgctggacggcggaagcgatgccggtggcgtcgaggccgcactcggccagttgtccgccgcgggagccgtgggcgatgaagcggtcgtcgggcaggcccaggcggatgaacggtgggatgtgcaggctcagcgcctgggcggtttcgagcacggccgacccgaatccgccggtgacagaatggtcctcgacggtgacgatggggacgcggttggcgcaggccctgcggaccatgtcgcgatcgacgggtttggcgaagcgggcgttgacgacggcggactcgatgccctgttcggcgagcatatcggcggcggcgagggcgttgatcgcggtgacgccgtagcagaggatcgtggcatcgtcgccttcgcggagacggcgcgagaggcccatcgaaaacggtgggcagtcggggagcggggccgggacgttgtctcgaggataacggatcgcgcaggggtacgggagggtcaggccgaacttcatcgcctcgaagagctcgtgctcgtcgaccggtgccatcaggatcatcccggggaagccgcggagatacgtgacgtcgaggaagccgtggtggacggcgccgtcgcttccgacgagcccggcccggtcgatgcagaacatgaccggaaggccctggagggtgacctcctggaagacctggtcaaacgcccgctggaggaaggtcgagtagatggcggcgacaggacggaggcccgccttggccatgcccgcggcgatgtccacggtgcagctttcggagatgccgatgtcacgacagcggtcggggaatcgctgctcgaacttgttgagcccggtgccgtcgggcattccggcggtcatggcgtagattcggtcgtcctgctcggcgagtcggatgagggtgtcgacgaatgcgttggtccagcccttgccgccgctgcctttgatggtgaccttcccgctctcgacagcgaagggtctggggctgtggtactttccgggctcggcggtggcccagtcgcagcctttgcccttgaccgtgtggacgtggaggagcacgggatgattggcccgcttaaccacttcgaggatttcgatcaggtggtcgatgtcgtggccgtcgacgggcccgacgtactggagccccatcgattcgaagatctgaccgggggaaacggtggctttgatgccctccttgaggtgggcgagcatgtcgtagacgggtcttccgaggagggggagcttggggaggaggcgtttaatctgggccttcacgtcgtcgtagaagttgctgacgcggaagcgggcgaggtactcggcgacggcgccctgggtcggggagatgccccactcgttgtcattcaggacgatcaggaactggcgtttgacggtgccggcctggttgagcccctcgaacgcgacgccgttgacgatgctggcgtcgccgacgagggccacgacgctggtgtcgcgaccgaggagggtgtcggcccgggccatgccgacggcagtggcaatggcggtgccggcgtgtccgacgttgaacaggtcgtattcactctcgctgatttcggggaagccgctgattccgccggctttgcgaagggtctcgaagcggtcgttccggccggtgatgagtttgtgcgggtagcactggtggccgacgtcccacagaaggcggtcgcgggagaagtcgaagacgcggtggagggcgatggtcagctcggtgacgccgaggttgctggtaaggtggccgccgttgtggccgacaacctcgataatccgttggcggatctcctcggcgagcgcgggcagccgttcgcgcggaagggctcgaacgtcggcggggccgtgcacgctttccaacagactcaacctctgctcctctgtatgtggtgactttcgtcgcctcgcggatgcgtccgcgctcgcggggattgtaatcgtgatcccgcgcgggttcgagtttcagggatttcaataatgtcgtgccgcacgttggcacgtcgatcgagcctcaatgcccggttcaccgctgtcctgtgcctcagtgggcgcgattccaggtgaacgacgccagggctcgcaggtcatcggcgtccgagccgaatcgatcgatggcagcgatcgcgccgcgtgcggctccttcggcgacggcccgggcccgctcctctcctacgcagcgcgggtaggtttgtttgcccgccgcctggtcctttcgtgtctttttgccggtctcggtctcgcaagcgttaacgtccaataaatcatcggcaatctggaacgcccggcccaccatttgcccgtaccggctgagcgcttgcctggcgtccggctctgccccgcccgccagcgcacccagctcgcaggcggcgcgaaacagggcgaccgtcttttgttcatggatggactcgaccaactcgcgagacggcggctcgtgctcggactgaagatccagcatctgcccgccgatcatgccgctccatccggtggcccgggcaacggtccggatcatgtcgcgggcgatggcggcgtcacacacatctcgtgagatcagatcgaaggcgagggccacgagcgcatcaccggcgaggatggctgtcggctcgtcgaagcgtcggtggcaggttggccggccgcggcgcaggtcgtcgttgtccatggccgggaggtcgtcgtggacgaggctgaaggcatggacgcattcgatggcaaccgcagcggtccaggcatcatccggcacgggcccgaacagcttcgcggtggcgactacgagaaagggccggatccgcttgccgggggcgagggccgcatatcggaccgcgtcgtgcaggcgcttggctacgggctcggtgggggtgagtagccggtcgaagcgaccgttgaactccgtggcaaacgcccgcattcgctccgcgaaatccggatgcatcttcgattcggtgttgccgtgggttccagcggcgatgcgtggctccttgctgagcgtggtgccggtccggctaaatcacgccgggtacgacatcgatcagcgccgccgccacgtcgcgcaatacgcccagggggtgctggtcggcgttgatgtcacggatcagacccaggtcatacgagcccaacacgggtgccgtctccctctcgtagacgtcgatgcgattgcggataacgcctcggtcggcgtcgtcgggccggccctgcttggcggcccgccccgatagccgcgcgacaagggcttctttgtcgttcatcttgagatgaacgatccggtggacgtcgatgatgccccggagcaactcgacctgacggactgttcgaggtatgccgtccaggatcagagtgtggtaatccggcctgacctcccccgcccggatgcggccctcgacatggtgacggaacacgcggacggtcagctcgtctggcacgagttgacccttggtagagtacgaaaggaattcctttccgatttccgattgcttgtcgagagcgcggaagatgtcacccatggcgaggtggacgaggtttggcatccgtccgagtacgacgccctgcgtgcccttaccgcagcccgggtatccgaacatcagaatcgcggcgtagtgcgtcgaatccgccatacgtttctctgctcgtatcatggacggcgccgcttaccgggccacgccgccgtgcgcgcgattgaactcatcccggagcgccggatcgtagatcctgatattaccgtcccggaaaagcctctcatagaggtcggccatggcctgctccgcgagacgctcccgccggagctggacgagttcatcccggacggcggcgaaattcggggctgaggcagggatccgctcttcgagcttgatcagatggtaccactcgccggcccggacagcgctggaaacggcaccgggcgcgagcgcgaaagcggcctcgcggaaggcatacggcacctcgtcgtggcgacgggagaagacctcgagccgtcccccgtgctgggcactggtctggttcgcactgtagcgccgggcgagttccgcgaagtcctcgcccgcggccaaccgctcagccatccgcatcgcgtcggccaccgaggcgagctggatgtggcgtacccgcacgcgttggccgtaagctcgctcgtactccgcccggatttcggcctcggtgggatcgaactcgcggaacgcaatcgcgcgcaacagcgcgttccggcgcatcacgatgcgaaaaacctcgcggtcgaggttccgctgttcgagcagtgtgctgaggagccgctccgccgcctcgcggtccaggtcgccctccgtcacggtagataaggggtccgcaagccggcgcagcgcccgctcggtctcggcctcaacgtccgcgggcgttatcgtgactccggcttcggcagccgtttgctctgccaattcgagactcacgagctgatcgagtacggcggctccttgggatcggatcagcagatcaatgacctggcgccgcgagatgggtttgccgccgactcgggccatgagcggctcttcgggatccggagccggtcgaccgagcgccgacggcgcctcacgacggacgagatcggcggatgtctgctcgcggcgcggtggatgcgggcgcgtccatgcaaccgagacatcatccagcggcgccggcgccggctgtccacatcccgacaggcccgcgatcagccctacaaacgaccaaactctacccattatggcgtgcattgctggcccgatcgaccgtaacgctccgttgccggacggtcaacgagcgggattctcaatggtccgcggcgcggcagcgctttatgatgtcggcgccccagacggtcggccatcggacgatcgaaacgtcggaggcggggtcttggacggacacggatcgaagatggacatcgtagtgctgggaacggggacctcgcacgggatcccgatgatcggatgcgactgtccggtctgcacgtcttcggacccgcgcgatcgacggacgcggaccagcatccacgtcgagttccaggcggccagcctccttgtggacaccgccccggaactgaggctccagtgcgttacccacgggatccgccgggtcgacgcggtgctgtttacgcatcaccacgccgaccacgtgatgggcctcgacgacctgcggcgattcaacgcgatcatgaagaagcccatcccgtgctacggagccgagcgaacgcttgcagcgttgcagaagatgttcgtttacgcctttggcgagcagccgggatcgccgcacagccggccccagctcgagctacggcctatcggttcaccgacgttcgccgttcacgacgctgagatcggcgtgattcccctgatgcacgggccgatgccggtgctgggcttccggtttgggccgttcgcatactgtacggattgtaacgcgatcccggccgactcgatggagctcctacgtgatttggacgtgttgatcctggacgccctgcgaaacacgccgcaccccacgcatttcacgctcgacgaggcggtggagacggcccggcggattggggcggggcggacgtacttcacgcacatgactcaccaactcgggcatgcggagacgaattcgaggttaccggactctatggagttagcctacgacgggttacggatccggctttgaccggctggcctggatctttggacggaaatgagttccgtaaaaaaggcgtgcggcaccccgaaagttattggcgcggtctaagggtgccgcagcgagtggaagctcgataatttttttcagccggaggcgatcatggaggcttgacacgccgcatgagtcgcgcagccgtttcatagtatatcgactacttttgcgcgatcaagagacttggcgaaaaatcctgcgcgcggctcgcggctcgttccgaattgcacaatgccccggcgaaaccggcgttgaaaccatcccggcgatgcggtcgataaccacgcgattggctcgcaccgcggcggcgttacgggtcgggcattgttgacggtatggcccggcctcgggtacgatgaaacacgggctcggccgcgtttcatgtcagcgggacagccgccgcgtcggtccattttcgagcgctggccgcggtggttctctcggactcgtgccgctacgggaagcggagccgccaagctccgcctggctgacgactcggaggggatctgatgatgccggacaatcgcacgccaacgactgagcatcgcccgaagagcctgctttccggcttccagcgctgcctcctggtggtggccatgacgttggccgggctcctcatcgccaacaccctgtaccttctggggaaccggctgatctccgcgttccccgaaaccgccgtcgggtcgttcgcccaggggacccggacgatctcgtatttcttccaggcgatggttctatcacacacggggctggggttcgtggtggtggggcttctggttggttttgcgatctggcacctgccgacggtctggcggcgacaccgccggcagacggtggtcagcggtctggcctttgtgtcgacagggttggttctggctgcgacggggccgttcatcatgtacgcggcggcgacccgcgatcacagttgggtgtggtggacgcacctggtcgcggcggcggtcgtaccagtcgcgtatgtcctgcaccggtcggtgtcgtacgtccgacccgcgcgaggcaactacgcccggtttacgacggttttgacgacggcattgatcgtgatgtttgccggtcacgtctacacggcccgtggcccgagcctgacccccgaggcgctgctggccaaggcggagggcagcaataccggcccggggtcgaaacaacgggacctgatggaattcgtcgacggcgtgtacgtccctcccgggttcgtgccgccggggagcccgttctttcctagcgccgcgacgacgacgacggggggctatctgccggagcggattatcactcgtggggacacgtcgtcgccggagaagctcgcgccggacctggacacgatcggcttcgtggtcaacgagaagatcggggcggagacgtgcgatcggtgccacgccgatatcgtcgagcagtggtccaggtcggcccaccgcttcgcgtcgttcaacaatccgttctacgaggcgacgatcaacgacatgcggaagaacgccttggccctgacggagggcgtcgccgagcacatggaacggttcccgcagtggaagggacgaaccggagagatcaagagcaagtggtgctcgggctgtcacgatccgtcgctcatgctggcgggcgagatgacggatccgatcgaccgccgcagcccgcaggcccaggcgggcctgacgtgcctggcctgccacgccatcgacgaggtccacagccagacgggcaacggtcactacaacgtcgcggatgagcaggaggatccgttcatcttcccgaccgcggcgacggggacgcttgccgcactgctgcatgatacggccatcaaggccaagcccgaggtgcataagcgggacatgctgaagccggtgttccgcacggccgagttctgttcggcctgccacaaggtgagccttccggagccggtgaacaactaccgctggttccgcgggcagaacgagttcgacgcgtggcacgacagtggggtggcactgaacgcgtcacggaccttctacctgccgccgaacaagcgtgtgtgccaggattgccacatgcccctcgagccggcggtccacggcgatttcgcggccaaagacggcatggtgaagtcgcaccggttcctggcggtcaatacggccctgccgttcatccgcggcgacgacgaaacgatcaggcggatcgaggcgttcctgcgtgacgagaagctgcggatcgacgtgttcgccctcgttcgcgaccgggacggtgaggccgacaccgtgtacgccctgaaccacaggcagccagagttatcggccggggagacggtgacgttcgacgtggtcgtccgcaacctcggcgccggtcatacctttccgggcgggacgaacgactcgaacgagtcgtgggtcgagttcaccctggtcgacgaccacggcgagcgaatcgtccagagcgggtacgtgcgggaggacgggtacgtggatccgacggcccactacttccgagccgtgattgtcgaccggcatggggagccgattcggcggcgaaatgcacaggacatctacgccccggtatacgtaaacgtgatcgggccggggacggcgcaggtggttcactaccggatgaccgtcccgccggagctggctggacgcaagcttaccgtcgaggcccggctgatgtggcggaagttcgatcgggcctataccgagttcgcgttcacgagcaaccgtgcgggattcaaacggtttgacgatgtcccgaaccttccgatcacggaaatctgccgctcggaggtgtcgttgccggtggtcggaccgggcgagacgccggctccatcgacgcgggacgtgaccgacatcgatctggcggccgactggttgcggttcaacgactacggcatcgggctgttacttcaggacgacacgaaggcggcccagcgggctttcgccgaggtcgggcggctggtccccgagcggatcgacgggccgcggaacctggcccgcgtagccctgcgggacggcgagttggagacagcctacgaccacctgcttcggtgcgaggagattcggtccaacgacgcgcagacggcatggttctggggcgtgctgttgcaggaagatgggcggtacgtcgaggccgcgagcgcgtacaagcgggtgctggatcagttccctgaggaccgggccacgtgggggaacctggggcggacgtactacctcgacggcaagtaccgccagtcgatcgaggccatgacgaaagtgctggcgatcgatccggaagaccgtgtggcccattatcacatcatgctcgctgcgagggcagtcggggacgagctgctggctgcgaaccacgaggaggcctacctccgctacaaaatcgacgagtcgcaggcggaggtgacgaagagctaccggctgaagaacccacatgacaacctggagtcgcagagcgtgcacgtccacgatctgagcgtggcggggtccgaacgggtcacgcggcgacgtgacgcagcgtcggaggggacgcgttgagttcgagaagctcgtgcatgtcggaatccacgctacgaggcggcgcgccgcccccgcccgaccgtgtcgcggccgcggcggcaatgttgggtgcgtgtctggtcgtgctgtgcacggcatgcaagcccgcgcggcacgagccgtcggttcaggccagtgagtacgtcaagcccgatacgccgccgaagtacgaaccaccaagcggggccgtggaacagagcgtcacgttttcggacgtgacaggggctgcgggaatcgagttccggcacgtcaccggggcgttcggcaagaagtggatgccggagacgatgggcgggggggcctcgttcttcgactacgacggtgacggctcgcccgacctcctgctggtcaacagcggcttctggcccgggcatgaggaggacggcgcgaagccggtgagccgactgtatcgcaaccgcgggcgcggcgagttcgaggacgtaaccgagcgggccgggctgtcggagctgacgctctacgggatgggggcgacggtcgcagactacgacggcgacggcgatgaggacgtctacctcacggcggtgggaaagaaccggctgcttcggaatgacggcgggcgttacgtggacgtgacggacgaggcgggggtggggttcagtgccggcgagggcgcgccgtccccgtgggaatggtccagcggggcgatgtggctggacacggaccgcgacggcgacctggaccttttcgtggccaactacgtgcaatggacaccggcgaccgatatctggagcacgctggacgggaagaacaagtcgtacgcgacgccgcaaccgtatgacggcgcctcctgcacgctctttaccaacaacggcgatggcacgttcgcggataccaccaagcaggcaggagtgtacaacccggcgggcaagagtatgggggtcatctcggcggacctcaacgacgacggctggcccgacatcgtagtgaccaatgatacccagccgaacttcctctacctgaacaaccagaacgggacctttacggatcacgggctcagcgccggcgtggcgtatgacgaaagcgggctggcccgggccgggatgggcgtgggcatcgccgacctgacgaacgccggacgctgctcgatcgcgatcgggaacttcagcggcgagccggtttcgctgtacacccaggccggtattgggacgttcatcgacaaggccggggccacgcggctgaccaagccgacgacggcgacgctgacgttcgggctgacgttcgccgatttcaacctcgacgggtttgaggacctgatgctcgccaacgggcatatcgagcccgagatcgagcacgtacgcagagggtggacgttcgagcagagcccgcagctcttcctgaacaacgggcgggggcagttcgtcgaggtcggcgaggaggccggcgagggattcaggcggccgatggtcgggcgggggttgtcgacggccgacatcgacgacgacggtgatctggatgcggtgattgcgacggtaggcggcgctccacggctgcttcggaacgaccttccgccggggaacaacgtcgttcgcgtcaggctggtcggggcggggaagaaccgggcggcggtcggagcccggctccgcgcgaccctgggcgggcagacgcagacgcgctatatcacgacgggcgggtcgtacctgagccaatctgagctgacggccacgttcgggctcggcgccgccgagacgatagatcggctggagatccgctggcccgatggtgagtcgcaggacgttgcggggctggcggccgatgcgctgtacaccatcgagcgcggcacgggtgtgacgcacacgaagccgttggaacggtagccgtgtgccggtgcgagaatgctctctcgcatcagccgacgcgacgcgggttcaccgggcatcgagcgagcggaggaaccggaagtcgaagatgccggtgtcgtggccgtcggaccagatgagctggatggcgtagttgccgacgagctttgcggagacgacgcgcaggcccgatgggtcggccttgaggatcttcagcggattggcacttcgcttctcccgttcggttcggcacgtagcgcaggggcacacgcgacggagttgagctagcgcgaacgcgctgtggtgcccgtcactccagtcgataagcagcttctggtcggctagcttgaccttgaggtcccgcggcgtcgaggccggagaacggggcggccttcccgcgccgccgctcgcgtcgccgggtttgtcccttcttgattcaccgttcatggaaggtcggctccgagtccagaaaggcaagaaggcagaatgcgagtgcacgtagggcgggccgtgcccgccgcgggggcgggcatgacttccggcttcgatgcaagtgcgaggatcgtcatgaccttcgatgcttctgcaacagatcgaggatccgcagcatgttggccggcagcggggcggtgaactcgatggggcgctcgttgatcgggtggaccacgcggaggctgtgggcgtggagggcctgatgctcgatcagcggggcgtcacttccggcgccggttagatcatgttcggaaacggcccgtccgccgtagagggtatccccgaggatcgggtggcccaaggaggccatgtggacgcgtagctggtgggtccggcccgtcttgggaaacagggccacggtggtgtagccgcgatatcgctcctcgacgcgatactcggtgacggcctctttgaacatggcctgccgcggcgggatcgcggtggggaggatcatccgctgggtcgtgtcggggtggggcgagagcggcttgttgatcacgtcgccgtcgagcttgatctggccatggcagatggcgaagtactccttgcgggtggtgcggcgttcgaactggagcgcgacgcgccagtgggcctcgtcggtcttggcgatgaccaggactccggtggtgttcttgtcgaggcgatggaggatgccggggcggaagggctcgctgccggagctgatccggtcggcgtagaacgcggcggcgttgacgatggtgccggtctgcccagggtagccgggatggcagacaatgccagcctgcttgttgatgaccagcagccagtcgtcctcgtagatcacgtcgagggggatgtcctcggggacgatgtcggtcggcggcggtggcggaaggacgagcgtgatgacgtcgccctcggccggctcgtagctggccttggtgggcatgtcgttgaccgtgacccgcccctgtttgatgaacgcctgaagcgtggtgcgcgagatgcgggggaacttggcgcggaggtacttgtcgaggcgccggcccgggagacggcggcgaacttgaacgacgtggatgtcctcgtcggccgagtcgtcttcgtcagaggcctcacggtcctgctgcggaccggctggccccgcggatggttcgtctgcgggcgggtcacgcaatggtttctcgttcgcggggtgcatggggtcagcgcgagtgggcccggaagacggcctggaggtgtgtggcccgacccagcgcgtcggggtcgcggcatagggaggtttcaatgctcgtccacgcgcgccggccctccggcgtttcgagcagttgtcggtggtgacgcatggggagcacggtcttgccgaggatttcgaggaggtcgaacccgcattgctcggcgaggcggcggacgccgctgggagaaaaagtcgtgatgtcgaatcgctccgcggcgtcctgtgtaagccagtgggttcggccgtcgcggacaaagcgggccagttcgcgggggtcgcccttggtcagatagaagtcgatggcggagagcttgttgtcgaatgtggcgaccaggacgccgtcgccggtcaggacgcggcggatctccttcatggcgcgaatcggcgattccgcacatccgatcgggtcgcccagggcgacggccaacgggaacacgccgcggtcgagcgcgcccaggttgcaaaggtcggcctggacgaatgcggcccggcccgcaggatcaagcgggtcgagcttgagtcgggcctggtcgagcatccggggcgagatgtcgacgcaggtgacggcgtacccgctcttggcgatccgcgccgcccacttgccggtgccgcagccgaggtccagcacccgggcccgcaggtcgcggggcaggaacggtcggaggtatcgccaggtaagggcgtcgtgccactgccagtaggcatcctcgtagctggcgtcgtaacgagcggcgacgcgatcatggtacttccggacggcggatttggggtggcgcggcatcaacccacattgtaagggggcgccttgcgccggcaacgcagggcgtgcggggcggttgaccgatcggccccgctttgggacgatggagccgggttttcgtacggaacagaggcctggagtcgacacaccgatgatgatcaaagccgtggatctgcgcaaggggcggacggtcctgtacgagggggagccggcggtcgtccatgaggcccagcatgtggcaaagggcaacaagcgcagctacatgcagacgaagatcaagaagctcaaatcggggacgatgacggacgtccgctttcgcgtggacgaccaggtcgaggtgccgttcgtcgaatcgaaggagtacgagttcctctaccgcgagggtgaccactacgtggtgatggacgtggagtcgtatgaccagattccggtcagcgctgatgtggtgggcgacgccgtgcagtggcttcgcccgaacgaacgggtctcgtgccaggtctacaacggccagatgatctcgttcgacgtgccgcacgtggtcacgctcaccgtgactgaaacgccgccggtagtgaagggggcaacggcgacgaatcagccgaaagacgcgacggtggagacgggcgccaaggtgcgggtaccggcgttcatcgagcccggtgaacggatttgcgtcgatacacggagcggggagtacgtggagcgggcgaagtaatcctcccttggacctcctgacggtgcacaaaaattatcggacctcccctcggcatcgggcccgatccgcaccgattgcaggctagaatagggcactcggggtcggcgtcggcacccgaggtgattccgtacgaaccgcattcgagcctccgggggttgcatggttggggtaaagcgcgtggcttcacgtttgacggctgccgcggccttggccgcggcgttgtcgggcttggcttgccaggtgcgggccgacggggagctgaggtccgagttgttcgtttcgggcctggtacgaccgttgttcgtcaccttcgcgccgggggacacgcatcgcgttttcgtcgtgcagaaaaccggccaagtccgggtcgtgctggacggcacgcttctggccgcgccgtttctggatatcggggcgctggtccgtgcgacgggttacgagcagggactgctggggctggcgtttcatccgaactactcgggtgattcggagcttccggggttcggcgagttcttcgtcaactacacggctgcgggcaacgacacagtgatcgcgcggtactgcgtgtcaacgaatccgaacgtcgcagaaccggcgggcgccgtcgtgttgacgtacgctcagccccagagcacccacaacggcggatggatggccttcggcgccgacggctatctgtacatcagctccggcgacggcggcggcgcgttcgaccgcgatccgggtcacacaccggagacgggcaatgcccaggatacgaccaagctgctggggaagatcctgcgcatcgacgtgaacggcgacgactttcccgccgacgacgaccggaattacgccatcccgccgacgaatccgttcgtcgccggggccggggcggacgagatctgggcgtacggcttgcggaacccgtggcggtgcgcgttcgatccgctgacgaacgatctgtatatcggcgacgtggggcaggcggagctcgaggagatcaactttctattggcgggcagcgccggcggggaaaactacgggtggcgctgcatggagggatcggagtgcaccggtctggaagggtgcatctgcttcgacgacgcgctcaccgacccgatccacgcgtacgcccacccgacgttcggccagtgtcgctccgtcaccgggggcgaggtctatcggggctcgctcatgcctgggctggcggggacgtacttctttgccgacttttgcacggggcagatctggagcctgcgctacgacggcgcgtcggtgtccgattttcaggaacgaacctgcgagctcagacccgacggcacacgcacgatcgccgacatcgcttcgttcgggcgcgacgcgctcggtgagctgtacatctgtgatctctatgacggcgaggtgttcaagatcgtgccgtccgagggaatcctgtcgagctttccgcccgatggatccgtcgacgcccgccgtccgtccgacatggacgggatgaacgcagttgggtggagccatgtcgagttgacgctggacgtcgtggtggattgtctgacggcactggacttcgccgtgatgcagcagggcggcaaggagccggcgcccccgggcatcgccaaggtagcggggcttggccctggccggatccgtgtggacctcgatcggcccattgagcccgaagcctggacgagcattgagcacgtgccgacgggtagcagcgtacggctcgggtacctgcccggtgacgttgacggcgatggggcggtcacggtcgacgacatcgacatactgctcgccgtgatccgcggcgctggcggaccggcgcaggcgtggtcggtcgacatcgatcgttcgggccgctcggaccagatcgagctgctgaccctcctggacctgttggtcggcgccggggcgttccaaccctatttcggcgcgacgctgccctgagcgtctgccgactcgccgcgccattcgaggttcgtcgacccgcaatcaacgcgccgcgtccgaccggatgaagcgccgtacgcacgtcgccgtcggtggcggggcggcgcatggcgctcggtcgccggcggcggatcgcgcgtcgaaatctcttcgacaaggcatgtcggcgcgacgactgcaagcgaaaaaacggaaaagttttgaaaatttttttcggccgcgctgccccgccgttcgatggttcggatggcggcgaggacaacgacgacgatgcgcggttcgaccttcgacttcgcgatgatccgcgacttgcaacctgttagatcgtttgcggcgcggcgcggcgcggcccgaccggcgcgttcgaggtgcgatccgttcaagcgggcgcggatgcgcccgcagtcgccggcgctggccgtcgtcgttggacgcggatcacggccgcaggtatgacaaaatgcctaattctcagcgggttttcgcgatccgcaaagctgcggatcggcggcgcatcgcggctgcgctgcgggcaaaccacaggccgaaggcgcccggtgatcataccgccgcgcgacattaggtcgatgttccgcagcgtacgaatcacgtcggccgttgtggcgacgactcgttcggcgcaccgcgtcaccgtgtcgcgccgcggcgcattgatggtcgttacgacctccgcagattccgttcgcgaacaccgccgtccagcggcgcggaccccgcggacgacccgaatgcgcaaaattttttttgacaggtcgcagtcctagtgtaggattttgtccagaaaggaggtgatgcagatggcgaagaaacgcaaagccgcaaagaaggcgaagaagggcggcaagaaggccggtggcaagaagcggaaagccgcaaagagaaagaagaagatgtagtgatgatccacccgttggggaagcgacggcgctttcagttgaccggctctcgccacggcagtcggtaaagccccgaagctcccgggcgggcttgttcggacatcacaaggtggaaggtgctacccgccacggcggcaccttccatccttttttttgcgcaaggcacggaggcacgaagaagtgggatcgagggatcgaggtagggacgaaaggacggaggggagggcaaagcgccgcctcgccgattccgagggacggcgtcgagcatgcaacaataccggtttcggagcagcgcgggtcagcaagcggtccgcgccatccgcgttacaaccgctgcctgacccttcacatcgctgtgcgacgtaagaaggtcaggcggtcgcggctcggaggggcgtcggccgcacgttctgagcccgtcgcgggccgggcatcgccttatggggcgaactcgtcggtcttctcgtagccgtcggggacgatgagttcgaaagggctacgcacgaagctggggttcacgacgaggttggttagggtcaactcggtcgtgccgggctcgccctcgcggttttcgtagtgtcgtacgacgcggcggggaagatggtccttcttcgagaagtaccatgtggtctccggtccctccttgggcttgacgaagacgacgacacaagcctcgcccgcgacttcggcatcgggcttcatctccgccgagccgctctcgagcacgtcggcgaacggatcgggctccgcgaaatcacgaagcagcacccgcatgatgttgcgaccctcgctgccgagcaccgcctgatccatatcctggtaggccgtcttcttctgctgatccagcaggtagaactcggtgccgttgcacccagcggtgtacctcgacttctcctccgagccggacgcctggatcgtgacctcgcaagagaagcgatcgatgtcgtgctcggcccgcggcccgaccaccgcccggcccgtaacggcgggcacgacatttacggcccactcggtgccgtggtactcggcgtcgtagccgacggtcttggcctgcttcatggcctcggccgcctgcttgaggatcgccttgacctctcccggctgccggtccggctcctggccaagggcggccgtgcaacacaccaggcctgttgccgtgaagatcgccgtgcgcatcgcccttctccttacgaaatcggcctcgcgaatactgggtggatccctcgggttccggtccgtcggtgatggcgaccatcgtacctcgaacggggccacgaatccacggtgcccgacgtcagaacgggttcccgcattccgggcagcgtcgcaggggaagtccggccaacagatagccgcaatgttcgcagcggccgtccggctcgtcccgcgggtcgtgctcgaggcaatgccagcactcggtgaactggccctcgatcagctcgccgcaatccgggcacacccacggttccttgggcagggaagcgcgcagggcacccgattcgtaccgttcgacgagggcccgggcgggcgcctcgtcctcgtcggcgagcacccagatttccggcatggccaggaagaaggggacgtcgccgaggaccgagcccgttgcctcattgaagaccgtggtgcggattccctcgtccgcgagaagcccgcgcacgatctcaatggcggaccgatccttggacgcgaagacccgcttcatgcctccatgatacctatctgcgctccggcccgcagggcgacgcccgaccagccgatggccggccgtccggaactcctctacactgccgcggcatgtacctgccgtttctggtcacgttcgtcgtggcgtcgggtgtggggctgctggcaacggcgctcgttcgccgctgggcccgccgcatcgggttcctggatcaccccgttggccacaagcaacacgcggtgccggtggccctgggcggcgggattgcgctggcggtgtcaatctgtggactgcttgcggccggcgctctagcggcctacgccatgcagcggcagtggcttcccgtggtgctgcccgagccgctccgtccgcatctgccgggaatggcctcgcggttgccgttggtcctggggatcgtcgctggcgccttcattctgcacgtcgtggggctgatcgatgaccgaaaagcgctcgggccgctgccgaagctggccgcgcaggtgattgtggccgtcttcacggcctgggtcctacaggttcgcgtgttcgagttcctccccacatctctcgcgatcgcctgcacggtggtgtggatcgtcctggtgaccaatgcgttcaacttccttgacaacatggatgggcttagcgcgggtgtggcggcaatcggggcgtgtatcttcgcgctcgcgggaatccggtccggccaggtgctcgtcccgctgatggcgggcgtcatcgccggagggctttgcgggttcctgtggttcaatctcacgccggccagcatcttcatgggggacgcgggcagcctggttgtcggctacctgatgagcgtgctggcggttctcacgacgttctacgatccgtcgctggacctgcggcccgtcggcgtcctcgtgccgctgatcgccctggccgttccgttgtacgacgtggtcagtgtggtgacccatcgaatccgggagggggtgagcccgttccgcggggactggcggcatttttcgcaccggctggtcaaacgcgggatgagccggcgcgacgcggtgctgacgatctacctggccacggccgcgacggggctgcccgcgatcgtcctgccgcgtgtggatcgagccgggcaggtgctcctgatgattcaatgcgtatgcgtcgtggtgatgatcgccgtgctcgaacacaccggccggcccagagacgaaccctgaaggaagggactttcagggacgcaggttgcccatctcgacgcgacgcgtcgcgaattgcggcagcagaaagttctcgccggcgaattgcgtcacctcgccggagacaaggaaaaccgcgccgacaccctcctgctcgacggccgtgaccatggtggccgtcacgagattcggcagcagcttcatcggcggctcgcggtgatccgggtgatccgactcgaagatgaagagccaccattcgtcctgccggacgacgcgaccggcccgggatgccatgagcgtgccgtccggcacgaggcccggcgtgtaggcgacggatccggctgagaaaccgtcctgcccggcctggagcaccgggttgtccggttcgcgggccttgaggacggcgagcacgtcatcgacgggtgcatccggggcgactacgtcggatggcgccccgctgggcccgctcgtattcgcctgcggcggacgcgctcggcgcacgtcccgcacaagaaggtagttctcgccggcgtagacggtcatgtcgcccgcgatgatgaacggcacctcgaccgcagcggctgtcgcggtgcgaaccatgacctcgagggatgagtcgggaaggagcttgatgggcccggcgaaccgcgacgactcgccgaggagcgtccaccacgacccgctgcgggagagccggcccacgacgtcgacgacggtccaaccctcgggccagagcttgggctcgtgcggtgggaattcgccgcccgcggcactggcgggtgggatcggttcgttggcaggccggcggcgctggagctcgcggagcaggtcgtcggccgttgccgcttcggtcgcatctcgttgatcctccgccgcttgcacggtgggtgaatcggttgggccagccggctcggcgccgggttgcttcggcgccaagacgacgatcgtgaggatgccgagagcgaacgttccagtcatgtctcgcccagcgtgtggcggttcatcaacggcaactgaggcggcccgcaagagcctgcctcgttggaagtatcgaccggtggcccggacgtgtccagacgaagccgcaaggactcggcctggtcatgcgtggggttccgggcggccaccgccgctggcgccccttgggctttggtcgtttcgccgacgccccggtgtaccgcccgcggacatgtcgacggttgtggagccgatcagggcgttcggtcgagttgcttcgccaaatcgtccggttcggtgaccgggagctgacatcggtagtcctcgcagacgtaggcggtgggacggtccttgatcattttccggccgcgcagaagcgggatgtcagtctcgtcgcgcgcgtcggaggcgtgcacgacgaccttgttgggcaggtagcggtcgtagacggtgcgaagcagtgctttcgtcccggcgtcgtcgagctcgccgacgatcgcgatttcctggacacgatcgtgatagaaatcggcggcgcagatcagccgctcgaacgcgctgggggactgcttcgccatcgccgcgaacgcccgcaggatcgactcggcctctgcccggtagtcctggcgatcgaccagaatcgcgaggcggagcaggttcatggcatgcacggagttgcccgaggggatcgcgccgtcctggggatccttggagcgggcgatcaactgctcgctgtcggctgcggtgtagaagaagccgccgccatcggggtcgtcgtagtgcttgacggacagctcggtcagctcgcgggcagcgtcgagccagcgccggtcgaacgtggcctcgtagaggtacaacaggccgtcgaccatgaaggcgtaatcgtcgaggtagccggtgaggcgggccttgcccgcccggtaggtccgcagcaggcggccgtcgggcgtccgcagcttacgcagaatgaagtccgcggcgcgtgccgcggcctgagcgtatcgcggttcatcgagcacgcgggcgccctttgccagggcggcgatcatcaggccgttccaggcggccaggaccttgtcgtccagtccgggtggcgtgcgtttcgatcggaccgcggccagttgtctccgccatgacgtcagctttttccggagctcgtccacatccagttggtggagccgggcgaaagcctccggcggcttggtgacgtgcaggatgtttttcgggccggccggtgcgtggccgcgatgctcgaaccagttccccgtttcggtcacgtcgaagtacttgcagaaaagcgcgccttggtcgtcgccgaggatggctttgatttcgtccacggtccagatgtagaacttgccctcgaggccctcgctgtcggcgtcgcggctcgagtagaagccgccctcgggcgattgcaggtccgacaggacgtagtcgaagatgtcggcggcgaccgaggcgtacagtgggttcttggagacctggtacgcatcgaggtagatcgcgctgaccagcgcctggtcgtagagcatcttctcgaagtgcgggacgagccactgcggatcggtgctataacgacagatgccgccgccgatgtggtcgtagatgcccccacgggccatgtggttaagcgtcacttccacgacttcgtaaaggtcgctcgttcccgtccgccgatagacgcgcaggatcagatccatcgcctggctcggcggaaacttgttgccgccgctgcggaagccgccgtgcgtacggtcgatgtagccggccaacatcttcgccgtggcgtcgacgtgctccttgtcgatgacaccctccgccggtccgggcccctcggcccattgggagaggaacttcctcgcgtcctccgtacgctggatcagggccggacggttgtcggtccacaattgacggatctgctggagcaggccgatgaactgctcctgcgggaaataggtccccgcaaagaagggcgtgccgtcgggcatcagccaaacgctcatcggccagccgccatggcccgtcgtctggacggtgtaagccatgtagatcgagtcgatgtcgggccgctcctcgcggtcgaccttgatgctgatgaatccttcattgaggacagcggcgacctcgtcggtctcgaagctctcgtgctccatgacgtggcaccagtggcatgccgcatagccgatgctgaggaagatcggtctatcctcgcggcgggccctttcgagggcctcgtcgctccactcgtaccagtcgacgggattatgagcgtgttggagcagataggggctcgtcgcgtcgatgaggcggttggtatgcgccggtttggcggtcgtctccatgtcggatgtctcctcgcgcggcgcgtcggtcggcgtcgtcttcttgttttcgaggccggaaacgcaggtcgccgccccgaggacggctgcgacgggcaggaagcgacggcgacacgagcgcagaatcatggtcttggcaatccaggtggttgagttccgttcgacggcccttcgcttcgagtcctattctatgggcggcgtatccacggtcaaaaaaagagcccggcggcacggatcaagtccgcgtcgccgggcatcgtgtctaccttgctgcggccgtgcgccatcgcgacggccgcggggctcggctatttgccgcggtgcatttcgcgcggcgtggccccgtcctgcggttcgtggatcagcccacggctgcggagctgctgtacatcgaagccccgctctcgggcgtaggacggcgtcagacggatgtcgacgttgctgcgcacgacccgcctctcaccgttgtggacgatatggaactcggtttgcgtcggaaccagatcgctgccgacctcggtcacgacgaactgcacggactcgagctcgttgtccacgtcggccgtgagcgcctcataatcggcgacgaagccttcgggcggcgttaccgtgacggtcacgccccactcgccgacactctcgaagacgaacggatagggctgttcggcctgatcccacagcacgtattccggctcgatgatcaacagcagcgagccggtctcgatccgcgtcttgccggggagcttctttccatcgacccggacgatctgttgcaggtgcttctgcttcgtctcaccgcagaggaggtcgctggcgctgacgcccaggggatccggaagcacggtcttggtcgcgtcgttcgaaatcacgacatagtcgccgggcggcaggttgatcgtacattcgccgttgacatcggtcgtgcagcagccggcggccgggcacgtggcggcgatgcattcgtaatactggtgcgaaatgccgccgcaggtatcgcgggcgcagctcccatccgacttgtcgtacgcacagacctcgatgccgacgagcggctccttgtccgacccggggaacgtgcccgacccgacggtatgctggttggcttcgatggcgatgttcgccccatgtagcaccgtcacagcgacgctctcggaactcgagttgccacaggcgtcggtggccgtaaagagcaccgacgttgtgtcgcctgcggggaaggggcccggcggaaaaccgcccacaaccggggcgggatcgcagttgtccgtcgcggttgccgtcggaagcgcggcgtcctcgtctccgccgcaatccgcgtccacgaccgtaatcggcgtggtgtccacggtaagcaccggcgccgtggtgtccacaaccgagaccgcctgggcgtcgctggccgtgttgtcgcacgcgtcggttgccgaccacgtgcgccgaatgaccgactcttgcgggcaatcgcccacttcaacgacgtcggagtaggtcacggggacggccggtccgtcgcacgcgtcgtcggccgtcgcgaagcccgtcacggccgggctgctgtcggtgttgcactcgaccgtcgtgtcgtccggcagcgtgaggtccggacgggtggtgtctcgaacggtgataaactgatcgccgctggcgacgttcccgcaggagtcctccgccatccaggtccgcgtgatgatctcctcgcccccacaggacccggggaaagtcgtgtcagtgtacgtgactgtggcatcgccgcggcagtcggcggtagcgccggcctctccggtgttcgacgggtcggtgctgtcgccgcattcgacggttacgtcgccgggaacggtgagcatcggagcggatgcgtcctcgagcacggtgacgatctggcaacgtgtcgacacgttgccgcaagcgtcggtcgcagtccactcacggacgatcatcagttcgccggcacaatcgccggtcgttaccgtttcctccagcaccagcgacggattgggatcgcagccgtcgctcaccgtgggatcggccggcggcggaagattctcgcatgggacggtctcgtcgttggggaccccgacgatgtccggcggcgtcgtatcgacaacggtgatgatctggtcgcaactcacgggcggattcacgccgtcatccgccgtccaggttcgcgtgatcgtctcggtggcgccgcagcccggtgcgctgctatcgctcgagctgaccgtagccgggttctggctgcacacgctcggttggcccgtagcgaccgcgctcgtatcgtcgccgcactccacggttgcgtccggcgggcaggtgatgttgagggcgccggtgctggcgggcgtgatgtgggcgatgtagtggccaaggccgaagttgctgaacttggcgagaaaggccacgtcgctgctgttgttgatcgagcggtagtgccccgagcgggcctcgccgctctggaagagcatgaactggctcgagccggggaacccgccgaaggccacgccgagctcggacagggccgtcgtgctgtccgcgatgcgggcgacctcctccgcacacgcgtcgtagaaataaaggcccaggagcgactcgatcccgccgccgtcggccggccggatgcccgagccccagaacgtcatgtgcccgtcatcgttgatcgccgcgctgcgtccttgaaagctggtgatcttggcgccggccggttgccccggcggcgtcacctgcgcgtccatgaccagcgtgatcggcccgcccgacgtgtcccgcgcataaatgccctggttgttcggggtgccgctgttccgaatggcggcatagaagccgagctgtcctgcctcgttgatcggggccatggtgatcgtcgtgaattcggcaccggtaatgtcaccggggacgaccaagccgttgcccaccagcgtgtccacgacgttgacgtggggcaaggacccatcgacgttccccgcgaagaggccgaagcgctggacggtgccgggggccgacagcaacggcaggaacaggtaggttccggcctcgttgatgtcgttgtcgtcaaaacgatccaggtattgcgatgcgggggcggtgggggtcgccttcggggcggtttgaacgcggaaggcgaccgtcgtcggcgccccgcctgtaaccgggacggaaaaagtgcctcggcagcagagggtgggcggcgagcggaggatcgcgccatggaacgccacgatcccagcgttgttaatggcgatctccgggcggatctcccagaacccctcatcaagtgctccgtcgcaggtgagtccgaaggggatgtccgtcgggcagatgtccctcgtgctgtcggccaggcggatgcccgccccgcccgcaacggtggtgccgaagattccgttctggcggtcggccaacgcacaggtcggacccgccacgcagaactgcccccagtagaccacgtctccgaagtcattcacggacgccgcgaagtcggacggccgtttgaaggtgaagatgaagctgatgaattggcttgttgccgggtggcccgggaccgtgtccaacgtatcgacgatgttcacgatcggaccgcctgtcgtcgggacgctgaagaacccggatgcgttggtgaacggcgaaacgagctcgcggaagctggcccaaaacacgacgtcgccggcgttgttgagcagcggggcgtcaaactgcgtgaaacgaaatccgggatgaccgggcaccgggaagttcggggcccccgtgccgtccagcgtcgtatccaccagcacgtccagcggaagcgtcggacgcttcacgtagagaccgaactcaccgccggagttcacactgaatcgcgacgcgcttaacgcccgaaacaccacctcaccgctctcgttgacggccggcggcaacggatccgattcgctccagaacacgaagggctcggggcggcccgggacggtgtcggtcagcgccgcgtcgcggttgaagatgctgttgccgctggtccgcatgaccttctcgatcgtcacggttgcgccgcgcaccggcaggccgcagcacagcacggcaaacagtgccagcttcgacacggccggcatggtcctcgcccacctcggcgtacgacgtacggcgtcccgctgtcgcgatcggggagcgcgcgtttcacaagccgccgacgcgaacaccaccatggtcgagtccgatcctggcgcgatgcccaggactccgcgatttccgctagttgacatgcccaggtctcctcaaggtgcttcgagatcgcggcgcgcaccgtggcgacgctgccagaatccgcgcgcctctcttcaccgtgttcaccaccttacccagcatcacaggccggcacaagactggaaaaggaaaaacatgacagaaagcgggcgtgctcgccgcggccgtgcggttggcttgtcacctaaataggtgacatggcgcggcacctgcgacaaatgggctcgctactacgcacgcgcggcggcggcacgcacctcaagcgggacggtggtcccccggtgactcctcgcggcacggctggcgatcgcacccgtacccattcggactcacgctcgcacgtcggtcgggcatcttcctcgatcgaccgggtccggtggcttgggccgggccttccccgagcgagcggccacggacgaatgtaaggtcgcggactgaggcggtgtgattgatacgcgaacgagccttcgcgttcggcggcgcagatcttcaccggcgggcattgctcggcccaccgccgatcgagcgacgtacagagttgtcgatgcgatccgagccggcgacggtctttgcggtggcttgcccggcggctcatatgtggacgcaacggaacgtgtgacccgtaacatactgcaaaacaataggttatgtcaacaacggcgtaacgcggcgcacgaagctggggctggcccggggggaccggcacgttgttcgaaccacggctgtccccacaggttgaatgacgcctgaccgggacatatcctctcatggagccttggtccggagctaaaggcgggggcaagaccatgaccgacacactgagtgcattacagcagcatcaactggtgatcctgcggcggctgcgtcacggcccgctcacggagttcgagctcgcccacgagattgcggagcactccgcttacaccgacgagcaggtcgccgatcggctggccgattggctcgacggactccgacaagaggggttgatttgggccggcactttgtcgaacgcgtccgagcagcagatcctggcggcggcgcttacggcgcggggccgcaagcttgtcgaatgaggatgtgtgcggcctgcctcggggccccgcgggcgggcccgggtcaccttgccgccacgcgggcgagcgtgtcctgatacgcgttggctagttccgcagcgcgtccctccatgtaactgcccgcgttccatcggtaccccaggccgtccccggccttacgcggaatcagatgcacgtgcaggtgggacacggactgcccggccgccgcgccctgattgacgagcagattgaatccctccgcaccggtcacctcaagcagggcccggccgagccgcggcaacatcgcggcaagccgagcggacgcgtccgccggaaggtcggtcaggttcgcgtaatgctggcggacgaccaccaggatgtggccttcggccagaggtgcaacgtcgaggaagacgaggaaactctcgttctcggagatgacctgggccggcagctcggccgagatgatcctacagaatacgcaattgggatcgcgtgccatcggtccatctccctgggggacacggcggagccccggctacgattcagcgccaccgttctcctcggattcctgtggcttgtcgatcggcgcgttggcggaggccttgtcgtcgtcggttgcggacggtcgatcgcgccgcgccttgccacgccccttcatggccgagatcgccagcgcgtagcgagcgttggcccgccgctgccgcgccgacggttccggcttggccaacgcgccgggcggtgtctcctcgccgacgagttgcagcacggcccgcggggcgctgtcgccgatgcgcggccgtgccagccgtatgatcctggtgtaaccaccggggcgatcctggaagcggggggccagcgtttcgaccagccggtgcgtgacggagtccgccgtaaacgcgagccgtccgcggggttcgccggtccgatgccggcggcccgagggcatacgaagcgtcttggcgcgggctgcgtcggacatgccgtcgtagtccgcctggtgctcggcggggatgacacaacgatccccgagcaggcggtggattcgccgacgggccgacagcgccgcggcgcggtcgttctgcgccgtggcccgccgcacccggacggccagggtaatcagtttttcgcagaacgagcggacgtccttggccttcgggagcgtcgtcgtgatccggccgtgctcgaacagactctgggccaagtgccggcgcaaggacttacggtgttcggatgtccggttcagcttgcgttgatgtattcggtgtctcatgggtgttcctcgagcggacgtgctccgggcgcgggccgcggcgcggacatcctcaatcctccatcgtgaagacctccatcggtccggcacccggggatattgacgggtttccttcggtctcctccgcatcctcgtcggaatcggaatcggcctcgctgcattcggcggcgcttgcgccgggcgacggcgcgatcggcataccgtcctcttcgccgagcttcattcccagcgtcaggcccagctcggaaagtttccgctggacctcgtgcaacgaggtctttccgaaactgcggtagcgcagcaactcggcctcgcccttctgcacgagttcgcggagcgtggagagccgggccgcttccaggcagttactcgcccggaccgagagattcaataccgcgacggacttgtcaagcaattcctcgaccgcggagtccggtcgcccgacggtcgcgcccgtcgacggaagcgaggtgaccatgctcgatccgaggtcgttgtacataacgagcggattgaggtgctttcggaggatcatgccggcctcaaccagcgcgtcctcgggcaacacggttcccttcgtccagatttcgaggatgaggcggtcgtagttcgtgcgctgccccacgcgcatggcctcggtccgataacgaacccggaggacgggtgagaaaatcgagtcgatcgggatgattcccagctcctggtcggggcggcggttgtcgttggcggtggcatacccgcggccggcccgaaccgtcatctcggccttgaatggaacgtcggcggtcagggtcgcaatatgatggtcggggttcgcgacggtgacggcggggtcggtctggatctgccgcgccgtgaccgtcccggccttgtcgcagtccagggtcatggacttggtctcgacgccgtcgatgctgagcacgatgcccttgatgttcaggaggatgtcggtcacatcctcgagcaccccctcgagggtcgtgaactcgtgggacacgccgtcgattttcaccgacgtcaccgcggcgccctccaggctggaaaggaggacccggcgcagcgagttcccgatcgtggttccgaaaccctgctcgaacggctcgatggtgaaacgcccgtacgagtccgtgctgacggcctcgtctcgaatgacgcggctcggtaattccaatcctcgccacctgatgcgcatagagttaacctcccgccaggttgatccggtgcacgacgaggatcacctcgcccgcacgccgcgtaagtccgtgtcacacgccgcgccgatgggacatccgacgatctgccgaacggccggcggcgcccgctaccggctgcacatctcgataatcaactgctcttcgaccggaatctggacgtcctcgcgcgtcggaagggcggccacggcgccctcgagcgtctgcgcatccaacagcagccaaggctggatcgagacgtcgccctcgccaacggtccggcgaatcaggttctggctcttcgccgagggcttgatcgaaatgcgatcgccctgcatcgccaggtaactcggccgattcagccgccggccgtttacgtacacatgtccgtgcgcaatggcctgccgcgcggcgcgccgcgacgagcagaaacccagcttccacaccacgttgtccaggcgccgttcgagcagactgagcagcgcgtcgccggtgttgcccttgctgcgctccgccatgcggaagtagagcatgaactgccgctccagaactccgtaatagcgcttaaccttctgtttttcgcgcaggcgcacaccgtagttggtggccttgcggcggcgccaggcgtgcatgcccggaggctggcttcgccactggcgctccatggcgcatttcgcggtctcgcaccgcgcccctttgagcatcagcttgataccctcgcggcggcacaagcgacataccggtccgatgtatctgcccatgagccctacctgatccctgtttccagtcgcgggcgggcggcgccggttgacaccgaacgcgtcgctttacccgtcacggcaactctcgctcgaggaaagtgacttccttgaagccattcgcaagatcgacgaacttcacccccggcaattgcttcagcgccgaggcggcctgctcccagaaattgagctcgatcgcccatttctttttcgcgcaccgctccagcgtcggaacgtactcttgatccccggcgacgagcgcgacggtcccgggccccgggttgtcttccaatgtgtcccggattgcgttggtcatttcggcgtccacgcgcttctctttgcccgtgtagaagctccgatcgaagattctcggttcgatgcccaacgacttcagacggttccacaacgcatcgttcggcggcggacgggaacccacgaggacggcctcctccagcgtgcggccttggcgaacgtactccaacaagccgccgtagttgatccggaagcggagaacgagcgggtcgtcgtatcggaacgcttcgcgcgcggcccgctggccctcgatgaaaacgttcgagttatcgatgaaaagatgtaagccgttcaccgtaagcctctcaccccgtcgctacacccgccgccgcttcttcggacggcagccgttgtgcggcagcggcgtcacgtcctcgatggaatggatccggagcccggacgattgcagcgcggtaatggcggcgtcgcgcccgcttccgggtcccttcacccgcacctccacctcctgtagaccgaagcgccgcgcggcgtgggaggcctgctccaccgcacgctgggcggcgaacggcgtgctctttcgagttcccttgaagccgacggtgccggccgaggccttgcacaggacgtccccgttcatgtccgtgatggtgaccagcgtgttgttgaacgaggccttgatgaacgctatgccccgcgacacactgcgccgctgcttccgcttgctgccggttcgcttcgccaagtcgcctactccttcaccgacgcgccgatcagcgcatctccttcacgctcttcttgcccgccaccgtcttcctcggtcccttccgggtccgggcgttggtccgcgtgcgctgcccgcgcacgggcagatgcgaccgatgccgctgcccccggtagcagcggatgtctttcaggcgggcgatgttcgattggacgatccgccgcagttgcccctcgacctggtagttccggtcgatgacggagttgatccgggtgacctcctcctccgtcaggtccttggccttgacgcccacgtcgatctgcgcctctttcagcacgtccaccgcgagcttcgggccgatcccgtacacatagcgcagggcatacatcatccgcttgtcgttggggatgtccacaccggccacacgcggcatcgttccgcctccttaaccctggcgctgcttgtgccgcgggttcgtgcaaatcacccgcaccacgcccttgcgcttcacgatcttgcagttctcgcaaatccgccgaacactcgcacgcaccttcatgatcgtcgttcctgtttccggtcgccgccaccaaaagcggtcatcgcccgttcgtcagcacatccgcgccgtcctccgagaccgccacggtgtgctcgaaatgggcagcgcacttccgatccttcgtgaccaccacccatcggtcggcgtcacggtactcgacggccggggtgccgaggttcaccatcggctccaccgccagcaccataccgggcagcaactcgaagtcggccagtttctgccggtcggcccagtaattgggcaccttcggttcctcgtgcatgtcccggccgatgccgtggccgacaaagtcccgcaccacaaacaggccgtggccttccaccaccgcctgaacctcgcgagccacctggctccagagccggcccggctccatcaactcgatcgcgcggtcgagggcctgccgcgtcaccgtcatcagccggcgcgaggcttccgacacctcgccgatggcgagggtgacggccgagtcgccgcaatagccattgagcttcacgccgcagtcgacgctgagcacgtcgccgggggtgagcggccggtcgttcgggatcccgtgaaccagctcctcgttgacgctggtgcacagggcggccgggaacgggaacttcgcctgcgggttctcgacacccttgaacagcgcgatgcccccggcgtcggcgatcatcttctcggcgaccgcgttgagctgctgcgtggtcgccccgggcaccgcaagctcccgcattcgcccgagaacgccatgcaccacacgcccggcggcccgcatcagctcgatctcccgctcgttcttgagaatgacgccccggggctgcctcacacccgtcgtcctacgatgccgatccagctctttcatctcctatagaccgtataaccaagtccgttcggggcaagccgggccgccgccgggtcaggagcgcgagcccttgatcggcccctccgtacccagaaaaccgcggtaattccgcataatcaggttcgcctcgatccgctgcaccaggtccaaagtcacactgaccacgatgagcagcccggtcccacccagaaacgcggacaccccgaaggggatcttgagcgactcggcgacgatggtcgggatgatcgcaatgatcgcgaggaagccggcgccgacgtacgtgatccgtcccatgacccgctcgaggtggtcggccgtgcgtttgccggggcgcaggccggggatgaagctcccgtagtcccgcaggttgttcgccatttccttgggccggaactgcaccgtggtccagaagtacgcgaagaagtagatcgccacgatgtagaacacgatgtagaggtactcgcccatgcggaacgactcattccagaaccgccagaatgagttgggccaggccgtcgccaaggcggtgaacaccagccccgggaagatcagcatcgagctggcgaagatgatcggcatcacgccgccgtggttgacgcggaggggcaggtagtgccgctggccgccgtacacccggcgtccgcgggtctgcttggcctgctggatcgggatgcgccgctgggcctgggtgatcaggatcgctccggccacgacgccgcagaacatgatggcgagaaagagcaacttcgggaggtccatctgccccgcctgggccacccccttgatgctgaggttctggtacacccagatgcccgcgtcgggcattcgcgccacgatgccggccatgatgatgagcgagataccgttgccgataccgtattcgtcgacctgctcgccgagccacatcaggaacaccgtcccggtggtcaggatgagcagggacatgaccatgtacgagaacgacatgccgatccatgagcccgtgtactgggggaacaggtagccggaactggcgaggtaccgcatccagacgacggcgttgataatgcacaggccgacggtcgcgtagcgggtgtattcctggatcttgcggcggccgctctcaccctcctgctggagcttctccagcgacggaacgaccgtcacgagaagctggaagatgatggacgccgagatgtacggcatgatgcccaaaccgaagatcgtgctctgactcaggttcccgccggtgaagatctggaaatactgaacgaggtccccgaggccgccgcccccggtcggcatgccgcgggccatctcctcctgattcacgccgggcacgggcacaccgaaaccgagccggtagatgacgagcatccccagcgtgaagagcaccttgttgcggagctcgggaatcttgaaaacgttcagtaacgtcgcaaacatctgctatcgcgtcgccttttgtcggtccaagggtgtacgccggaccaaacctgtccgaccggtcctcgacattccaatgactctgcgcccggcgcgctccatctcaggctcccacgcggacggtgccgcccgcggcctcgatcttcgctaccgccgcctgactgaacttcgcggcgaccacgttgagcttcttggtcagcgcaccggcggcgaggaccttgacgggccgccgtacgtcgcggatgagcccggactccttcaaccgctccggcgtgacctcggtaccggcgtcgtagttgcgctccagcgacgcgacgttgaccacgtggtaccgcgtcgtgaagcggacgttgctgaaaccgcgcttgggtacccggcggaacaggggcatctgcccgccttcctggagcacccggccgctccagccggcacgctgcccggcgcctttgtggccgcgcccgctcgtcttcccgagcccgctgccgcggccccgtcccacgcgcgtacgccgcttgtcggcgccggccagcttcgtgatctggttgaggttcatgatcgttgccccgcctgctagctcgccagcgcgaccccccgcaggcgttcgacatcggcccgcgagatcaatgacgtcaagccctcgagcgtggcccgcacgaggttcttggcgctgttggatccatagctcttggtgagcacgtcatgcacgccggcgagttccagcacgggccggacgctcgccccggcaatgacgccggtgcccgggctggccggcaccatgaccaccttgctcgccccgtatcggccaatgatccggtgcggcagggtgcctccgaccagcttgatcgggatcatggactcggtcgcgatcttcttgcccttctccacggccgacgggacctcaatcgactttccatagcccacgccgactcgtccccgtcgatcgccgacgacgaccagtgccccgaaggagaaccggcgcccgccacggacgaccgtggcgcaacggtagatcttgacgacgacgtcctcgagcggtcggccttccgtctgcgatgctgcttccaccgttgtcatcgtgctgtcggttcctccgaaggagcctagaacttcatcccgctttcgcggatcgcctcggccagggccttgacccgcccatgataccggtacccgttccggtcgaagcagacggactcgacgttcttggatttcgcccgctcggcgagcgccgcgccgacgaccttcgccgcggccacgttcccgccgtagctcacctgaacccgaaggtccttgtcgcgtgtgctggcctcgcacagggtcacaccgcgatcatcgtcgatgatctgcgcgtagatgttctggttgctccggaaaacggtcaggcgcggacgctccgccgtcccccggatgcgcttgcgaaggccgcgtttgcggcgatcgcggcgctcgaccttgattcgactggcgttcatcgcttcgttatgtcctcactcgatcgacggcggatcgcgccgggctatccggcccccgccagggccttgccctgcttgcgccgcacgacttcgccttcgtaccggatccccttgcctttgtagggttcggtcttgcgcagggcccggatttcggccgcgaactgaccgacctgctgccggtcgtgccccttgaccaggagctgggcgggctcgttctcgccgcgggccgcctcgcgctcgatcacgacttcgaggcccggcggcaccggaatctcgaactgggagcccacgccccgccgccgcccggagaatccgacgttcaggtggagcgtccggccggccagcttgcagttgtaaccggttccgtgaatctggagccgccgctcgaagcccacggccgcaccgcgaaccatattggcgataagcgcccgcgtcagtccgtgattcgcccggctctgcttgctgttatccgtgcgcgtgacgcgcaccagcttcgcggcgtcgtccatggcgaccgccgccgtcgccgggaactgccaggaggagtcgcccttgggtccggacacggagacctcgcggccgctcaccttgacggtcactgtggccggaaccggaatcgccttggcaccaacgcgtgacatacctggagttcctcgcctacctattccaccgtgcagaccagttcaccaccgacccgctgctcgcggcactcgcggtcgctcaacacgcctcgcgacgtggacaccacggcgatacccaacccgtcgagcacgcggggcagggcgccggacttcttgtagagccttcgcccgggcctggacgcgcggctcaggctgtggaggacgacctcgccgcgaggcccgtacttgagctcgatccgcaggacgccctgcttcccgtcttcgatgacgtcgtagtcccggatgtatccctcgtcacgcagcacgcgggcgatcccgaccttcatcttcgacgacgggatcttcacgtggcggtggcgcacgcgggcggcgttgcggattcgcgtcaacatgtcggctatcggatcagaccacatggtgttctaccagctcgcctttcggactccgggaatcaaaccgccgtgcgccagcctccggaagcatatccggcagacgcggaacttccgatatacggcccgacaacggccgcagagctcacagcgccgcaccacgcgcgacttgaacttcggcttacgcttcgccttgacaatccacgcggtcgtcgccatcagttactctgctcctcggtgcgccgcagcggcagccccagcccggcgagaagcgccttggcgtgggcatcgtccctggccgtcgtgacgaaagtgatgttcatccccaggttgtaggtgatcttgcccaggtcgatttcggcgaagatcgactgatccgggatccccatcgaataattgccccgcccgtcgaagctcttggggttgagcccgcgaaagtcgcgcaggcggggcatcgcggcgttgaacagccgatccacgaactcgtacatccgccgcccccgcagcgtcacccgacacccgacctcgtagtcgcgacgcagcttgaaattggagatggcggtcttggcccgccgaacctgcggcttctgcccggtaatccgcgtcaggtcctccgtcgccgcgggcaggcggttcttgtcctgtgtgggtgatccggtccccatcgacaccaccaccttcgtcaggcgcggcaccgccatcgggttcgcgatccccagctcttctttcagcgccggagcgacttccgtcttgtaggtttctagcaaccgagccataggatgttccgcctcattcgtccctatttcgccgcccggtccgcgcggctgagcgtgtgcagcgtcgttccggatcgggtcacacgccgtttgacgaccgcccttgcggccttgcgatccatctcgaaatggacccgctggctcttgcccgcagcactgtcgtacggcaaaacgttcgacaggtggatcggggcctccttctggattcgacccccctgggggttacgctgcgtccggcgcacgtggcgatagaccaggttcaccccctcgaccaccacccgctgtttcaccgggtcgacgcgcagcaccttgccccgcgccccccggtgatcgccggcgatcacttccaccacgtcgttcttgcgaatgtgcgccgccatgagccctcaaaccacctcttccgccagggacacgatcttcatgaaattccgctcccgcaactcgcgggcgacggcgccgaagatgcgcgtgccgcgcggctcgttcttctcgtcaaggagcacgacggcgttgcgatcgaaacgtacgtagctcccgtcgggccggcgggtcggcgcagtgacccgaacgaccaccgccttggccttgcgccttttggaccggtccttgcggtccgaccctcccgagaaatcgctgttgggcagggccttcttcaccgtcaccaggacgatgtcgcccagacccgcggacttcagccgcggcttgccgcggcgtgccgtactccccttgtacacgttgatgaccatcgcctgcttcgcgccggtgttgtccgccacgtcgaccatggtctgtaattgaatcatcgccagctcccgccgcgctcagcccgccatcatcgccgcaggtcgcaccacccgcagcagccgccagcacttcgtcttcgagattcggcggcaggccatcaactcgaccaggtccccgaccttcgcctcgccgccctcgtcatgggcatgcaacgtggtcgaccgccggtagtacttgccgtacttcggatgccggacctggtactcgtgctgaacgtggatggtcttctcacccttgtccgacacgacaacacccaagagcgtgtcgcgccggccgcgctgatcctgcgaacccgtcggcgattccactgtatccatcattcccgttcagctcgttgtggggcgcgtgcggcgtctctaccgccgggcgcccgttgcttccaagtgccgctgcgtctcctcgatgcccgtttcgccgcgctccctcaggatcgtcaggatcctggcgatgtcccgcttcgtggcctcgagctgatgcggattctcgagtttctccgtcaccgcctgagcacgcaggtcgaacaggtgccggcggaggcgctcgagctccagatgcagctcggcggtcttcatttctcgcatctcactcgcccgcatagcggctcctttgggacgcgctggggtctaaaggccgtgccggcgcttcacgaaacgacaccgaaacggcatcttcgaggccacccgcaccatggcgttgcgggccacgtcctcctcgacaccgcccacctcgaacagcaccgttccctcccgcacgcacgccacccagaactcgggatcgcccttgcccttccccatccgcgtctccagcggcttcgaggaaaccggcttgtgcgggaagatccgcacgaagacccggccctcgcgatggaggtaatgcgtcgcggcgacccggcccgcctcgatctgccgggccgtaatccagcccttgcccaggcactgaagaccgtattcgccgaacgccaccgtgttgcccttctgtgccgtgccacggatcttgccgcgctggctcttgcgccatttcactcgcttcggcatcatcgccatggcgtcgactccgtcatcaccgcggaacgggtttcactcgccgtcttaaccacgcttccctcgccggtaccgcggctgcggcgccaggtcgctcaggtccggctcctcgccgtacttgccgtgatagagccagaccttcacgccgatggtgccgtacttggtcttgcaggtcgcgaccccgtagtccacgtgcgcctggagcgtgtgcagggggatcgagccgcgatgctgggtctcgcgccgggccatctccgatccgccgaggcggcccttgcacatgatcttgatgcccttggcgccggcggtcatcgccgcctcgacccgcgacttcatcacccggcggaacgcggcccgctttttgagctgctcgccgatcgattccgcgatcaacttggcgtccaggtccgggtgcttgatctccacgatgttcaggctgatcttgcgatcgatcaggtcctcgagggcctccttgagcttctcgacctctgcgcccttggccccgatgaccagaccggggcgcgccgtgtgcaggtagaccttgacttcgttccgcgtgcgctcgatgtcgaccttcgccaccgcggcgtaggggggctggcggttcagcttgtcgtccacgtattcacggatcttctgatcttcgatcaggaactccgcgaacgccgccttcggcgcgaaccagcgcgaacgccaatcctcggtgatgccgatcctgaagcccgtcgggtttaccttctgacccacgaatcactcctgtgccgcgccggacgaaacggcggcacgctcgtcacgactcggccacggtcacacataggtggctcgtccgtttggcgatgggatgagcgcgaccgcggtccttcggccgccaccgctggaagtacgggccgccgtccacgcgggcctctttcacgaccagtcgcggcatgttcgcctcctgctcgtccgcgttgaccatcgccgacttcagcacggcctcgatgaaccgggccggccgtcgggcgttgaagcgcagttgttccagcgcctcgctgcacgacttcccgcggataaggtccatcaccagccgcgcctttcgcggcgcgatgcgtgcgaaccgatgcttcgccgtccacaatcgctcgtcgctcactgccctgcccagccgatcaacgagcccaggctcgttgtcgccttaaaaaacgaaacgccgggctctctgacccagcgctgaacctacgccttcttcccgccgtgcccgcggaacattctggtcgggctgaactcaccgagtttgtgcccgaccatgtcttccgtcacgtagaccggatgaaacaccttgccgttgtgcacctcgaagcgatgccccacaaactccggcacgatggtgcagcgccgggcccaggtacggatcaccatgcccgtaccggcggccttcgtgttcatgactttgtggaagagcttttcgtccacaaacgggcctttcttctgggaacgtgccatgtccttcggacggctccttggtcttatttcttgggcaccggaatctgcccgtatcgcctgctgcgtcgacgccggatgatccgccggttcgaaaccttgcgccggttgcgggtgcgtccgcccttggccagcttaccccatttgctgcacgggtggcgccccccgccgcttcggccctcgccgccgccgagcgggtgtgacacgggattctgtgccgtgccgcgaacgtgcggccggcggccgcgatgccgcgtgcggcccgccttgccccaccggatgttctgatgctcgacattgccgagctgcccgatcgtcgcccggcactcgacacgcacctcgcgcatttcgccggagggcagcgtgatgatcgcccacgactcgttccgtgaaagcaaccgggcgtacgagccggcactgcggcagatcttgccgccctgaccgatgtgcaactcgatgttgtgcacgtccatacccggcgggatccgcttcaggggcatggcgttgccgaccttcggctcgacacccaccccgctctccacgaccgcgccgaccttcaggcccgcgggggccagaatgtatcgctggtcaccgtcctggtacttgatcagggcgatgtgcgcggaacggttgggatcgtattggatcgcttcgaccgttcccgtaatcccgtccttgtttcgcttgaagtcgatccgtcggtagagccgcttggacccgccgccgcgatggcgggaggtgatccacccgtggtggttgcgcccgccgtgtttgttgagccgctcgcacagggccttgaccggccggccgtgcggctgcgtcagctcggcatagtcgttgaccgacgacgcccggcgtcccgcggaggttggcctgtatttctttacgcccatctgcttgccacgctgctctagaacagatcgatatggtggtcagggtgcaggaccaccacggctttcttccaatccgccgttttcccgatcttgaaccgcacccggcgctgtttacccttgcggttcgcggtgcggaccgactgtactttcacgcggtagatcgtctcgatcgcctgccggatctgcggcttggtcgcccgggcgtggacctcgaacgtataggacccgccgcgggccgcccggctgccggtcgcgtcgtgcgactgctgtgactgatgcgtgcccttctcggtcaccagggggcgtttgacgatgttgtagatgtccatgccgcaacccccggtcgcctacgcgcccgctcttttcgacgcgcctcgggcggcgactttctcgaacgccggccgcgtgaagatcagtttgtttcgtcgtagaacctcgtacgcgttgaggtcgtccacgagccgcacttcggtcttgggcacgttgcgcccgctgagatacacattgcgatcccgctcatgcagggccagaacgcaaccgcgctccgcgcccaacgccaccagcatggacgcgaagcgtttggtcttgggtgcgtcgaactgcacgtcctggagcaccatcgcgtcagccgactggatcttcgccaggatcgctccggccagggcgagccggcgcattttcttcgggagctccttcgtcgcccgcgggcctcgtttcccgaacgcccggccgccgccgcgccgcacgggcgtgcggatcatcccggcacgggcgttgccggtgcccttctggcgatacagcttgcgggtggaaccctcgacgtccgaacgccgcttggttcgcgcgctgcgttgacgctggtggtccaggtaggcgacgaccgcctgcttgatcagtcgcggacggacgcgtatccccagggcggccggatcgatctcgatcgtcccggtctgcttgccgtccatgtcgaatacgggtaccgccaacatcctcgctagcccttcttcgccttgctcttcttcgaaccacggacgaacactgcgcccccgtcgggccccggcacactgccgcgtatgagcagcagatcgtgctccggatcgatcctgaggagctcgaccgcccgctgcgtgcgtcggacgttgccgagctggccgctcatccgtttgcccttcttgatgccccgcccggtcgctccgggggcgttggccccgatcgatccgggggaccggtgtttccgttcggttccgtgcgacgcgcccatgccgccgaagccgtgccgtttcatgacacctgcgaagcccttgcccttcgtgacgccggtcacgtccacgagccccttgaccgatgcggcgaacaactccacggtcagcacatcgccggccgacacgtcggtcggctcgttgagccggacctcgcgcacgacccgcttgggacccgagccgaccttggcagcgtgcccgatcatcggcttggtgctgcggtgcggcttgacgtcatcgtaaccgagctgcacggcgtcgtatccgtccgactccttggtcttcacctggagcacgacacacggaccgcacttcaccacggtcacgggctccgcgcggccgccatccgcgaggatgcgcgtcatgccgactttggtacccagcaatgcagggatcatgctcggaaacatcccgttgcgacgaccgcacgcggcgaaactaagtcctgatcttcacgaacacgccggccggaacctgaattcggttgatggcctcgaccgtccgcgccgtcggctccgcgatgtcgatgatgcgcttgtgcgtccgcatctcgaactgctcgcgcgatttcttgtcgatgtgcggactgcgcaacaccgtgtatcgttcaatccgcgtcggtaagggaatcggcccgtgcaccttcgccccggtccgcttggcctggtcgacgatctcccgcgcggacgcgtccagcgccccggaatcgtaggcttccatgcgaatacggatcttcgtctgactggccatgccgcgaccacccatacccaaaacccgccggtagacgcccggcgaccaaaaaaaacgcagaccggtaagaatacctgccgcggcaagcctgtcaactgcccaggaggacgccttttttctgttttttttttcggcgtgggaggcagccggtcccgcccctaaccaaccagggccttcatggccgccgcccccaccggggcgtagtgggacggcgtcatcgtcgatgtggcccggccctgggtgaggctccggagcttcgtgacatacccgaacatctgtgccaggggcacgtcggccgctattacacggttcgggccgcgcaggaccgtctctcgaaccgacgctttccgcgcgttcaggtcgccgatgatcgcgccgaggtactcctccggggtgaccacctcgacggccataatcggctccagtaggacgggtgcggccgccttcatggcctcgtagaaggcgtttcgaccagcgttctcgaaggccagctctgagctctcagcatcgtgctgctcgccatcgacgatggtcgccttccagtcgatcaccggatacccgcccagaattccgctctgggacgcgtcccgcacgccgatcttgatggcctcgatgaacgcgggagcgagcccgtcacttgcgaccaacgagatgacctcgaagccctggcggcccttcccggcgccacgagggcgaggttcgaggcgaagtcggcacatcgcgaaatgcgcccgcccgccaacctgccgaatgaaccgcccgtcgctctcgccgacgccactgaccgtttcgcggtatgacacccggggcttgctgacaacgacctcgatattcatgtcagattttagtcgttgcatcataacttctaaatgaagttctcccatcccggataccagagtctgtcctgtttccgggttggcggcgacagcgagagtggggtcttgccgctgtagcgctgcgagggcctccatcagcctgtcgcggtctctcgaggcgcgcggctcgacggaaacactgatcacggtttccgggaactcgatcgactcgagcaccaccgggcatcggggatcacagagtgtatggccggtcagcgtctttcgaggcccgacgatcgccacgatgtccccggcatgggcctggtcgagctggtcgcgacgtttcgcgaacatccggaaaatacggctgacgttctctttttcacccgtcgtcgtattgagtaaacgcgagttggacttgagcgtgccggcatagaggcggacgaaggtcaggtccacgggcttgtcggccagaaccttgaacaccagcccgacgaagggcgcgtctaccttacaggggatctcgatcttctcgtcgggcttgtgggcgtcttccccggctacgggagggacctcggtcggagccgggaggaaatcgcagaccgcgtcgagcaggcgttggacgccgacgaaccgcagcgaactgccgcacaggacgggcacaagctcacgttgcagggtcgcgttgcgtatggcggtcacgacctcatcgcgggcgacgggccggtcatggacgtatttgtccatcagtgcatcggagaactccgccgcggtttcgagcagctcgcgtcgggccgacaccgcggccggccggagctcggcgggaatctcgacgatctggaacgtggagcccaacgcctccgattcgtagtagaccgctttcatgtccagaaggtcgatcagcccgacgaaatcgccaccggccccgatcggaatctggagcgcgaccgggcgggcgtggaggcgctcccgcagcgaagccacactgtgctcgaagtcggcgccgacccggtccatcttgttgatgaagcagatgcgcgggacccggtacttatcggcctgatgccagacggtctcggactgggcctcgacgccttcacgggcatcgaacaatacgaccagcccgtcgaggacgcggagcgagcgctccacctcggccgtgaaatccacatgcccgggcgtgtcgatcaagttgatcgtgtgctctttccaggggaaggtcaccgccgcggagtagatggtgatgccgcgcctctgctcctgctcgtcgaagtcggtgatcgtggtgccgtcgtctacgtcacccatgcggtgtgtgcggcgggcgtagtagagcacgcgttcggtggtcgtggtcttgccggcgtcgatgtgcgcggcaatgccgatgttgcggatcttggataggtcggcggacatcgcgcttgttggactccggccggcgccgaggccccggcgggatcgctgttcaggtcgtaaacacgaacaagcccgccccacgggctgggcgggcttgggaaaaactcgaggcgaggttgttaccaggcaaagtgggcgaaggccttgttggcgtcggccatgcggtgcacgttctccttcgtcgtaaatgccgtaccctcggccttggacgcgtccacgatctcctgggccaggcgctcgcggagcggccgccccttcttgccccgcgccgcctcgcggatccaccggaacgcgagcgactgctgccgcttgttgttgaccggcatgggcacctggtagttgctgccgccgacgcgcttcgagcggacctcgacgttgggcttgcagttgctcaccgcccgctcgaagacctcgagcggcgaatggtccttcacgcgcttcgccacgatatccatcgccccgtagaacgcccgctcgcacgccgacttcttgccgttggtcatcaacgtgttgatgaatttcgacacgaggcggctgttgtagcggacgtcgggcttcagttgctcaggcgaagctgtccaacgcttgtatgccatcgatcgtcaactccaggacacacccccgacaatccagcatgatacgcccggcccacccgggattcaatttctcgggccccgacccgacacctgcccaccgcccgcggggccgagcccgcggatcacacgcaccagcgacgccgccaatagcacctcgaccgccgctttcgggaggaacggaatcaccccggtccagaccgccgcggcgacgtcgccaccgagcatcggcaggcgccagaccatcccaaaggcgaacaccgcgcccatgccgcacgcccccgctaccaacagccgtgcatacgcggacgggcgcggcccgcgcaacgtcgagaccagccacgccgcagccacaaaaccgacgaggtacccggccgtcggaccggcgaatccggtggaactcggtgagaacaccgggagtccgcaggccccgcacgccaggtacagcagcgacgccgcgaccgcccggcccggactgaggaagtaccccgtcaggagcaccgcaagggcctggagggtcatcggcacgtcggtccccggcaccggcacgcgtacctgggccgcgagcgagatcgccagcgtccagccgctgacgaccatgaggccggcgaccgccgtggcgcccgatcggctcgtgcccggcatgaccggcgccgtcgtcgcgggattctgtatggttcggctcatgcagacatccatctcgggccgtttcggccccgaagtcgcgttgtcatttgcgtcgcttgacgccgtacttacttcgactccggtttcgggcgcggccttccttgtcaccctcgacacctgcggcgtccagtgcgccgcggatgatgtggtatcgaacgccgggaaggtctcgcactctgccgccgcggacgagcacgatagagtgttcctgtaggttgtggtcgatgccgggtatatacgcggtgacctcccggccgttggtcagccgcacacgggcgaccttgcggagcgccgagttcggcttcttgggcgtctgcgtcttgacaatgaggcagacggcccgccgctgcggacattgctcgaggtcacgcaccttggacttctttgtcaccttggtccgcggcttacgaatcagttggttgattgtgggcattgatgtactcgtcttcgtacggtctgccgcgctggatcacgtcagcgccggcgcgggtcattcctcctgtcggacgccgtggccgatctcaacgtcgtgctccgactcctcggtggtttccacgtcggtggtggccacgctttcctccgtcgccgttgctatgctgccgaatctgctcccgaaggagaacccggcgccggcaccgaaccccgccccggccccgatggtcaactcggccgggatgtccggcaggatcgggatcggctcgccgagctgcttcaccctcagttgctggtagcggcggaagccggacccggccgggatcagatggcccagtatgacgttttccttcaggccccgcaagcgatcgacccagccgcccaacgcggcctccgtgaggaccttggtggtttcctggaaggaggccgaggagatgaaggactcactggaaaggctggccttggtgatgccgagcagcaaggttgttgcggtggcgggcttgggcttcttgcccttggcgggctcacctccgttggcctcggtttcggcgttgatctcggtcagctcggtcttgaggacgaccgactcggcgttgagtttggtgtctccggggttggagatgatcacgcttttggcgagccgggcgttctcgtactggaacctgaacttgtcgaccacctcgccggggaggaacgtggagtcaccggggtgctcgaccttcaccttccgcagcatctgggagatgatgatttcgaggtgtttgtcgttgatggtgacgttctggctccggtagacggcctggacctctgcgaggagatactgctcgagcgcctcgacgcccttgatgcgcagaatgtcgtgcgggatgagcggtccctcgacgagcgggtcaccggcctcgacgccgtcgccggcgtgtaccaggaggtgcttgtcctggggcacgtgatgctcgcgctcgaggccgctctcgctggcgacgacgatcgtcatcttgccccgccgtttgtcggcgcggatctcgatcttgcccgaaagctcggccatgaccgccggttccttgggcttgcgggcctcgaagatctcggtgacacgcggcagaccgccggtgatgtcctgggtgccccccatggcccgcggctgccgcgccagctccatgcccgggaccaactcctgcccttcggcgacctcgatgcgggccttcgccgggaggtagtggtagtcgagtacgtttccgtccttgtcctcgatgacgatctgcgggtgcttttcgcccttgtgttcgatgacgacgaacttggccttgccgccttcatgctcgagccggacggtctcgccgtcggtcacgtcctggaagcgggagaatccgcccacctccgccagaatcggcgtcatgtgcggatcccactcacagagaatgtcaccgcgtgacaccttctggtcgtccttgaccttgagtaccgcaccgtaggggaccttgtcacgggtcagctcccgtcccttgtcgtcctggacgatgatctcgccgttgcgcttgaggaccaccgtgcgcagcttcccatccggacccgggacgtcgacagggttgaggtcacggtacttgacgacgccgcgctgggtgaccttgagcttgctttccatcgcggccttctgggccacgccgccggtgtggaaggtccgcatggtgagctgcgttccgggttccccgatcgattgggcgccgatgatgccgaccgccatcccttcctcgacgagtcggccggtggacatgtccattccgtagcaactggcgcagacgccccgcgcggcctcgcaggtcatcgggctccgcacgcggatcttgtccagcccgagatcctcgatccgcgtggctatgtccttggtgatgagctggttctcggcgacgatgggttggtcggtcaccgggttgcggatgtcgtcgcgggcgacgcgcccgacgatgctttcccgcaggggaatgtccacctcttcgcccttgtagatcgcggccttggtgacgccggcgatcgtcccgcaatcgtgcaggttgatgatgacgttctgcgcgacgtcagccagtttgcgggtgaggtagccggagtcggcggtcttgagggcggtgtccgccagcccctttcgggccccgtgagtggaactgaagtattcgaggacggacagcccctcgcggaagttggccttgatcggcgtctcgatgatctccccggacggcttggccatcagagcccgcatgccggcaagctggcggatctgatcgacgctgccacgcgcccccgactgggtcatcagatagatcgggttcaggtacgcggatgcgcccgcgtcgtccgggtcggcataggtgttgtcggccgatcggaagtcggtgcgcagctcccccatcatggcctgggtcacctgctcgcgggcatggatccagacgtcgatgatctggttgtagcgttcgaggcgggtcagcataccctcctggaacgccttttcgatcttgtcgacggcgagctgggcggtgtcgatgatcttctgcttggccttgggaatccgcatgtcggtcacgccgaacgacaggccggccagcgtgctctgcttgaaaccgatgtccttgatctgatcgagcagggcgatggtggccgcccgcccgagcatctcataacagtcggccacgacccgcaccagccccttctgcgacaacgggcagttgtaaaacggcatctcctgcggcaacccgtcgttgaagatcaggcggccgaccgtggtcccgatgcgccggttggccgccaccgcggcgggcgcggacttgaccgtcgccacgacctgctcgcggtcgatgcggacgctgatcttgtcgtggatgccgacgcgccccatgtcacgggccatcatcgcctcgaaggcgttggcgaaccgcggcacgtccttttcctcgaccgcctggctgacgtggtcggtggtcaggtagaagatgcccagcaccatgtcctgcgtgggggacatgatcgggctgccgttggcggggctgaagatgttgttggtggccatcatcaggatgtgggcctcgacctgcgcctcgatcgacagcggcaggtgtacggccatctggtccccgtcgaagtcggcgttgaagcccttgcacaccagcgggtggatcttgatcgcgttgccctcgaccagcaccggctcgaaggcctggatgcccatccggtgaagcgtcggcgcgcggttgagcagcaccggatgctggtagatcacttcctcgagaatgtcccagatcgcctggtcccgacgctccaacatcttcttcgccgacttgatcgtgtccgccagcccccgctccttcagcttgcggatgatgaagggctgatagagctccagggcgatcttcttgggaagcccgcactggtgcagcttcagctccgggccaacgacgaccaccgaacgcgcggagtagtccacgcgcttgccaagcaggttctcgcggaagcggccctgcttgcccttgatcatgtcggtgagggacttgagcggccggttgctggacccgagcaccggacggcggcagcggccgttgtcgaacaaagcgtcgacggcctgctggagcatccgcttttcattctggatgatgacttccggcgcgttgagatcgaccagcttcttcagccggctgttgcggttgatgatccggcggtacaggtcgttgaggtcactggtggcgaagttgccgctgtccaggagcaccagcgggcgcaggtctggcggaatgaccgggatcacgtcgagaaccatccaggtcggatcgttgggcgactgccgcagggcctcgacgaccttgagccgcttggcgaactccttctcgcgctgcttgcttccggtcttggccagcccctcgcggatctcgcccgaaagctgggcgaggtccagccggctcaggagctccttgacggcctcggcccccatcatcgcggtgaagcccttgccgtagttctcgaccgcggaccggaactcctcctcggtcaagagctgcttggccttcagcggcgtgtccccgggctcgaccaccacgtaatcctggaagtaaaccaccttctccaggtcggcggtcttcatctcgaggagggcgcccagcctcgacggcatcgccttgaagaaccagatgtgcaccaccggtgcggcgaggttgatgtgccccatgcgcttgcggcgaacgcgcgaatgagtcaccttcacgccgcagcgatcgcagatgatgcccttgtgcttggtgcccttgaacttgccgcatgcgcattcccagtcccgctccggcccgaaaatgcgctcgcagaacaagccgtccttctccggccggtacgtgcggtagttgatcgtctcgggtttcttgacttcgccgaacgaccagcttcggatgtcgttcggggaggccagggaaatgtgcacacggctgtaatcgttcacgcgatcgtaaatactctcgagcatcagttctgattctccctcatgccgaaagagcgaaaaaaggtccgtatgcgttcacccctgccgaccgggcccgcggttcatcccgcgttgctcgatgcagccgcagcgccggccggcagcgccgcccccgtgtcgcgttccatggcggttacgccccggagcttccggaaccccagttcctcgcagaagtcctcttccgtaccgtaggccagggcgtcgatccgctcgaccccgtaatcggtcagggcggcgatcacccgcgccgccatctcccgggctatcccggccgagtcgtgctcgatccgcccgtcggtccgcgtgacgcacgccgggccttgataggccgggtccagcttgcattccgccagacgcccccaaagcccgtcggtcacaccgcgggccagcccgatcagttcaccgtcgcgccgcgcggtgacgaagcagaacgtgttgttcaccatccgctggagtttctccagcgaatgcgtggtcggatggttctgccgccggtagaacacgagcagctcctgtggatcgggcttggtcatggtctcgaattcgatgtcatcgagcatcggtcacctatcctccctggcgaggcccgccggactccgacccggcctcagcgccacacgtcgcaacgggcgccaaaggcccgccgcgggcgtccgccccgcgaaccgcatcagcccacacgccgcttctccaactggatgttcaggcacagaccgcggatctcgttgcaaaggacgtcgaacgagaccggcgtgccggcttccagcgtgttcttgcccttgaccatggtctcgtaaatcttggtccgcccctccacgtcgtcgctcttgacggttaacagctcttgcaggatgtgcgcagcgccataggcttccagaccccagacttccatctcgccgaagcgctgaccgccggtgcgggccttcccgccgagcggctgctgcgtgatcaggctgtacgggccggtcgcccgggcatggatcttgtcatccaccaggtggtgcagcttgagcatgtagatgtaacccacggtcaccggctgatcgaggtactcgccggtccgcccgtcgcggagccgaaccttgccgccgggcgggagggtgacaaaccgtgaatcctccttggcggctgctcggaccaggtccatgttgccgccgcgctgcccgcaaacgtggttggcttccgccagggcggcatgaatctcctcctccgtcgcgccgtcgaacaccggggtgacggcctggaacccgcacaccttggccgcccagcccaggtgcgtctcgaggatctgccccacgttcattcgcgacggcacgccgagcggattgaggagaatgtccagaggcgtcccgtcgtccagtagcggcatgtcctcgacggggacgatcttggcgatcacgcctttgttgccgtgccgcccggccatcttgtcgccgacggcgatctgccgcttggtggccacccagaccttgaccatctcgagcacgccggacggcagctcgtcaccgcgtttcatctgggccgccttgcggtcgcgttcctcggtgatctcctggacccgcggccagtagcggttggcgatcgccatgcattcgtcgcgcttcgtcgccggcttgacccacttgaggtcctgcgatcgaacgtggtcgccgaacacctcgatctgctcgagaatgacctcgtcgaggttgctgtgtccgaccttctgccgcgtgttcgggtcgatcatcggcccgtccatgaccgtctcgatctccgcgcacatctgcttgaagcaggcgatgatcttggcgttctgggacaggctgtaggccgcgatttcggcgttgagcttcttccgctcgtcctcggtcatgtggagccggcggctgaacttcttggccccgatgacgatgccctcctcgcccgcgggcagttcgagcgagtcgttcttgacgtcctcgccggcgcggccgaagatcgcgtgcagcagcttctcctccgggctgagctcggtcttggatttcgggctcacctttccgaccaggatgtcgcgctgttggacgcgggtcccgagccggacgatgccctcctcgtcgaggttgcccagggccttctccgacacattggggatgtcgttggtgaactcttccttcccgagcttcgtctcccggcattccacctcgtactcgtcgatgtgaatgctcgtgaacacgtcgtcgcggaccagccgctcactgacgacgatggcgtcttcgaagttgtggccgtcgaaggtcaggaatccaaccagcacgttcttgcccagggccaactcgccgttcgccgtggccggtccgtccgcgatgatctcatccttcttgacccgctgacccgggcgaaccagcggcttctgattcatgcaggtccgctcgttgagcccctggaacttgcgcagcacgtactcatcggtgtcgtcgatgaccatccgcctcgcgtcaacgaaggtcaccttgccggaggtgcgggcccgcaccaccatgccgctgttggcggcgacgtaaggctccatgcccgtggcgaccagcggcggatcgacggtgagcagcggcaccgcctgccgctgcatgttcgagcccatcagggcccggttcgcgtcgtcatgctccaggaacggaatcagcgacgccgaaacgccgaccgtttgtttcggtgagatgtccacataggtcacttcctgcgagtcgacgcggcgcatgtctccgcgggcccgcgcgatgacgggcccgtcgaagagccgcgcatcgccgggcacgaccgcctccggcggggccaggatctcgcgcatctcttcgtcggcgcgcaggaacgtggcgtcgccgagcttgccgtccttcgccaccttgcgatacggcgtgatcaggaacccgtagtcgtccaccatgctgtagatactgagcgacgcgatcaggccgatgttcgtgccttccggcgtctcgatggggcagattcggccgtagtggctgatgtgcacgtcgcgcacttcgaagccggcccgcttgcggttcaaaccgcccgggcccagcgctgacagccgccgctcgtgtgtcaattgcgacaacggattcgtctggtccaccacctgcgacagctcgccgcggccgaagaacagctcgatggccgagctgaccgacttgctgttgatcaactccgcaacccggctgatctggtccgggtccttgaggctcattcgctcctgaaccgtgcggcggagcttcagaaaacccttgcgcagctcgtccgcacagagctcgtccagcgtccgcagccgacggttgcccagatgatcgatgtcgtccaccgcgacggccgactcgccggtccgcagcttgagcaggtacttgaggcagtggctcaggtcgtccacggtgagggtcatcgggccggtatcgccggcgatgtcgaacttgcggttcagccggaaccggccgaccttccccagtcggtagcggttcgcgtccgagaacttctccgcgaacagcttcttggccttttccaactgcggcggattgcccggacggagccgggcgtaaatcttcagaagagcctcgtcatgcgacgagctcgcgtcctccatcagcgtgttgagaatcagcgggtcgtggaccttgctgaccaccttgaggttcttgacggacgaagcctggatttgttccagggcatctccgatcgggcatccggcccgaacgagcacgtcgccggtcgcctcatccgtgaccgccgagacgacgtaggtgtcggaggtcagggcgttcgtgcggaccgatttggtcgggtagaactcctcgatgatcgactcgtccgtcgagaaccgcgagtccatggcccgcaggaacgtcgtggccgcgagcttgctcgactggtcgatgcggaccacgagcacgtccttcttcgtgacctcgatctcgagccaacttccccgctcggggatcacccggcaggagtgcagggcccggtccccttcggcctggctcttgatgaagtccacaccgggagaacggtggagctgcgagacgatcacgcgctccgcaccgttgatgatgaactcgccgccgccgatcatcaccggcatgtcgccgaggtagacgaggtcttcgaggacctcatcgctgtccttgcggaccagacgcaggcgaagccgcagaggcatgccgaaggtcaggcgaagctcgcggcactcgtccggcgtgtagcgcggctttcccagctcgtagttgatgtaatgcagcgacatgttcccgtcgtagctctcgatcgggaacatctcccgcaaaagggcctcgagtccgtggccgtcccggctctccggcgcggtcacttcctgaagaaaccccgcatacgacttggtctggatgccgatcagatccggcacccgcatcgcgtcaccgaccttggaatagtcccttaccggacgaacggttaccatcgtggatcttccctcgcgctaatgaaccgagaatccgcgcatgcaaaaagccccggccgcaggtaccgtggcgcggccgagtcgaacggcgggacacgtcaacgccctccgaggcttccggtggaccggctgtcccttgcgaccggtcgatcccgcctgggagcggatgtgcttgcctagaagatcaatcaatactggttgtcgagcgcctcgtcgcctctaaaacgccgaacactgcattatatcggggtcccgtcgaacgccaacccccgccgaatcacccggcccgtcggcgtccgggcaggagcctactcgatcttgacggctccgccggactcctcgatctccttcttgatcttctcagcctcgtccttgtccaccccctctttcagggtcttgggggccccttcgacgagatccttggcctctttcagtcccaggcccgtgatcgaccggaccgatttgatcacctgaatcttcttgtcgccaaagcccgccaggatcacgttaaaggaggtttgttcctcggccgcttccaccgcggcaccgcccgccggaccgccggccgccatcaccacgccgccgccagccggctcgatcccgtggacctccttcaggcagtccacgagcgactgtgcgtccttgactgagagattgaccagcttgtccgcgagggcggtgatttcgccactgaactcgaccgttggtgcttccgccatggtttccgactcctgcgttcgaccctcgccacgctgataggcggcccgtccgatacgagtcatttcatcccggcgcgccgggaccagtcagcgtgcagcgattcccttttgcttttggttgtcaggccgcctgctcggcccgttcgatcatggccttcaggcaaccggcgatcttcgcctgcggcgacctcagacaggcggccagggcccggcccggcgagctgatcaacatggcgatctcgccgaccagctcgcgctgacccttcatcctggaaagcagctcgacggtgagcaggtccggatcggcgtcgagaatcgcctgcttgagcttgagcttgctgaactccctggccgcttcgaccagcgtcttggccagatcgatgcccgagccggtcgtggtcacgagggcacagggcccgtcgaggaccgttcccagcggaccgagtggcccgtccgcgaacgcccgccgcgcgaggctgtttcggatgacttcgaggcggctgcccttgccacgcagggtcgcgcggagcccctgctgctcctgcacgttcatcccggtcatgtcgaccacgcaggcgctgcgcaccccggtataccgagcccgaaggtcctcggtgaccatcgccttaaccggcttgctcatactcccgtccctcgttcatcgtctgtcgacacacgacacacctacgtggtcgccaccgtcaccgacggcgtgcgcgtgcccgacagacaaatccgcttgaaatactgccccttggacgccgacggcttgatcttcgtaaaatggtcgatcaccgcgttgatgttggtgatgaggtcctcatccgaaaaactcgccttgcccacgggcaggtggacgttgccgccatcgtcgttgcggaactcgagccgtcccgcggcgaactcctgcaccgtcttcgcgacatcaggagtgacggtgccggccttggggctgggcatcttgccctgcggcccgagaacgcgaccgagctttccgaccttccccatcatcgatggatgggcgaccgcgacgtcgaaatcgaaccatccgccctggaccttggcgacgagctcgtcggcgccggcatcgaccgccccggccttccgcgcctcgtcggccatggccgggtcgcaaaaggcgatcaccttgcggctcctgccgagccccttgggcagcgaaatcgcgccgcggagcatctgatccgcctgccgggcgtcgatccccaggtgcatggtgatctccacggtctgatcctggctcttgcgcttcttgccgttcttgtacttgcggtccaccttgatcgcggccatatctttgatcttggccacggccgcctccagcgggagcgtgtcggtctgcccccgcgtctcgagctgctttcgatacgcaacgcttcggtatcccatggaactctctttcgatcacgactcggcgtcgacgtgggttcagtcgacgatttcgatccccatcgatcgtgcggtcccggcgaccaccttcgccgccgcctccacgttgaacgcattgaggtccggcatcttgcgctccgcgatcgcgcgaagctgatcgcgggtgacggtgccgaccttctccttgttgggaacgccgctgcccttggcgaccttggccgcgtccttgagcagcaccgccgcaggcgggctcttgacctggaacgtgaacgtccggtcagagtagacctggatcaccacgcccaccggcattccgttcagcgccgacgtcgcggcgttgaactgctggacgaactgcccgatgttgacgccgtgctgcccgagggccggacccaccggcggcgccggcgtcgcctgcccgcccggggcctggagcttgatgaccgccgtgacttcctttttcccgccctttgccaacgatcaccctttcatcttccggccccgaccccactccgtgggactggccttccatgcggtcaccggagcggaacgttcgcttcggccaacgcctgcggctccgggactcactccaccttttcaatctgccagtatccgacctcgacgggcgtgagccggccgaagatcgacacgatcaccgacaccataccacggcgctcgtcaaccgagtcgacctcgccctcgtagctctcgaacgcgccgtcggtgaccttgatctgatcacccttcttgatgttcagcccgctgagcccgggatcctcctcggccttctggcacgcggcgagcatctggacgacgtcatgctcgggcatcgacgtcggtttcccgtcggacccgatgaagtcaccgacgccggtcgtttccttgatcaggaaccagacgttctcggcgaccgagccgtcctcctcacaggccatttccacgaagacgtagcccggatacagcttccgctcgaccacccggagcacgccgccgcgcatccgcttctctttgagcgtcggcaccagaatccgcccgatacggtcttccagcgcctcgatcttcaccttgcgcagcagggcgtcgcggacctgttcctccttgttggaggccacccgcagcacgtaccacttcatccccggctgggccagggccgtcgaggtttccgcccccccctcggcctcatgcgtggcctgttcggtcggttgttccggcgcgtccgtcatattccggtcttcagcacaccgatccagcggaagaatcccacgaacaccaggtccaccatgaacagaaacaccgccagcaacaccgtgaacaggatcacgaccttggtcgagccgatgatctcgcggcgcgtcgaccaactcaccttcttcatctcgccctccgttgcaatgaagaagtcgccggcagcgcggtggccgaagctcaaccaccagcacacggcccccattacgacggcgaaggcgatcgggatccccggcgtcaccagcaggccccagcccgccgtgatgtcctcgtaccccgtcagccggctgcggatgaagagggcgccccagacgacgaccgcgcaggcgccgatgaaggttccccaccgcgtccacttgccctgctcgggcttgtactgcgcgaaggggcccggcccgccgctgcggggcttgcgcggtccgccgtcaccgggtccggccggcgagtcgccgcgacccttgtccttcttccgttgcggtgcgaccgtggttatatcgctttgacccatgcgtttggccccgaagctacgtcgccgcttcatcgtgcggcgcccgcggccgcccattcacggccagccggcgccggtctacaggagcggagggacttgaacccccaaccgccggttttggaaaccggtgctctgccaattgagctacgctcctaagcaagctctgcatcgttcaccggcggtaggttcgccctatttccgtttgatcttgtgaaccgtgtgtttccgctggcgtttgcagtgcttcgacagttcgaacttcggcacaccgccctgaacgttgacgttcgtccggtagttcaggtcgttgcactccttgcattgcagccagacgtactcgcgctttgccgcctttgccatcgattcctacctcgcgggatccggcgctcgcggccggctattcgaggaccttgaccacgacgccggagcccaccgtccggccgccctcacgcaccgcgaaacgaacgccctgctccatggcgatggccttgcccagcgaaacctccatcaccacgttgtcgccgggcatgcacatctcggcgcccttgaggctcaagccgccggtcacgtccgtagtacggaagtagaactgcggccggtagccgttgaagaacggcgtgtgccgcccgccttcctcctgggtcagcacgtacacctgcccgtcgaacttagtgtgcggcgtgatggagcccggcgcagccaacacctgcccgcgctcgacctcctccttcttgaccccgcgaagcaggcaaccgacgttgtcgcccgcctggccggagtccagggttttgttgaacatctccacgcccgtgactgtcgtcttcgccgtcgggctcaggcccacgacttcgacttcctcgccgaccttgatctgtccgcgctcgattcgcccggtggcaaccgttccgcggcccttgatgctgaacacgtcctcgacggacatcaggaacggcttgtcgacgtcgcgctcggggatcggcaccgactcgtcgagggcggcgagcaggtcctcgatcggcttggtcacctcggggtccttgggattctgggtcgccggaagggccgagcccctgataatcgggatgtcgtcgcccggaaaatcatacttgctcagcagttcccgcacttccagttccaccaggtcgagcagctcgggatcgtccaccaggtcgatcttgttcaagaacacgacgatatgaggcacgttcacctggcgggcgagcagtatgtgctcccgcgtctgcggcattggaccgtcggcggccgaaacgaccaggatggctccgtccatctgggcggcgccggtgatcatgttcttgacgtagtcggcgtgtccgggacagtcaatgtgggcatagtgccgcttttcagtctggtactctacgtgggccgtggagatcgtcagaatcttgctggcgtcgcggcggccctgcgactccgaggcctttgcgacctcgtcgtacgtgatcgccttggacagacccttgtggctttgcaccaagcacatcgccgccgtaagggtcgtcttcccgtggtccacgtgaccgatcgtgccgacgttcacgtgcggtttcgttcgctcgaaaacttccttagccatctaacaagttcctccactcgcttgccgcgaccggttgccttccgacccgagcccgtgggctgccgcgcgaaacttccccgttcaacagaatagaaaccttaccgctcgactctccatcatcagtccgtcgtgacacgaccgcatgccacgcgacgttcggcaagctcgtcaggcgccgctcaaagctgctgacgggagtcgaacccgtgacctcgtccttaccaaggacgcactctaccaactgagctacagcagcatgacgcgacagcgagccgcgttgctgcgcgtgcgcacagccggcgcgcggcccgccatggacattgatcgggatacgctgcgagaagccacgatggtggcttaccgaccgcgcatcgaatatcgcacttccgcccgcgggcttaggtcgtgccggcgcgttatcagcgcccggagcccagcgagtataggcccgacaccgagcctgtcaaacgcaaaagtcgcggaaatgcaggaccggtcaatcacccacgtgcggccttccaacacctgccacagcccgcaagaacggcactgccggcatcgacgtcggcagtcagacaccgaaagactggtagtgttacagtgttgaaatataagcaaaaacgcaagatcatggcgccccaatcgcttgccgcgcaagccgtcgtgaacgctcgcactcgaaccttgtcggtccaacccgagccggataggctctcatggccaacgcgcaaggccctgcaaaatggctgctaaacggctggggctgacgcgaccggagcaaacccacaagtggagcggcgacccctgggcgacagtggcctgagcgtgtccgtcatcgggctgggtacctgggcgatgggtgggctggaagaagtgtggggacaggtcgatgaccgtgagtcgatcgccactattcatcaggccttggactgcggaatcaacctcatcgacacggccccgatctacgggcgcggccacagcgaggagatcgtcggaaaggccatgcgtggccgccgggctgaggtcgtcgttgcgaccaaatgcggcctcaagttcccggcccgtcctgacgagctccctccgcggtccctggctcccgtcgatattgcttcggagtgcgaagacagcctgcggcgtctccgtaccgacctcatcgatctctaccaataccactggcccgacccggccacgccccttcgcgacacgatggccaccctcgtgtccctccgtgatcaaggcaagatccgcgcgatcgggctgtcgaacttcagttgcgagcagctcgccacggcacgcgaattcgggcccgttcatgccgtccaggcgccctattcaatgctatcccgaagagcggcggaggagatcctcccctactgccgcgagcaccggttgggcctgctcgcctacggtgcgttgcgccgcggcctcctaaccggcaagttctccgaatcggacacctttcgggggatccgggggcgcgatgccgatttcacgggggaccggtttcgcaggaacctccgagtggtcgatgtgctgcgccgcgttgccgacagttaccaccgcacgcccggccagttggccctccagtgggcgttgtcctcttcgggagttacggctgcgctggcgggcgcaaagcgtccttcgcaggtccgggagaacgccggcgcgaccgggtggttcatcaccgccgaggatcgggcacgaatcgagcggctcctggcggatggtcacgatgaagcttgaccccacgcagccgcagcaggccggggccgtcgtcaccccctcacatacgaagccgtcgtcgtcgctccgtcccgcggcgggcagcgtcgccctcgactcgctctccgcggccagcggcgcgttcacgatgcggtcggcggccatcgcccggcccgcaaggcaaccaagcctcatcgtggcggtcgtggcgggactggtcgtcggcacagcggtcacggtcacgggccggttcgaccacgtttgccgggccacgctccacatcgcggccccgcaccagacctccgcacgggtcgacgagtggcgccgcactctggccgattacgtggcgcgcgaactcggcgggtacagcgagctcaccgcacgggcgcagtggttcatcgaacccgtcggcgagtcgaaactgcggctcgggctgatggcacccggtcgagaggtgggactacagcaagtccgtggcctggcccagggcttcatcgcgtcgctcgccgcgacggcgaagccaacggcgacgaccccgaccccagccgagaagacgttgtcgcagatcatcgagcgccaccgaaccgcagtgaccaccgcaatggtcgaagccgcgaatgccctggcgctggtgcccgacgacccggcacagggtcgccgccgtgcgttcgaacggtgggagaaactgcgggacgagttccgaagcaaacgaaagacgtcagaacaggcacgtgccgaactgcgccgcctcgagaccgagccggaccccacggtcggcatcgtcaccaacgaggaccgccgcgctgcgtggggagcggacgccgggctgcaacaggacctgagcgagctggcgctgcgcctttcggaactgaagctccaactcctcaacgtctggcagagggccgccgggccgctcgaccggctcttgaacgacgcagccgcgctgaggggcgttctcgagtcggcggcggatgacccggggctcgctgatggacaaccgcagccgaccgagcttggcgacagtatcgccgcgcacctgaaactgcttactgagttcaccggccggtggacctccgagttcaaggctctggagccgatggcaatcgatccgcatggcggggaggtgctcgaaatctaccagcgaacgcgccgccggctgagcgactatttgttccaagccgacaagcagctcgccgcgattcgcgacgccattcgggacctcggcgagttgcaggtggacgacgcccggtaccacgtcttccaatcagccttgttgcgggctttccacacgctcctggccgcccatcggcggttcgagttcgccgctggcgccatggacgcgaagaacaacttccgcctcgataccgccctgaccggtgcgctcgggctgcggaagcgtgcacgggcacagatccgcaggattgaggacgggctggaaaccgccgcccgcgcccgtgcccggacccgtcggattcacgacatcgcggaatcccgacacgccgtggaccaccttcggaccactctcgacgacaccgtcgaacaaatgctcgatcttcaggaggagctgaacatcggtgccgatgactcggctcggttcttgcttgccggggcccgcgccaagctcgccgaagaccgcctggagcgactccgcggcgacctggtcgaactcgacgcgcggctgaccgaactacaggcgattcgatcggtggccgccgaggccccgaacgtggaactcgtttcctgtgaggcgctcgaccgcccgatcaacttcgccgcgcgcgtccaggtcgcggcgctcgccgcggcgctgaccctgctcgccgtcttcctcggccagtgctgggtcgcacgcggacgctgagccttcgggggcgtcatgctccgggttggagccacgcgggccgtgtctagccgatgtagattctcgtccgctgggaccggccgttcctggccgtcaggcgatgccagcaggactccacgttcagcgagacccactgccgatcctccttgcgaaagtgccagtccttgtcattctggaaatagagctggatgccggggccctcgatgatgttaacgatctcgttgttgtggtagttgaacgcatcgtagtcggttacggaccgctggcccatctccgagtagaggtagttgagctcgagcaacatgtcgttcagttcggggtccatgtcgacgacgttcagcccgatggcgcgcgcctcgcgcggcgtaatggggtactcgtgcgccgggtattcggcattgagcgcctgagcgatccgcaccgcggcggcctgatcgggcgtgtggtagcgcagaatctccgtgcacagcttgatcgccagcgacgtggcgcggtctacggcgccgatcaccagcggatgaagatgcttgtacaactcctggaacgggttgacgtccgtcccgcgcgaatgttcctcccacagacggatgacccgcccgacctcgtcctgcccgacgtaagcggtctcgttacgcggatccaccggcccgagggcgtgctcgagcgaggtgtcgatgggggtcagaaaggccagcggtcccatgtggatctcgtccgcacccagcgcgaacatggtagccgccgacgcgcaggcgagcgggacgaggacggtcaagtgatcgacatgctcgcgaagcaggtgaatcagccgcagcgccgattgcccatcgcctccgtcggatttgacgaaaacggtcgctcgcccgacgagacggcagtgccgaacgacctcatacagggcctggacgtcctcgccgcacacggaccccgtctgtgaggtccaataggtcaggaacgtcccatccacggcggcgtcgagacgcttgacgagcctctgtgtgcggctgaacaataccggcggcatcttccgtcggcgcgagcgcgccgtggcgcggcgcggcgtccgtttgggcgacttcctttgtttcatcatgtctccgttggcacagaactacgcgtccgggggttaccgcgctacctcaacgatcaagcatcaatacacgcgccggtcggccccgtaaaccacgggctgcaccgaacttgcggcaacgccgcgggaccctaaaatctcgctttagcgatcaccgctccgatcgtagcatcttgtggccaagtgcgggagcagcctggatgtttcgacgcaaagacacgagacgtgcgacgttcgccgttgcgctgggagcgctcgccagcatggcgaccccgccaccatgctgggcgcttggccaggacgccggcgcgatcggcccgtcgacaacggcagcggagcggaccgaacctaagaggccgactcccccggtgcccgagtgggtcctcgacgcgcgactctactttgtcgaggtcgacagatacttcgacggcgatacatccaacgacccggctgagaccgcaagctgggccgcgcacattccgaccgcgacgccgcgggccgatgccgaggctgtcggcgcggccatgacgacgcccgttcgtgaggccgagcgccgcacctacggcggcgacctccagggattgtcggcgcgcctggatcatctggaagaactggcggtgaacgtgctggttctggacccggtcttcgccgggaccgggggccaccccaagaccgttgccgacccgcggcacattgacgatgccttcggcatggcaggcagccttcaggcggtaaccggcgagacggacgatccgtcgacgtggacattcaccagcaccgatcgccttttcctcgagttcgtccgcacggcgcatcgccgcgggttccgcgtcgtcctcagcggcatgttcggagacgtaggccacgccgtggccgccccggaggccgcggagcgcacactgatggccgtcacccgacggtggctggatcccaacggcgattcagacacagccgatggaatcgacgggtggttcgtcaacttcccgacggacgaaccgctcgagttctggccgaagtggcaggccatggtgaagtccgtcaatcctgccgccgccttgctctacatcgacagtagcggcgtacccagcaagaccatccgcgagagcttcgacgcatatgtcgacgtgagcgcgtcacgcgccatccggcagttcttccgtccgggccggacggaaccgacgctcgacgcgtttctggccgacctggcgagccggcaggcgaccactggggagaccgagcgcccggcccgcctgaccatgctgagcgacctaccggggccgaggttgcttaccgcgctggacgacccgggcgcaagctcggcgggcgttccatcagtcggcgacaacggtccctcggccggcgcgattgaccgatggcggcttgcaacgatcctccagcatttctactcggcggcgccgatcacctactacggcgacgaaatcgggatgttcggcgcgtgccgtccctggccccgcccacccatgtggtggcggaacccgccacccgggggcgagacagcgcgcgggtaccgcggcgacctcttcgggctggtccgctggctgcacaaccagcgcacacgctacgctccgcttacccgcggcggattcgaagcagtcctccaggatgaggagagacgcgtctttgcggtgtcgcgctcgctgccgggcgacagagtgattttggtcgtcaactatggcgacaagaagcagaagatcatgttgccggtcggtgaacccgggacgatggtggggctgctcagtccgaacatcaagccgacgccggcccgcaagcgggtacccgttggcccgccagaagccggtcgggcgaagaacggggaagtcctgtccgagcccagtgaggcatcccagggtgatgccggccgggatgcgggcccacatcgcgatgcagccgcggccggtccacaggtcatggaactgctcgactacagcgatatccgccgcatccgaatgggcggcagccggcagtacgtcaatgaggacggcaaggtcgtggtttgggtgagcccgatgtccgtccgggtggtgttggtcagcagcgacgagccctggcgccgcccgaacgagtagcgggcgatagcgcttcaatcggccggcacgcttggcgtccgcggtcgggtcaccagaatggacggctgcttgagtgcgcgggccgcggccaatcgcccgaggcgcggtcacgaccggcctgttgcgagactggacatgcgaccgcaccgcgtgacgccccgggacctgcgtggcccggccgttcgcgccgcccgcccgcctgccgccaagagagccggcgcgccgcgaactcggaatgagacgatggcccggcgcgaggcaccccgatgcgctccgcctcttcgcatcgacgggagtggatgggaatcgaacccaccaggggccgcgcgaacgacccctcaacggctttgaaggccgcgggacggattccgtaagtgacgagcctgcaagcacttacgaacacaccgttccgtttcttaccgatttgcttaccgctctcgaatcggaagcgccggatctggctgccgttgtccgacgatgggccacactcccgccggccgtgaaggcgagcatcgttacgatcacggaggccgtgcaacccgactcgggtggcgcgtgctgacgctactgacactgacacaagcccccgtcccgacgccgggaaacgggcttccgtcagtgcgcccgtcgtcgcgtgggcatgaaacacaaactggcgaacgtcgagggccgaatcgtcgcgtatgcaacctgatgcagccggatgcatcacgcgaatagcgggcttctgagcgtttcgggcgactcgatgcgtgcggaaacgtcgtgcgtccaacagccgcttcaggatcgcgaggaattgtggctggggcgtgtcggagcgcggcggtccgttgctgcggcggcgcggtggcgaacgatgacgacgaccaccggcgccgtcggatcggggcggaagccaccctggcgtcgaagctccaccccgggaatccgaatccgccccgtcctggagcgcgaaaacgcgcctgaaaccgatcggaagcgtcggggacgaagaaccggccgcggaatcgaaactggccggttatccgtgtcctgacgcagggcttctccggattgggggtggatcggatgactccgtcggccggcttcgtcccggtcgcccgaagtcgctaccgacgaacgctccgatggcacgccgatcacctcacgcgcgtggttcgcgatgacacgcaccggacgtgcgtcgttctcggcccgaaaacgaaagtggatggccaaggcgacatagctggatgcgaatttttcgagctgttcgccgaaaccccgtccttcggttttcggttagaccgttttcgcccaccatgaagtcttccggtttgtgcttcaagtaacaacgccgatccgcgtcaagccaacccgacccaaggcaccgattccgggcttccgcgcggggaatttcctcgcgtctccctggccggcgtaccggtcccatcaccacggtgcgcggcacagccgaaccgtcaaatccacccgccaaagcacgcgagcaccgacctaacgcgcgcgcgaagcgtcgatttcgatctctgttgacttccagaacccgtgttcttgggcggggaatggcgatcggaaaggccgtaatcccgaagtacgacgttgctgctgcgaaggtgtaacccaaagcggagtcgccggacacgtgccgcaccggcatctcaagaacccatcgcaccgtcccgtttgcacagccgcagaccatgtgaaatgccttgcggacgagcggtatctcggttgtccggttgattccttcccatgatccggggcgaggctcgcaggtacaatgtatccgcccggcgcggatgaagggaagcccgcgctccgagtcttctctcggcgtcggcacggcgaagaatccgccctcacggtgccgagaaggcggttttcggagacgccgcggctccgactgcccgcggggcacgcgcgcgggtggagcatctcatcgggtcggcgtcacgtatcgggcacgcggcgtacgaccaccggtgttcggagtcggtgggcattccgcacggcgggacgcacgatttcccgatccgtcccgcgggacgccgagcatcgtgaggacgcggcgccgatgaccgacctgcggcgggctcggatcggaacgatggcccgcgtcggtggcccgctccggagtcgacccagaccggcccgatcctgcccgaaaccccgccgaacgcaacctcaaacgcggccatttcgcggcggcagggaccaccgtaatcgcatccctaacgcccgataatccttgccggaacgggcgtcacggccggggaaaccacgattcggcggcatggcacctccgacccgaccccctcgctcgcgcgcacgcgtacggaacttcgatcgttggcgtgccgcataaatcagatcaggaagccacccctcgccgaaagctcgccggaccgcaggatgtcgttcggccgcgcgggacggtcgccggcgcgggatctatgcggccaacggcggaatcgtggcaatgttgaccctccaaacggcctactgccgggagttggataagttacccctcgcggtgcggaacacacaaaccgcaaaacggccggatgaggcacttaacgtcccataactcggaatcgcgagtcggcaacctgcggtccttggccggcaacgcaggttgatgtccgcggaatccgcagccgctacgagcaatcggggggctccggcgcgcgcccgcgcgcgaggtcgctaaaacacctcgcagcctgagtcgagatgcccgaccaactgttcgcgggcggcgcgttggtggatcagcggggctgctcgtcgcgacgttccgacgatcgggccgggcaccagattcggtgcgggggaatagcgcgcccgaaccctcgcgagccctcggacgctcgatacctcgttcggcgcatccggctcaaggcgcttggggcggacacgggtgtcggcgcgctccggttccgccgcgtgtgcatccggtggccgccgtgcgcgcctcgcctgcgtcggtcacgtcggccagcgtcgagtcgctgtcacgcgcagtgcggacggtaacacacgtcgggaaattcgatccgtggcgcggggcggtttgcatcgtgccaggcgatggcacgtccgcgacgctgcatccgttccggtcgggcaggaatcgggggcagcaaaacggctcggacgacgcccggctattctcgccccgaagcctccgcacgcgctgtcatacgttgcgggttcgcaaagcgcgcatccggcccaaacgcacgggcaacggccgccaacgcgcgttgatacgttcgacgcgcgcgatgataccctctcgggcgccgtgatacttcgcttcgcgccgtgacccgtggacgtcgctgatcaccgcgctacaatcggagcatcatggacgaacagcgacacgcgagcgggaacgtggaaactggcgacatcttcaagccggcgacggatacgttcatggccgccgtggaatggacgaagaaccgaaccgtcgtcgtgttccggcgcgcgcgaaacggccgagagtacgtgcgctgccggacgttcaatcgccaccgggtcaaacaagtctggtatccctcgccccgtttctacatggtgccgaccgattgcgccgaggacctgggcagggcgatcatcgccgcggcgaacggcgagccgcagccgccgcccggctggtggttcgacttcgtgaagcagtacgacgcggggaagtggcggagtaagccggatgctgagccgtccgcacccgacgtggccaacacggtgccggtggcgtaacgcggaaggccgcccgccgatgcgcagcaacaccccgctcctcgtcctggcccggtgcagccgcggcgcgggcgagaatggtagcgccgcccggtgcggtcacgctgaccgcgagatgcgctgtcggggtctgtgaacctcggctttgtcgcctacggcttcgccccaagttgggcggcaatgtcgacaagcatgctcgaactcagcctggacctgtccacgatcccggtaagtcggccggcttcgtccacgaccggaagctggtcggtcgcgaggttctccatcgcctgcaacgccgtccgcttgtccgattggaccgacagcgcgttggccgcggagatgaatccgggcagttgcgccaagggctcttcgtccgattgggccagccagcgcgccagatcgttggagtgaagcctcctcccgcgcaacattccagcgaggcgcttggcgtcgaccaacccgaagaagctgccatcctcgcgggtgaacacgaggtaacgcaaagcgcccgcttgcgtgagccgatccacgtagtcatcgatggccccggcgttgtagccgctgtagccgagccggaagctcagggcctctgagcccttctcgatcaggcgcgggatgtccccgacaccgcccttcgtcgcgacttcaatcgtttcgaccggcaaggccgacagatcggccacttgggcgctgacacccgactccgctgccttgacgaacgccgcctcgatggagaattcggcgagttcgagctttccgatcttgccggtaaggaacagcagcagcccgaccggcaccagagccgcaacgatgtccgcgccgcggaggtcgaacttcgcaccgagcctggcccgtatcgcgataaggatggcgagcaccagcgcaaaaaggccgatggcggccacgacggagtccatgtcgttcacctcgcaaggtcgcccgaggttggttctcttcgccccgccgctcggtccctgcgtattagccccgcaagtcgacgtgttcactaacgggaaacggcgagagaccgtggccggcgattccagcgataaagtgggaccggatgcgggctcggcggcaagcccttgtcgcctaaaaaggtgatgcccgagcagcggaatggtggtatcgtgcatcgaatccaaccgggtcgcccactggcgcgtgccttgccgacagggtcggtgcggcatcacgccgcgacttggatcctcgcagccgatgttacgtgagcaaccccccgtcatcacggggaaaagggagagggaactgcgtttacctcgttggggcgggaacacaaacgtgtcacggaccggtttgacggacgaccacagcggcgggcactccgcaggtcaacaccggcctaccgtgcggcgcccgcggcgaccgacccatttgttcacgtgcggataccgacgcagtaacgggggccgtggaacgccatgcatgccccgcccgacgcctcatgcacgtcgtgcagggggtgccaagggggcttggcacgcctcgggcattcgtgcgtacgaccaagaacgatcggcacccctggccggtcgccgcgcgagtgcgcgccacgcctcggcaggcgtgttgcgtgcgatccctcgcagaagcctccagtggttctgtgccgtcacgcggcatccgagccggcggccgaggcaaccgccgaccgtgtcatcgacgaaccgatccgtcggatcgttcgatacaacggtgccatccggcacgatgacgaacgagtcaaggagcgcggccaatgaaacttcttaaggtcctgttcactatcgccacagcacctccgctcctcgcagccgattaccttgtggagctcccaatcgacggaataccgaaaagcgcgctgcattttcatccgaccggcaaggccgcgtacttcgccgacgaggaggaaaacatgcccattcatgccaactacttccctcggcagtgtactgatcacgacgactgcgactgcgcggaagccggcctagcgcacctcctgattgccgcttgccgaaacgggtccgagcctgcccttgccagagtcggcctaacatggcaacatgtcgtgaaggaactctggtccgacaccacgctttacgattcgcccacgccctggcatcgcgtgcccttcgatgatcccaacgacggcttctttctttggtatcccgactgcgcctgctgcgacgccacaaatgttcggtggaacggatcgcccggccagacaaggcggcttgaaggtctaacagccccgttccttaaccgagcaggcggactcacggccgttgaggctgtaaggctttataaattggtcgaacgcgcgccactcgatcacgtcggaccccgcgaccaagatagagttagcaagccgctgatatgcgctcgcatcgcgtatgcgcactttgacaaggctagggaaaacaactacatgaaagtccactacacggttgagggcgatcacgtctttgtcgtctacattcacgagcagttgttcaacggcgggaccgcgtgcgcatacatccgcactcgctactactcccggacagcgcgcgttttccgtgtcatggccgggattgactatctgtttccgacctatgacgccgacggcacgttcaagggcctactacaattaggctcactcttgtacgatgacgaggtcacgacgccagccacggccatgcgcgaatcgctcgccggcaaccgtacgatagcagagaaacagcgccgctagtggcgctcgacacagtccgatcaggagagcgagtgttagcaagcggcgcaacgaagctttgggtagcaggacttgtggttgtttacgtctacgctggcggcgcgccgctatggcacgcaaggaaggagttcgaaaagaagcggacggaaaggaaccttcgaagagtcgcatttcttggcgccttcggactattcctgggctacgatgttgttctgtggctccttgttgccgatgccggcactgagcgagacattagaccgtgcatccacatcgcaagctgtgacgtcattgcggcgggcatagcggcgtttgccgcatggtgcaccacgcggagcaccatcgctctcgatggggtattagtacgcaactggtggtcgcgtggcgccgtcggcgcgttctgtatgtattgcgttctgataggcgtgtattgggcattacttgtgcgtgcagacgcggtatgtcctatttgggaatgggcgcgcgatgcatggtcggctgaagacagcccgcttggagctttgtatgagtgcttccgggacgattgccgtcctcgtgtgcggctgtattgggcgttttggacgtggctcctgtacggactttgtctcatcgttggtctggttctttacgctggtagcgcgagggcggagacgtatgcagcttggcttttggtggcctactccggctacgttgggcttgggcccaacggcgggtttccttggtatttccgtgtcctgctaattctgccggcttggcttgcgtttcttgtattacgaagactgtggagtgggacgatgcgaggtgtgagccggcctcggtagcggccgtttcgcaaggcatgacgacgttccacgagtttgaaagcgacacccgaggctgtttggtttccaggtgaatctatgggcggcttggaaaggagtgcgttcatgtatgagcgcatgacggcgacagccgttgcgatcgtgatggtgggctgcgcgtccacgatgccgatccagccggcgcgtggccagtccaacaccgagcctgagtccgtgacccgagcgggcgccggggcggccggcctgtggcagcttcggtcggagcatctaatctggggtatgcctcggcaaacggacaaccggcacaacgtccgattcccgggcgagacggacccgcggcccgacatctcggtgctcgtgcgcgagggcttcgtcatcgggcattacgacctgtacagggtccccgcgtgggtcgccgttcgatggtcacgagaggaccacgacagcatgattgacggcagctacagtcgcgacttcggtccggacccggagctgccccggtacgcgcaggccggaacgagctacgaccatgccacgtcgcggatggagcggggccacatggcccgccacgccgacaacgaggcctggggcgaggacaactccgacatgggctgcctgatgagcaacatcgtcccgcagcacaaggatatgaacggggaggcgtggaacgaccttgaaatcctgcaccagggcgtcgtggccgatgcatcgatcggcatcagcacagtctgggtcatcagcgggccgatcttcgaggacaccaacaatgacggcgtcgagaatctggctgggcaggtcggcaacggcgttggcgttccccattcgacgtacaaggtcatcggctggttcgatggcaacggcgagttcaacgcccgcgggtacgtcgttcggcaggaggaccgcgtcaggaacaacccggcccactaccttacgccgatcgacgagattgagacgaatacgggcctggacttctttcccgagctgccgacggctcgggccgcccagatcgaggcgccgcaccacacgacgctgtggggctctgccaccggaaccgggccaggaacaggtggcggcgatggtgggcaggttcgtatctcagcgctgcttcccaacccgtccggcgacgaggcccagaacgaggccgtgacgaactgcaatcacggaacggcggccgtgctcctgaccggctggaagctccgcgacgccgcgggccgaacgtgggtgctgttcggcacgctacaagccggcgacgagcggacctttacgcgggacggccagccgatggcgctcaacaacaacggggacaccgtcgagcttctcgatgcgaccggcaaccctgtcgataccgtgcggtacacgttgacccgagacggcgagtggctggatgccgcggacttgcggtgatgcggcggtggcggtagtgccgcattttcactgcggattgttcgattgtgtccgagttgcatcgcactaagtggacgactgacgcatcctggtagaattcctgcacaactagcagatgtagtagcagatatgcacgccatgagatactgcttcgaactgaacggtcgtacaatctgcctccccctcccagtcgcgcacgatcgctggtggtggccctgggtactggagcctcagcccgacccaaggatcatcgacaatcgcttgaagcctgccgtggcgaagggccttgccattcttggcgccatcgatcggttgacaagggagatgagcccgaaactcaggagcctgctccaccgcgggctcaaggacgcgaccgaagagctccagcttcccgaagaggtgaccctccacctacagcggatcgggagatgctgcggtgattcccgcgggacgctcatcgggcgcctcggcagcgaaccactcctgtcgggcggacgccttggtcttactctcgtcgctcggcctcgcgcacggctcggcgcgtgcagttctgccgcccggttgcgtcatgggccgactgggtcggaggacgttgctgggtacgaccagaggcctgcgcagaacgctcgcggtcgggccacaacgttccaagtgaaccgcaggattccacagagtccgggccgctggccagtagggccacgggaatctgggctgccttggaatctgcggcgtgggccgagacgggccggcgcatctccgggtggcggcgggtcgccccacggcgaggataagcgaaccgagagcggtcccactccccgccacgtcaatcccgacggtcgagggggttgcgatcccgcgccgtgcccggcgggactcgtacgaccgtccggatcggaacctaccaaacgaacggggtagcgggtaggacgggaggggccacagttggaggatcgcgtacgtgagtccgaaggcgggttcgacggggtaaacagcagccattgccgcctcatggcgtcaacgcggttggcccagcgagcgggcggccctcggccggtgccgaagcgcaaggtggtgaacggctcgcgtgtcatggtcggcgcccgggtactcaagcgggcgcggaggaacgtcatgccaaggtcgcggaagggtcagatgccggttgtcggagtcatcatgctgatcggtacgggcatgttctgcggctcggccagttgggcgcagcaggaaccgaagagaatcgagatttcgaagggtatccagctgaccctgatggaagggtgggcagaggtgccgtcgcggtacacgaacgctgtcgaactcgtgacgcctcccgaggcggcaaagacgggagcgccggcggccaagatcgtcatcacgacagagcgacgaacggattacaacgaggccctgcgccggattgccgaaatcgctcgcgagtacaagggcaagctcgaattcctggcgatcggcggctggcctgcgttgcagcgccattacgcggcgcctttgccccagcggggccaaaatcgcaacgttggcgacaaagacgtctcgctccgggtcacgacggcgattgcctacctggacctgctgcttcgaatcgagtgcaccctcgcactcgatgcgaagcctgagttggcggaccaagcggcgacgatgagtcgtaccgtcaccttttcgacccaggctgatcccgagcaagtgaagaaggagcttaaggccctttccgcggtgcacaaggaaaacgatgcagggggacccggcggtcccggcgatccgcccgacccgatgccgcccggtgacgaccaagatgggcccgcgccaagcgcggcggccggcacccctgtcagtgtacgggcaggggtcggtgaactcgaaatcgcggtctccaacaacggacagaacttggtcgtcggtacgaacgcgggttatgccttttcgaacaatgggggctcaacgttcaccgccgtggcgggagggacgcccgctccgttcccacgcgacggcgatccctcgctcgcgttcggggtaagtggcgcgttctactatggattcatcggctttccgaacggcacccccgccgccggcggcgtaaccgggtgctcgacgggtatcagcgtctcagtcgacaacggcgcgaccttcgtgtttcggaaccatgcggtgctttgccctcagagcgggaccggcatctgtttccccgatcaggaacacattgccgctgatcccgtcaacgctgcccctgccggcggcgatcaagtttattcggtctggcggaacttcacaccggcaggcatggcaaccagttgcaacagcatcagttccggattcgtgactccctcgctcgtctgttcacaggacggaggaaacaattggactgcgccgcttgcactcggcgcgggcgatttcccgcgaattacgaccgcaccaaacggcaacatctacgtcgtgtaccgggtcggcgggaatctaatgctcgatcggtacacggcctgttctgccgggcttgctcggccagtaggattcccgagagtcgtcgcggccgtgaaccgcgtcgcctgtcccgttgccgggttggaccgctgcaacaacgggaatgacttatccagtcataccgttgccctggacgacaccaacccgaaccacgtgtacgtcgcgtacgccatcaacacggcgccgaacaacgagaacattcaggtccgagactcgatcgacggtggcacgacgtggccggcagggcaggccgtcacgctcaattcgcccgtgaacgctcgccgattcatgccgtgggtctgcacggagaatggctcggcctacgtgtcatggtatgatcgccgcgcggcgacggtctcgaacaacgatcttacggacttctacgtgggaggcgtgtcggtacaggcaggcagtctggtcgcacatccggagcggaacctctcagtcaatgccgacccacattgcgccagcgggtggccatgcggcactcgggcggtcggagactcggagcagtgctcggtgcagcctcagttggccggtcgctgccgtacgtccaccgggggcgggtccaacaccgcctgcgacttcagcacaacagtctgcccggtcggcgagacatgtcaaaccggtagcggatgcccaaagtacggagactacaatgggattgggtgcgccgatggccgcgtgttcaccgcatgggcgtccgcaacggcgccgcccgggctgccagtcgccgccggcctcaccacctacggtgaggtcgtgggcttggcggatttctatgtacgagattggaccgacgaccttgtaagcggcgatgacggggcggagccatcgactcatagcgtgttctacaaaacgagcgacgtgtggaaccgccgcggatcgttgcccggctcctttacagtcgacgaccagccgccgaatgaggacgccggcaatggggttggtaatatcggcgacaactgggctttcgcgcgaattcggcgtaacgcatcacctgtcaccggctccagccaggtggtcgctcatttcctggtctccaaactaggcactgggagcaactacgttgacgccggtgtcgtcgatcccgatgtgaccttcatcggccccgacccgaccgtcgtgttcaacgccggggatcttggccccgcgatcacttctgcgtaccgctggcatctcaacgcggtaacctccacgcatctgtgccttgcagtggagatatcggcggttggcgatccgtttgtcgcaccgagtcttgtcggggcagcgcccgggtggccaacgacagatctccgggtcatcaacgacaacaacaaagcgcagcgaaacatgggcctctcgaaaactcccgctcgcggtgaaggaggaagtccgggctggtcggctttctatgcaatcgcccacaacgcggccacgtacacccgggacatggagctgcggtatcgagccacgcaggggtttcgggaggctcacatccgcatcgtcggcgagcgcgatattcccctcaggccagccggaaccgttgtgctggagcgcatgctccctggcgaaaaccggtgggtcgggctcgccttcgaggcgcccaacggcgaagtaggcacggattccgcagtcgatttctttgaagtcgtagacgacgagccgataaacggattttcgattgtcgttcgcccttcgtccatgcgcgacgtccttgcgtccaacctggacctgcatcgcgcagttttcacgcgccttgccgcgagcttcgcctgcgacggcgacgaagagcaggccgtggccccgctggcaatgattcgaagtgaaagcacgtatcaagatgggtacagcgaattccttcggtgcgttcccgagattgctggtcgcgccatggcccggctcgttccggaccgttccgaggatcccttcggcatctgggatggcatcaagctcctgtcggaggcatccgcgaaggtgcggcccagcgagggcggagtggaggatcgacagggcctccgaactgccgcgatgttccacacggcgttactgaacaagctcgactcgttcctaacgatgattcaactccgaaacggggataccgctgacatcttgcaaatggttcggtggcagcttgacctgttcgccaagcgcttgccaaacctggattgctcgcgagacttgcagcgagattcgcaagccttcatcgaagcgttcacggtcaggcgcgccggcgtccgagagtacccgcagtacctcgggcagcaattgcggtgtctttcggaaacggcacgcctactcggttgcggtggtgagctcgagcgcagagcaggggctcttgccaaggtgctcgattccccgacgatgctacagaaagcgcaccgcgagtacttgttggcgctacaggatgcgatcgacggcagttcctgactcgaagcgctcccgaccatgcgcttagactcagcagattgcagcgccggacgttacgaaacagtgttcgatagcgcttccttcccttggcgcgtcgcccgtcgaatccgttcgtcgtcgggtgccagcagcgctgttgtcaccgcgtcgcccaagaatcctcgccacagcctgatgggtccaacgcctggacttgccggtcttggtcgggacccggcgggccgtcagggcttcggcgatggcttccagcgtcgttcgggcggcgcgcatggcccggatttcggcgatgacggcctgctcggcgtcgttggggatcagcgtcgagccgtcggcggctaggtcgaagccgtaggggacggtgccgacccgctggccgttggcccgcattacggacagggcggccgtcgtccgctcgctcacaaggtcccgctcgaactcggccaggacggccagcatccgaaagaccatcttgccggcggccgtcgtggtgtcgatccgctcggacaggctcacaaggtcggccccggcccggtggagccgatccgcgatggcgtccgtcgtgctccgggccagccgggacaggctgtagaccacgagcgccccgcccttggtccggcacgccgcgtccagggccgcacacaggcccggccggttgtcggcccggctcccggacaggcccgcgtccgaatgaaccgccacgagccgatagtcgttcacttcgcaccacgcgccgatcttgctgcgctgcgcgtccaggctcacgccgtccgccgcctgaatcgtcgtgctgacccggacgtatccgattgctttcgggttcatcgttggaaactccgaaacggcaaggggcgggcggcccgacgttagccgggaccggcccgcccgatgccgtgggttgctattcgtcgcacatttcgcccgcttcgatccgttgcaggaccgcccgcatgttgttcttgcacgtctgcacgagcttgacgtaggcttcgacgggccggccgtccaagccttcggcctgcgcgatcatccgggcgcgctccgcgaacgcctgcgccaagccttgattcgtcaaggtgattcggtggcaccggctggcgaacggcccgctgtccatatcgccgaacaagccttcctcgacgcgccgcgtcgtcgtgaaaatcacgacacaatgccgcggcaaagcttcaagaaacgtgaggaaagcatcgaccgcgccttgtgtgaccgcgtgcgcttcgttgacgatccagactcggaacggcttggacgcgcaccacgtcatcgtccgcgacgcgcgttccatatcctcgacggcccgcttgtcgcaccggccgccgtccaattcggtgatgaagaaatcgtccgcgagcgaacgcgcgatgatccaagccaaagacgtcttgccgattcccgaattgttcgcgcctgcggcttcgatccagaacgcgccgcggtcgaagtcttgacgttcgatgatccgccgcacgcgggccgcggccttatcctgtccgacgaaatcggcccacgtggccggccgatacttctgatacaacatcatgcaccgccttcctcggccgaatcgccgaagatcgtttcgatgaagtgattcccgaccgcatcggtggacagcgcttccggtcccgcgccgtcggtgtcatagtccatgacgatgacgcgcatgccggccggaaccccgccgacgtattggacgattccgccttcaatcgtgatgacgatgtcactcatacggccaccgccttccgcttgttgcgccggttccgctccgctacgcattcgtgaagatcgtcccagtaacggccaagtttcgggcaatggaacccgtcccgaatcgctcgttcttggatgtcgatgaccgaccgaagatcggcgatggtgaacgccagcgccatatccgatagcttgcgaacccgcttccgtgtcatcatgccaccgccttccgcgccgcgggcgcttccacgtcatcgatcatcgtccgggccgtatcggcgatgcgctccagactcgcccggagcgccttgctatcgccgtcccaaagcgcgatgtaccggctcgcccgcacttccacgtcaaggccgaagtgccggcagaccacgtaggcgaccgcttcggcttccaattcggcgatgctgcgcgagcgctccggcatggtcgcgagcgattccttagacttgtgcagcgcttcgtgcgccaattcatgggcgagcgttttcgcctgttggccggttccgcgcgtgtcgtcgatgtccacggcgccgcccttggacagaccgtaaaccccgcccgaaagcgggccgaaagccacgcgaatcccgcgggaatcggccacgcggcgtagatcggcgagaagcgcatcggccgcggcgtcaacgtcgggaacgtcaaggctcggtagctccgggccgtcggtctggccgatgtcgaacacgtaaaccgccttgaagaagattccctgttcgaccttgacgccgatcgtgtcgtcggccacttcgcgtttccacaggcaaggcgcgaagatcgtgattcccttcccgcccttccgcacttgccggcccaattcctgccacttgcgatagccggccacttgcgaagcttcgggccgttgcatggcgatgagtagcgaattgtgccatgaatagcggtgaaacttcgcctgaacgtcaaggtaagccttgaacgtgtcggacgcgcgaacgtcatcgacggcccgcgcgagcgcgtcgaggctatcgtcgatgcgcgcccgcaattccctagccttgcccgaaccggtttcctgccggttcccacgttcccagacttgtgttaccgtttccatcgttctagctcccttaaagctaggaccacggccgcgggcggtgacacgtcgcgcggccactttgctaatcgcaccggccaccgcggccggcgcgcacgttccgagcgaagaatcgaagcgcttgcggatgatgcgccctgttggcgcgtttcggcatgtatggtaggcttgcatcgtcaagcgctcttcactagcgtttggccgcggccgcggatgtttgcagcatcgcgcggccacttgtctatcgtcattatgaacgatactcgccccggtgtcaagcgctgacactaaaaaattctacaacgggtccgttgtagcaagaatcgcgtttgcgacggcgcgaacgcacgcgcgcatcatcgcccgcggtttgcgatgcgtttcgggcctgtttttctagcgtttcctgcacgtgccagcgcgtggcatcgcgagtagaatcgttgtccgcgcgtgccatcgaatgtcaccctccgccccgttcgcgtcgattccgccgatgtggcgcgcgtttcgcccgcgtatgggccccgttttcgccacagttttttaacccacgaccgggccgaaatggcgtctacgacgaaggtataaccccctccgccgacacgggactccaaacgcgcaacgcaatcccgaatcatccccccatccggttcgcatcgctgcgcaagactcatcccatcctccccgacgggtcccacgctttctgcaacgagcgatcgcccccaacgcggagtggctttcgcccgtccggagtgccccttctcgcacactgaacgccaagcagcgagtgcaaacgcgaatcgcttctctttatccctgtcgtgcaccgcccggagactcgccctttccgctccgatcgcatcgatcggagcgccgattcgaagctccttcggtgcacataccgactagtcgcgcgacctttcgatgcctggccggggtccggcgcgaggcttttcatcgttccagcagtgccgtgcgcattgctacgtaacgcagcccgaggaaatgaaccgacgaacgccaaacgttcagccgcgagcaccatgtcgccagcggcccgcaagggcacggcaggccgccccgcgctgcggtttgcacaaagtcccacgagtgccgcccggtggccgtagttgtgttatcggacgatcgacggcggagcgggcgggacgttcggccgcgaccgccggcccgcgggcgacaccgtcctgttgctatcgcggtccgtgcgtccgacgggaccggccgacgggccgttcgcgggctgcgggtgtggacaacgcagacggcgtggccgtagagtacggcctgattgggtcggggcagcatggcaggggcatggtccgcggcgcggcaaatgagcggagaagcaggacggccgatcaagccagaccgctttggctccgcctaggtacgcgcagcagaggcggccttctcgccgctgttcctccagcacgcaccgtcgaatcggcccgcgtacctttcgcactctcaggttccaagcgtcaacttggcagcatccgaggccaaccagccgtgcccagggcacgatcatcttcaacctcccccgctacggcgggcgtggaggcttctgccgcggcgtgccgccggcttaaccaggaacggtgacggatgaacttcaatctgctcgaagagcgctggattccggtcctgtacgccaatggccgtttcgggcgcgtcggcattcgcaaggcgctgatcaaggcgggccaagtccgccagatcgccgcgtcgaacccgatggacaatgtcgctctgctgcgctttttgctcgcgttgctctattggtgcaaagggaatccgccgaacgaggggagcgccactacggacgacgtgttccctgcgaagtggctatcgaaacttgacgccaataaggagtgcttcaaccttctcggagtggggaagaggttctatcagtgcgccaattctcgaagctcgaaggtgcctgaaaaactcactgcaaattatctaatccatgaaatccccacaggtacgaacaaatggcactttcgccactcgaccgacaaagtcgacggcttgtgtccggcgtgttgtgctatgggcttgttgcggctgccgttattttccacgtctggcggacgaggcaagccgcctggcgtgaactcgaaaccaccggtctatgtgataccagtaggtgtttcactcgcggaaactctatggttctcgtggcggccaactgcgaatttgggaacgccggcatgggaaaagccggatgctcaacttccgaaggcaggcgagatacccttactgttaggactgacatggttgccgcggcgggtgtggttggagaatccagaggaaaccaaagccgattgcgtctcatgcgggcggagtgagcgcctcattcgtagatgtgtgttttccggtatcgggagcacaaaaacggaagcggccgatccgggtcgtgactggcgcgacccacatgtcatttatgggcaaaaccggaagcgtgatgttatgcccctgcatgccagcaatgctcttggcggctcggatgcggccgcgagtcaatggtcaaagatcgtggctggtattctcggggatcaaaaaacgaatgatagaagcagtctgcgggttgtcggtttttcaacggtgcagaacgacaagtacctagaggcgatggaatacctgatgcctcgcccacatgggactcagaaggatcaagagtctatagccaagtttgagcgatggcagaagcaagccgcaggacttattccaagtcttgttcgtatcgtcaaatcgtcgaaagaaaaggcggggtcccgaaaacataaggagattgcgccaatggtcgccgccgttcgtcctcatgtggaagctaaagtctccaagaaggcaggcgaaattctcgctggtcgcgcaggggcatgggatgaggcggcggcggaatatcgcccgatgatgaagatgctcgctaagtcgctgtccccagggttcaccaccgcagcagtgcatcggcggaaccagatcgtcaacgtgttgcccgatatgcgcacaaaactggtttcggcaaaaaaatccagccggaagaagggagggacaagtgagcgcaacggagcagtacattgacgtcctgacacggctgaaaaccggcgaactcgggctgctgcgcacgcacgccggacaagggcttgatgaatcggtcgatggattcgacctattctccggtctgtggtggccgttgcggcgaaagaatgagcgggcgccgcggcgtccggttgcgtggttgatcgcaaagctctacgccgcctgtcctattgagcattcgcccgacaaaacgattgctcggcaactggcactatgccagccgaccgagaacaaggcgaaggagcgtttccaacaaaggtttgacaggatgctcgccctgccactcgaccgaatcgaaccggcgctgcaatgggcgctggatcgggtagcctcaagcaccgggaaactcgattgggtaaggctgacggatgatctttccatttgggaacgtgaaaccacccgcctcaagtgggcgaaccagtatctccaaaacgacgaaacggtagaaatatgctaatcgagattcatgcgattcagaaccacagcccggccaatttgaaccgggatgacctgggcgcgcccaagacctgctacttcggcgaagtactgcgcttgcgcatctccagccagtgcatcaaacgaagcattcgcatgagcgacgggttcaagctcctgtgcggtggcattcgtacgcgccggttgcctcaacatctcgcgaagcacatcgaagagagggatgtactctcgcttgcccaaagtgtgattcagcactgtggattactagccagcgaagaagagggcaagaaaaagaaaaaggatgtgatcgtctttctatccaaaagcgccgttccagaaatggtgaaactgctgcgcgaagcgccgcaaagtgcgagtcggagtcaggtcgaaaaactcgccgagcaatttgcaaaactgatagcgcaggaacgctgtgctcccgatatggcgctgtcaggtcgaatgctcgagcctgccaagcctccaaagaaaacgaacagaggcaaggccgttgattccagtcaatcagaggatgatgaagacgatgaagatgagaagggcaagaacaccggtgtgtggaaaggacttgactcgaaaatagaggcctcgcttcaggtagctcacgctgtttcgacacatgaagcccgtccggaagtggattactttgtggccgctgatgatatcaagggtgaggacgcaggagcggcctatgtggacgaagcaatgttcgcctcggcctgtttctacaagtatttctcggtcgattgggaacaactggtcaagaatctaaaaggctatggggacaaccacgaaaaactggccgcgcacaccgtcggcgcgttcattcgcggggcggcgacggtgaatcccacgggcaagcagaacagcttcgccgcccacaatccgcccgatggaatgctcatcgaaatcaaggacgcaccgattagctatgccaacgccttcgccaaacccgcagcccatggagatcgcgacatcatctcacagaccattgcccaattgggacaatacgtccacgaccttgacacggggtatggaaagccgcgcgagcgtttttggttttcgcccaacctacggtatccgttgagcattgtagaaaacaaacaggaaatcacgcttgcccaacacaatctcaaatcgctcgacgagttgatccccgccgtgatcaaaaccatcggttatgactggacagaggtgcaaaaagtggtcgtgaacgcggagtcgacctcgtgagcgccaacactctgtttctccgcctcgaaggcccgatgcaggcatggggcgctcacgaatcgaagttcgtcgtccgacggacagccgaagcaccgaccaaatccggagtgatcggtatgatgtgcgcggcgttgggcgtttcccgctccgaagccgccgcagaatggcttccaagactcagcgccatgcgcatgggcgtccgaatcgatgtgccgggtatccgctggtgggactatcacacagtcggcgcagggatgaagatgcgtattgcggaaggcgaggggaagaccaaacccggcgcgatgctcactcggcgcgagtacctttgcgacgccagctttcttgtcgctctgcaaggcgaaccgacactcatagccgaattggaagccgccgttaatagtcccgagtggaccctgtaccttggaagaaagtgctgcccgccgtcacggccattgttggaacatccttcgggcgctctgcccgatttgctttcggcgcttatttcgattccctggcggccaaggctgaaaggaaaccagccgccgaagtccgtggattgtttgctggattgggatgcgacgctccaacagcccgaagcgcccgccgactcgctcgtgtggtacgacgtgccgcaaacgttcgatccgccggcgcatggaccgcgattcgtcatccgcaaggaattgcgcgtgggcgcggacggcgaggtcagcatcacggtgcaacctgcgcaaagccccactccacgaccacttcgcccacgagccgactatggcaacagcgaatacaaaaaacgccgcctgcaacggctcgaccacgaccatcatctgtgcgtcttctgcaaatcgccgggcacgaccgttcagcatgtcacctatcgccacgccggtggggacgaacgcctcgacgagttgcgctcgctctgccgcctctgccacgacgcggtgacgatgatcgaatacggactgggcatggagcgggaccgaatcaatcctgaagacgagcgatggcgcgaccggatcatcactaagcgtgacgagatcatccgttttcgttcgctggaaactcgacggcgacacctgagcctcgaggaggtcgaatagccatgtatctgacgttccttctgatcgacgttggaaacaatcccgaccggccgcgtccgggccgcttgtggttgcgcaaccgataccgtgtccatcagcgtttgtgcatggcattcccttccgatccacgtcggtgcgacgatccggactttctcaagccctacgccccggacgactttgcgcagaaacaggttcacgtgactcgccggacggattccggctttctctttcgcgttgacccgcaaccgagtgggcgggtcgtgattctcgttcaatcagccaccgagccggactggggctacgcctttcacaacgcaggacacctgctcgcggcgccgccggagacgaaaacggtcgagccgcgatttgagcctgggcagcacttgcgtttccgcctgctggccaatccaaccaagcgactccgcaaggattcctctgactcgcccggtcagccggttgatgagaagtgggtcggcaagcgcgtcgccgtgaaatcggatggtcttgagaattggcttacccgtcgcgcgcaacgggccgggttccacgtgaggcaattgtccggcattcaccccggttgcgtttatgtcaacaagggcgagcctctgcggtatcgctccgcgctatacgaaggaattctcgagattaccgatcctggacccttcgggaacacgtttatccacggcatcggccccgccaaggccttcggcttcggcctgctctcgctggccccggtccggtaagcgacacccgccgcgggccacgccgcgccgtcctcacgccggacgcgccgtgggccgatctttgacaagtgcataggcgcatcgcgggcagccaccctccgccacgctgccccggggcaaaaggatcacgctgtggacgatctccgtcagcttccgcggtttggcgacagcctcacctacctctacctcgagcatgcccgcatcgagcagcatgagaaggccgtcgccgcccatgacgcatcgggcctcacgcccgtgccggccgcgtccctggccctgctcatgctcgggccgggtacggccatcacccacgcggccgtcaaggccctggccgacaacaactgcaccgtggcctgggtcggcgaggagggcctgcggttctacgccgcaggcacgggcggcacgcggggcagcgccgggctgctccggcaggcccgcctggtcagccacccgcgtctcaggctcgccgtcgtcatgcggatgtatgtgaagcgattccccggcggactcgatccgggtctgacgctgcaacaaatccgcggcttggagggcatccgcgtgcgcgaagcatatgcgaaagccagcaaggcggcgggcgtcccctggaccggacgcaactacaaacgcggcgactggaacgcggccgaccccgtgaaccgagcgctgtccaccggcaacgcatgcctatacggcttggttcaggcggcgctgctttcggccggctattccccggccctggggttcatccacaccgggaagcaactctcgttcgtgtacgacatcgccgacctctacaaggccgatctggtcgtgcctgcggccttcgaggtcgcggcggccatgagttcgggcgtggaacgccagatgcggatcgcgtgccggcggcggttccgcgacgggcggctcatgcagcgaatcctgccggatatcgccgacctgttcgacctgtcgggcctcccggagctcgtggacgatccggcatgggacgaggagtcgtcctcgcccggagcgctttgggatcccgaggcgggcgggccggcggacgggcgtgctgagggaggggtcaactatggtcctgatcctggttgagcgtgtggccccgtcgctccgcggcgagctgacccgctggctgatccagccgcggaccggcgtgttcgtcggcacggtatcggccctcgtccgcgacaagttatgggaccgggtcgtccacgcggtccaggccgccaagccccgagccggcgggaagcaacgcggggccatgatgatctataccacgaataccgagcagggattcgcgatccgtgtgttcggcgagaccgatcggagcatcgaagacttcgagggcctgttgcttgcaaaaagcccgctcaaggcgtagaaacgtagcgctgtccccacgcacgtgggggtgaaccgccgctgctgtcgagaggggcggaggtgtttccgctgtccccacgcacgtgggggtgaaccgatgtcgctcctcaccgggctgtcgtcggcgagcgctgtccccacgcacgtgggggtgaaccgcttgacgactattcatcgacctgtcaagcgatcgctgtccccacgcacgtgggggtgaaccgcggacgatcagaaccgcgacaggtatggagcgctgtccccacgcacgtgggggtgaaccgcgtggtctcgccaccctcgactcctcgatcccgctgtccccacgcacgtgggggtgaaccaggtggcgatcgccctgcacaaccaggaggtctcgctgtccccacgcacgtgggggtgaaccggctaacgtagagcaaatggcgcttgagttcatcgctgtccccacgcacgtgggggtgaaccgcactctctgagggtgccgtccacgacgcaaacgctgtccccacgcacgtgggggtgaaccggcgggatgtctctccgctacaccccgaagggcgctgtccccacgcacgtgggggtgaaccgggcaacccaggcaagccgatgggtgctgtccacgctgtccccacgcacgtgggggtgaaccagccgtgccgctggtccgctaagcggaaggcgcacgctgtccccacgcacgtgggggtgaaccgctgatggactcgccggctaccgggtcgtagcagctgtccccacgcacgtgggggtgaaccgagccgatgggcatgacgggggtgactgatgtcgctgtccccacgcacgtgggggtgaaccggagctatctgcccttcgcgatgtatcgcaagagctgtccccacgcacgtgggggtgaaccgtcgatttgggatcagctgacgtcggcgctgaccgctgtccccacgcacgtgggggtgaaccgttctcatcgaagagaccgacggcatccgggacgctgtccccacgcacgtgggggtgaaccgacgggattcccgccatgatgcaggcggcaggcgctgtccccacgcacgtgggggtgaaccgattttcggcgaccgaccgccgatcgcctctaaccgctgtccccacgcacgtgggggtgaaccgggagaacggactatgaagacttacactgttggggctgtccccacgcacgtgggggtgaaccgtacgccgatgacaccacaccagttgacaacgtccgctgtccccacgcacgtgggggtgaaccggcgccacgatcaccgtgggtacgtcggtaagcagctgtccccacgcacgtgggggtgaaccgtgagcatcagacgcccgacgcggcggggaaggagctgtccccacgcacgtgggggtgaaccgcggtcagcttcaatccacgacctccaggaagttgctgtccccacgcacgtgggggtgaaccgccgaggccaacgatccggtggagctgcggcggcgctgtccccacgcacgtgggggtgaaccgtcgggcagagaccggccgcaagttttcgctgcgctgtccccacgcacgtgggggtgaaccgcttatgtacgcggaccggtccgccaaccacccgctgtccccacgcacgtgggggtgaaccgcgatggatcgggcaggccgcaccgcacgcaccgctgtccccacgcacgtgggggtgaaccggcgccgcgtgatccgccagcgaagcatcgtacgctgtccccacgcacgtgggggtgaaccgacgaagagaccgcacgtcggcaacgtggggagctgtccccacgcacgtgggggtgaaccggatgcctggatgaactttcgggactggacgcgctgtccccacgcacgtgggggtgaaccggacgagcggcgagcgctcatcgctggctaccgagctgtccccacgcacgtgggggtgaaccggtcgcacggagatctcgccgtcaagctgcgcgctgtccccacgcacgtgggggtgaaccgcagccgttgaccgaggcggtgggcgcggcgctcgctgtccccacgcacgtgggggtgaaccgtttcgatcgctctccgtgctcaaccgtccatacgctgtccccacgcacgtgggggtgaaccggactcctcgtcgaagatgcacccgtgccgatcgctgtccccacgcacgtgggggtgaaccgctcaaggccgtggcgcagagagatcggcccggcgctgtccccacgcacgtgggggtgaaccggcgagttggctcgtcagccgttccggctccaccgctgtccccacgcacgtgggggtgaaccgtcgaagtcggcgagtccggcgagcgattgaagcgttgtccccacgcacgtgggggtgaaccgcaggcgaagtatgtgtggatggtccaggaggtgttgtccccacgcacgtgggggtgaaccgcgtaggggctgtggctgggcggggccaggtacgttgtccccacgcacgtgggggtgaaccgtccaccgctgtcgtgtcaacgacgatcgaggcgttgtccccacgcacgtgggggtgaaccgttaaactcttgttccgagccgctggagctaaccgttgtccccacgcacgtgggggtgaaccgcgttacgtcgagagagggtaagcgtgtgctgagttgtccccacgcacgtgggggtgaaccgtcggcaaggtctcggcgaagatcgtgctcaacgttgtccccacgcacgtgggggtgaaccgccgggttgcagactccgggttcgcacgcacaggcgttgtccccacgcacgtgggggtgaaccggcgatcgtcgcgacgacaacggggggggaagggttgtccccacgcacgtgggggtgaaccggcacggagggacgatccggaagggacgaagggacgttgtccccacgcacgtgggggtgaaccggcggtcagcgagggacaggagctgctgcgtacgttgtccccacgcacgtgggggtgaaccggattccatgcctacctgccgatggccgaataccgttgtccccacgcacgtgggggtgaaccggcggctcggctactctatgtgtcacgggaatcgttgtccccacgcacgtgggggtgaaccgaccgcggctcggggcggagtcgaaaatcttccgttgtccccacgcacgtgggggtgaaccggctatctcgacgaacctcgcaattgcttcggcgttgtccccacgcacgtgggggtgaaccgcgctagaccctgaacaagcgtgattttcgcgcttcgtgcaaaaaaaagctcgaaatgcctcgattctcgcgtaaaacgtgtggtgtcaagaacatggcacgcttacgcaaggaggcatttcgagtgaac

SEQ ID NO: 514 - DNA, 120848 bp, Artificial Sequence
  Synthetic Oligonucleotide
ctatttggtgaaaagcatcatgcgcaaaagaaaaagttttgcgcatggcacacttggtagtgggtagaatcatctaataacatgtataaaccgtttccatgtcgagccagttcggcccggctttgacgtctgccggaagttcgacggatagagcgccccaatcgcggcccgctgcttccattgctctgcgggttttctccgccgtgtccgccactttttcggcaggcgtttcaagcacgatttcgtcatgaacctgaaggagcattttagcgtccatctcgcccgcgagtatcatcttgtgaacgtcgatcatggcgagtttcataatgtccgccgcagagccttgaatgcgggtgttgaaagccgcgcgcaatcccgcttcgcgctcctgccggttggaagacctcagttccggcacgcggcggcggcgtccgaacagcgtctctgcgaaaccgtcttcgaggagtttttcgtttgttttctctatgaagtcgcgaacgccggggaaccgcgagaaataagtttctatgaagtcggcggcctgctgccgggagatgccaagctcctgtgaaagcctgaactcgcgcatcccgtatatgaggccgaagttgattgtcttcgcgtatctgcgctggtcctgcgtcacttccgagacggggactccgaacacctgagcggcgacggacgcgtgaatgtcttcccggttgcggaacgcttcgagcagggaagggtcgccggacatctcggcgaggagccgtatctcgatctgggagtagtcggcggagacaagggcgaggcctttggagccggggatgaacgcgcgcctgatctcgcgcccatcctcggagcgcaccgggatgttctgcatgttagggttgctgcttgacaatctgcctgacgcggccagcgtctggttgaagctcgtgtggactctgcccgtgcgcgggtttatcagcgcgggcagagcgtctatgtatgtgccgcgaagcttgctcgcctgccggaactttattatcagcgggaccgccgggtggtcgcatttaagctgttcgaggacggctatgtcggtggattctttcttgacttttctgaggccgagttttacgaacagcaactcggccacctgtttcggggaattcaggttgacatccgccccggcaagctccgccaccgccgcgctcagcgcccgctctcttgcggcgaagtcttcggacatccccgcgagcgcggacgcgtccagagccactccgttccactccatctcggccaataccgggataaggggcatctcgattttcctgaacacgcggtcgaggccgtctgcggccagccgcctcgaaagctccggctcgatcctcaacgcggcgtccacgtcagcgcaggcgtaatccaccgcgtcccttatcttgacctcagagaatttcttctgagattttcccttgccgaccatatcctcgtatgttttcaggcccgctcccagcaggttcgccgcgaccgttttcagcccgtatctgcggccgtccgggtctataaggtaagcggcgatgaatgagtcgtaagcgatgttggcaagagacacgccagccgcgcgaagcatctgcgcgtcgaatttgaggttgtggccgattttttctatgtcagggttttccagatacggtttcaacaaagcgattgcgcggtccgggtctatctgtttttcagcgtccgggtcggagtcgtcttcatcgtccgagccgtcgccgccgccgaaaaggtcgccgccgccgcgtttcacggtggagccgtgtcgaatggggatgtagatggcgtcgccggcctcggaagccagagcgatgcccactatggggtcggcgaaggtgtccagcccgtcggtttcgaggtctacgcaaagcctgccgcgcgaggcggcgcgctcaagcgcttcgatgacttcggcttcgtcgaagacagccttataaaccgagtcgaactgaacggcggcggggcggggcggggcggccgcctcctctttcattccaagctccgatatgaaacttctcatttcatatttctcgaagaacgccgcaagcttttcgttgtcgaccgccgggagtttgtacgcgccgatttcaaatgggagcggcgcgtgtttctctatcgtgccgagccttctgctcagttccgcaagttccctgttagccgccagtttttcccgcagccctttcttgtcaatctgttcaagagagtcgaacacggcgtccatatctccgaattgttcgagcagagacaccgctgttttggggccgacgcccggcactccggggatgttgtccgaactgtcgccttcaagccctttgaggtcgggtatgcgttccggataaacgcccattttttctttaaccgcctcgcggtcgaacttctcaagctctgaggagcctttcagcgacatcagcactgatacgctgtcgttcaccaactggaacatatctctatcgcctgtaagaatatcgacctcaaggccgtgttccgcgcccgcccgcgccagagtgccgatcacatcgtccgcctcgtacccgtcgagcttggccggagttataccgaaagcggagataagctcgttgatggccggaatctgttcccgcaactcgtccggcattctgtccctgtgagctttgtaggcggcatattcggcatgcctgaaagtgggtgtctcggactccatcgccaccaccagatagtcgggcttattatctttaaaaatcttcagcagcgcgcgcgccatgccgaacaccgccccggtgggaattccctccgccgtcttcatcttgggcatggtgtgatagaacctgtatataaggccgaacgtgtcaatcaacaacaatttgtctttggtcataatcccggcgtctccccgcgaggcgcggctgcccgccgcccgcgttgaatattatagcgcaggcgcgccgctcacgcgcgcggaagcggcatgagcgaaagattcttgcggggaagaaaaagggaaaacttttgaaacgtttcgtcacgagtatgcatagaagaagccgctaacgattataggctttattataaagcttatttatttcacagacagcttgattgtttttacagaaaccattactgtcagaaggcgggtcattaataactgtcgggttgcgcgcctcatttgtcagcataaagcgcgcgaccgacccatttccgcatgagtcgtttcgtatgacataaattaattcatgtcccaaatcgctctccaaaacgccaaagcggccatcgctgtcgcctgaatcagtcttttcacaccgtgacagtcacaacggtgtaaacgctattgaaaccagtgtgaatcccgttaaaacacgttaaaaaacctgttaaaaccgcgtttgtaaaaacaaacgaaaaacgccccttttgcggcccttttcggggttaaaaaacgactgaaaaccatgccggaaacgccccgtttcaagcgcgtttgacaagaattaatttatgtcaatttgaatgaaacgacaccgcagaacgcctcccgcgctgccgcgcaaatgctcaaatatgcctttatataatgatgtttatgattgcgttcgaacttcagataatgcgtattatccgcagttacgccctgccgcgcccgtcaacaaccttttgtttatcgcgcttttttcgcaccgccttttccgttcggaccgtattatctgaagtcttttccgcgtttacttgaaacatcccgctgcatagggtcctccaaagacatcgagaggaacgtaaaaaatacattttttgtcgaaaatgaaacgctatgggcaattcgggccgctttggaaatgcaaagagctttcgaagaattaaaacgcgactggccgccggagttgaaaaaactgggaatcggcatagggataaactacggcgaggcggttgtcggaaacataggaactgaagaaacaatggattacacgatcataggcgacgtcgtgaacaccgcacagagggtagagtcaatagcgcgcgccggacaaatcctaatcacaaagaatgctttgctgcgggttgaaggaaaaataacgttacgcgcattagcgccggttcaactcaaaggaaagtcgtttcctgttgaaatatttgaggttgcaaatatcggacagtaggatcaactaatcaatacaacattcgactctcgctagccaatatggttacaacaacaagccataagagttaatcaagaatgcttttccgccgatatcattggcttctgatatttcagataatttatgcatagagaataacaaaaggcgaagggatatgtatcgccgacaattatgaaagatttcatgaaaatgtttatcatcaatatctttaagagtcgacgtgcttatcttttgtttagtttaattctgatcggtatagtaattgcgggatgcggaggaaccggaaaatggaacccgccgcctgtaacagacaccgccgcgcccgctgtgactgccgttgttccattaaacaacgcctccggcgtggcaatcaatacgaaagtaatcaccgccgccttcagcgaggcgatggatcccgccacaatcaccacggcaacatttaccctgatgcagggagtaacggaaattccgggttctgtggcgtacgtcgatgtaacagcgacttttacgcctgacagcgctctcgatgaattgaccacttacaccgccacgatcaaaacaggccccgccggagccaaggatgtggccggcaatgagttggtcggcaactaaaggatttcttatattgcccgatgcgggcaacagggagtcagaagtttagaaacatcgtctatgtgtctttgataaagtgaaatgtttgcaatacacaaaacatggaagaatattatgaaacattctattagaagaataatcaattccgttcacaggggcagccgcaaggccgggcgctgcggcgccgtcaaagccctcattttcatagcgatgtttgccgtggtcgctcagttcgcatccgtggttgcgtcggcgtctgattacacgtgggaatttacaaccgcggatataacgccgcctgttcagagcgcttgggatcctgcgaaagattcgacgcttgcaacccactcgccgacgattacgttcaacacgaatgagaacgctgattgcaaatggtcgcttgccgatcaggcatacggagacatggccgacgactgcgacggcgacggcacaatgagccagagctgcgcaacgtcgggtctcgcatcgggcgctgtaactgtctatattgcctgccgcgacacatcgctcaacgcggacgacatcgcaacgaatacgcatgtgaattatcttatcaacatagcgccggtcgccgatgcgggggcggatcaaacgctcattctgccgtgcgttcccgccgcggtcgctctcgacggaagcgccagcgcggatgcggatggcaaccccctcacttacgagtggacgcagtccggcggcccggcggttgcattgtcgagcggcacagtgcagacgcctacattcactccgacttccactggaatatacgctttcgacctgatagttaatgacggaataataaacagcgccaccgacacggttacgattgccatgcaactcactccgggcgcagttccgcttggttcgacctgcgctttcggagtcatggcagccgccaccatcaccaacaccggcgcaaccactatagatggaaatgtttcattgagtccgggcgcatcaataaccggaagtccgacagtgaccggcacgacgcacattaacgatgcggtgtcagttctagcaaaacaagacttattggacgcgtataacttcgctataggtatgacgccagacgcagacgttggaactgcggatttgggcgcgctgacacttccaccgggcgtctatagctccgccagcacaatgaacataagcacagaccttgttctcgacggcgggggcgacccgaatgccgtctgggtattcttgatcggctcctcgctgactgcaaacgctggaaatgtttcggtgaccaacagcgcgcaggccgggaacgtgttttgggttgcctccgcatccgcgactattggagccggcgctaacttcactggaaacatactggccggcgtaagcgtcacttgtgtttccggctccagaatagacggcagagtattggccggagcgacgagcgacaccggcgcggttactttggacacaaacactatcatcgttcctctcccgtaggctgatggagctaattcccgggcgaggaagtcatagcgcataaggaaagaatattacgaaccgataatgataaaccaaaataaaaggagacggaaaactatgagcaacaagaaaagcatcggggaacgtgttgacaaagctgtgaataaagtgtcgaaaaaggctgataaagtaaaggaagccgtagttgacacagcgcacgacattaaaaagaacgtgaagaaagctgtcaagtgattctggcgaggccgctttagatttgggccacacaaaaacgacggcgcatgcaacatgttgtctatgcagcggttttcagacgcatgcgtcgtctgtctttgtgctttagtattcaatcggattgctaaccgcattttcgccaacgcgggccgacgcatcaataataatcggaggatacgaatatggaaaatgttgtaaaagagactgaaacaacacaaatcggcgacgcaagcgctgtgacgactccaactgaaaagaaggcaaccggttatcagacgggcggatattcagtctattacttctttggcgctttggaaatacttttggttttccgcctcgttcttaagttgatgggagccaacctttctagcggctttgtgaaattcatttatggattaaccggatttttcattgtgccttttgaaaacatattccgcagggggctttcagaaggcatagaaacgacttcggtttttgagccgtcaacggtagtcgcaattattgtgtactctgttgtggcttggggtattgttaagctaatacgaataatctcaaaagagcaacagccctcatagtttgtttaatatgtttggtttgggagcgtgttggagtattgcgatatttcgaaattaaaggagacgaaaaagcatgagtgacaaaagaaccatcgaaaaacgcgcgggtaatgtgtcgaaaaaggttgcaagaagcaagggtaagatcgacacagaaaaagagaatctctctgggattttgcatgacatttcagaaagagacgagaatgcggtcgatttgagcccacagattgcaaagcgcgcctatgaactatacgaactgcgaggccgacaagagggcctatctgttcaggactggggacaggcggaacgagatattcggaaacaagaactctattaaccggcatttttcgccaacgcaggttaacattgggagcgacggatgaaagtgctcatgataggcggttcgggatatctaggaaaacttctggccgtgaggatgcgcgaggagtggggcgaagacattaacattgtcaacgttgacatctgcgtggacgacgacagacaggagaagtggctgggtgtaaagcgcatttacggagacgcgcgaaaaaagcgcatcgaggatgtgtttaaaaacgagggaaccatagacgccgtggcgcatctcgccctcggccatggcgagagcctgactactgatgaacggatgatgacgaacgtttacgggacgttccacatgatcggccttgcgcgcaaatacggggtcaagcagttcatatatccaagctccaccatcgtttacggcgcaaggcaggacaacccggcggttattctcgaaagccgtcctctgcttggcaaccgagacatcctcagcatcagagaccgcatcgaggcggacatgatttgccaaacgcacgcggaaagctccgacagcctcagagtgatcatcctgcggatggttcccatctggcgagattcaggagccagcattctaggcgcttatatgaaaggcaaacttgttcccacgcttcttgggttcgaccccatgttccagattatttacgaggacgaaatgctggacgctttcattcgagttctgcgcagcccgaacgctcacggcgcgtacaacatcagagggcgcgcacacctgccgttaagcgaggttatccgctcgttcggaaagacgccggcgccgcttcctgaatttctcgcgcgccgtttaggcaggttcatgtggtcgaacaatctgaaattcgatctcaattacataaagtatccgttcacagtggacggcgcgcgcgcgttcgaggaactgggatacgacccctccggatttgagaaaatccgcgcggaaaggaaaaagaaaggcgctgcggcgcatcgaatcagacttcgccgcgcccagagctaggatgaggatgattaaactatcgcaatcaggggaaatcgacttgtgaacacaatggacgactacagaaaacttaaattcaagcatttcttcgacggcacagcgaccgaatatatgagaaaccgcatactgatgtcggacatacagtttgacccaagcggatacgacgagttcggaaccagcctgaatgtcacatccaaagcgggagcggcggcgctgttcatgtacatgaattactttcgcgtggacgcgcacggcgcgcagaacatccccgccgaaggagtcggcctgatagtgtccaaccacgcgccgatactcccattcgacgccgtgatgatatggaccgccgggctggtggagcttgagaagccacgattcatcagaacaataatccacagggcgctttcaggcatccccggcggctccatcctcttgaaccggtgcggccagatagtcggctgcgacgaaaacgtaatgaaaatcttcgagaacgaaaacctcattgttgtgtttcccaccggcgcggagagcgacttccacaccatcttcaacaaatacaaagtggacgcgttcccccccggattcatggaatacgcgattgagtaccgcgctccaatcatcccggcatgcgtcaccggctcggaggaatccgctatgacaattggcaaactcgacatgaaagtgatggggttcaaacatctgccgataacgccgatatttccgtggctgggcttgctcggacttttgccgtttccgtcaaagttcgacttgcacttcgacacgccaatacattattacgaagattgccacgacgtcgagcccgatacggagcgcgtacgctccctcgttgacggtctccacgatcatatacagaaaatgctcaacgacagactcggcctgcatcaagcgcatgtattccgtgaatctaatgcgtaacttcgacaaatttgtgttatttccgactactggttatggtttttcagctagcctgctcggctatgcccccggcaatcgcttccaccgacaagaacccagcccactcgcaaaaggcaaattatggcgccgctttacgcgacgaaataaagcggcatatttcaatctcttccgcagattaaacgggcgtctttcacattccggcgaagtatattttccaattcacgcgcgagttagtttcaagtgagttacaattaaagaaaagagcctcttcgttgagtctgagaaccacatctttgcgcaacatggaaagcgccacaggattcacttctgtcaaaccgaatccttttctgggattaaggcgcggttattctacggctgaatctcgaggcgcaatttgcagcaaaagagacttaactcggatttttcacaggaaaaatcaggctaaggttctcgcttaaaaaatgcgacgtcaacaaagcatctcgccgttatgaaatttgccgaagatttgccggctctatcggccaatccgactagtcaggagactgttttatgcctagaaagataaaaaccgatgttaaggcccccgctgaatcgcccaagaagacgcttgtggatgaggtttccgcagacaatggaaaacaagacctcccaaaggatttccccatcgtcggaatcggcgcgtcggcaggagggcttgcggcgttcgaggcttttttttcaggcatgcccgcgaacgccaacccggatatggcttttgtcctcgtgcagcatcttgctccggatcacaagagcatcctcaccgagttggtcaaacgctatactcgaatgaaggtattagaagttaaagacgggatggtggtggagccaaactgcgcatacatcatccctcccggtcgcgacatggcttttatcggcggcacgcttgaactgttggagccggccgcgccgcgaggccagcggcttcccattgatttttttttccgctctcttgcgcaggatcagcgcgagcgagctatctgcatagtgctctccggcacgggcagcgacggcgctctgggagtgcgggcgatcaagggcgagggcggcatggttatggcgcagaacccggaatccactgaatacgacggaatgcctagaaacgccatcgcaaccggtctggtggattatgttctgccgcccgccgaaatgccgccgcaactaatcgcttacgccgcccatgcgttcggcaaaacaacgcgcccggccgcaggctctctccctaaaccggaagatatgctgaaaaaggttttaatcctgttgcgcaaccagaccggacatgacttttcccaatataagcccaataccatccatcggcggatcgagcgccggatggccgtcaaccagatagacaagatagaggaatacataaaatatcttcagcggtcaaaggacgaggtggacgccctgtttcgagacctgctgattggagttaccagttttttccgagaccaagaggcgttcaaagcgctggagaaacaggctctgccgcttctcttcgcaggcaagcccgcaggcgccgcgctgcgcgtctggtcgctgggatgctcaaccggcgaagaggcttattccatcgccatgttgctgcaggagcgacttgaggaacagaaacaaaatttcaaattgcaggtgttcgccacagatattgatggccacgccatcgacactgccagaacaggcctatatccggccagcatcgccgccgacgtctcgcctgagaggctggagcgtttttttgaggccgaacccggcggcggctcctatcggattcgcaaaagccttcgcgatattttgattttctccgaacagaatgtaatcaaagaccctcccttttcaaaaatcgacctcatcagttgccgcaacctgctaatctatatgggcggagaccttcagaaaaagctcattcccctcttccattacgcgttgaatccgaacggatttctttttctcggcacatccgagacaatcggcgatttcgcgagcctttttgcctccgtggaccacaaagcaaaactatatcggcgcaaagatgacattcaaggcgcgcagcgcgcgtccctcagccgctttcttccgagttcggcgacggaagaagcctcgtcccgccaaaaaagaaaaacaacggatgaatataaaatgcctcttcgagagttggctgagaaggcgctgcttcaacacgcggcaatgaccggcataatagtcaacagcggcggcgacatcttgtacatacatggacgagccggccattttctggaaccttcgcccggcgtcgcaggcgtcgccaatgtgttgaagatggcccgcgagggattgggccgcgaactaacaacggctttgcacaaaaccgccgtctcaaaggaagccgtgcgccatgacggcctgcgcgtcaaaacaaacggcgacttcacgacggtaaatctgacggtaaaacccattccggcgcccactggcgcggaaacagcgcaagagcttttcattgtcatcattgaagagcctcggatatcagacagtgaaaagcgagaaatcgccgccgacacagacggcgctttcgacaacgcaacagacatcggctcgcgcttggaggcgatgaggaaagaattgcgcgccaaggatgagtatcttcagaccaccaccgagcaacttcagacatccaacgaagagctaaggtcttcgaacgaagaaatgcagtcgataaatgaggagcttcagtcaacaaacgaagaactcgagacgtccaaagaagaactgcaatcggtgaacgaggaacttgcgacagtcaacgccgaactccagcagaaagtcatcgacctttcgagagccaacaacgacatgaacaacctgctggcaggcacgggaatcggcacagtattcgttgacgaccaactgcgaatcatgcgattcactccgaccgccacccagattatcaacctgatacccagcgatgtggggcgtcccgtcgggcatatcgtctcgaaccttgagggatacgacgggctggtcgccgacgcgcgagatgtgttgaacacgctgatcccaaaagagcgcgaagtgaagaccctgaagggcgattcgtacaccatgcgaatcatgccgtaccgaaccatggaaaatgttatcgagggcgtggttgtcacatttgtcagaataaccgcgcgcgggaaatgtgtccggtctgaatccggcgaagaaaaaacatcgccgaaaaagaacgggggcgacaatgtgcgatgacaatagccggggaaaagcggacgcagaccttcgcgcgcgggccgagaataaagcgcttgaaaacgccgcatccggcgctcctgttaatcttgacgagttgtcccccggtgaaacaaaacgcctgctccacgaactgcgcgtgcatcaaattgagcttgagatgcagaacgaagagctgcgccgcgcgcaggcggaacttgaagcgtcgcgggcgcggtatttcgacctgtacgaccttgctcctgtcggctacgttacaatcagcgagaaggggcttattctggaggcgaatctcaccgccgccggactgctgggcatgtctcgaagctcgctgttgaaaaagccgctgactggattcattctctccgaagatcaggatatttactacagacaccgcaaggaattgtttgaaacaggcgacccgcaggtatgcgaaataagaatagcggggaaaaaccgcgacttcttctgggcgcgaatccatgcgattgtggcgcacgaagcggatggcgcgcaggtgtgccgagccgcgctcagcgacatcacggaacaaaagaatcacgaagacgcaaggagaaagtatctcgaacaggataaaatggcggccatcggccagcttgcgggacggatggcgcacgatttcaacaacgttctaaccatcatcttgggaacgagcgaattgctcctgacccaagacttgccgccggacgtgaaatcagatgtcgaaaccattctggaaaccgcaaacagaggaggcgggctggcaaggaacttattgttctttgccaaggatcagcagcttaaactaagccgatttagccttaacgacaagatagacatgattatcaagacgctgagaggcaatttgaagaatatcgatgtggtcgtcgattacggagcgggtttggatggcgtgattgcggacgccgggcttctcgaaaacgccttgatcaaccttatcaataatgcgacacaagctatgagcaaaaccgaaaaaccggtgttgcgcataaaaacgcgcgcggaaaacaacatcatccgaatcgaacttgccgacaatggctgcggcattcctcgtgaatggaaagacaagatgtttgatcccttgttctcgttgaaaggcagcggggatatgaccggagcttacccgccggacgtaaaaggcaccggatacggcctttcaaatgttaagcgttgcatggacaagcacgggggaaccgtcgagtgcgaaagcgaagcggacaagggcgcgattttcagaataacgctgccgataatcacagaagctgcccgcggcgacaggaaggcggttgccagcgaaaataaagatgcgaaagggaaaaacgtgcttgttgttgaagacgaaccgcaactgggaagaattctatgtttgcttcttgaaaaactcggtcattatccgaccctagctgttgacgcgaaaacggctctggagcgacacggcatgaattctttcgacgccatcagccttgatttcgtcctgccggatatgaacggaatggaggtgtacgaaagaatcagggaaacagactccgaaatcccgataattttcgtgtctgggaacttcgagtatttgcagtccatgatggaattagagacgagggatccgaaaatggatcacttggccaaacctttcagcaatatggaatacataagcatgattcaaaagtggctgacataaacgatgcaattcaattgtaagcgattgaaacagggtatcgacaataatgtctgacagagaagacaagagggccgccccggcggatgacctgcgcaagcgcgcggaggatagccgcagcggcggctgaattgcataaggagaaatgattatgaacgataacaaacgcgaagaggagaagttagctgttcttcgcaaaaaagccgaggtcgaagccgataaaaacgctgagcgcgctcatgagcgtctggaattaatgtccaccgacgaaataagaaaactgctccatgagttgcgcgttcaccagattgaactcgagatgcagaacgaggaactgcgtcgcgcgcaggatgaattagagatgtcgcaggcgcaatattacgacctttacgacatggccccggtcggatatttatcagtcagcgaaaagggaataattcttcaggcgaacctcgccgtttcaaatctgctacaagtcgctagaagcgaactggtgggaaaaccgttttcggcgtttatttctaaagaatatcaggacgcgcactaccttcgccgcaagaaactactggagacaaaagagccgcaggcgtacgagataatggcgaagcgggcggacggttccctgttgtgggcgcaagtagaaacctccgtgacgcgcgacgcgcaaacgcccgttgtttatcgggctgttttgagcgacataacagaccgcaagaaggcgcaagccagccttgcgaaaagggagttgatgtttctatcccgcagaatgattcaatcgcaggaagaagagcgcaaacaagtggcgcgcgaacttcacgactccatcggacagaaaatcatctccatgcaacttgagatcgaatggctgaggaaccgcgaatgcgcatgctcggatgtgagtgtttacaataatttgattaagcagacgatagaagcgtcggaagaacttcaacagatatgtctcggtcttcgccctttgattatggatagaatggggtttaacgccgctatgaaaacattgattgcggatttggaaaacgccagcgatatcttcatagaatctaggataacgcccgtcgacgagtctcgcgtcagtcctgacaacgccatcaatctgtacaggatacttcaagaggctctggcgaatattgtccgccattcaggctccaaaaccgcgttgatatctttgaaggaaactgattctgaaatcgttcttcaggtgaaggacagcggttgcggaattgaagaagacagcgagcagggcagatacaatttcggcatccttggaatgagggagcgggcgaacatgatgggggggcggtttgaaatatgttccgcgcccggaagaggaacacacataaaagtggctattcctttcaatgtgaagaaagagattggcggtccgatatgagaggaaaaagagggaggaagcgatatgcccggcaaaaaagcaaaaaagaaatcaaaacccgcaaacgcggcggtagaaacaattaaggttcacaagcccgttggaggggctaaaaagatgataagagttttggttgcggacgaccacggagtggtgcgcgccggattgtgcaggctgattgacggagaaaaagacatggagattgtcggagaagcctcggacgggcgcgaggctgttcagaagtgcggcgagctgaaacccgatgtggttgtgctggattacgaaatgccggttgttgacggactggaagccacaaaacagatcgtcgagttgaaactgaacacaaaaattctaattcttacgatatacgacagaaaagagtttgcaataagttttattaagagcggagcggccggctatttgtgcaagaaaatctcagccatggaactatgcgcggccataagaaaaatcgcggcgggagacatctatttctcggcttcaaatggagccgtaacgaatcaaaacgaccatgacaaagaaggcgacctgctttcccagctttcaaagagagagtatcagatattcatcaggatggcgcgcggaatgacaatgagcgaagtcgccgacgaacttgacgtgtcctacagcacggtgaaaaccttcaagtatcgcatcatggggaagcttgacatgaaaaaagattcggacatgacgtttttcgccattaataaaggactaatcgaaaaatcataatatcaggcgcgcgcgcgcgtctgtattaatcgctcgattgcaataaaaggattcgctgaagaactggcgagtcggaacgctttatcacataggcgaactgcttcgttggcgccgcatttattcctatgtatgggcggggttgccccgctcgaaatgtcgctttcatcaggaaacaggcgatgaatcgcgcattccaaatcacgcgtttcttatgactgataccaacttgctgccattcactcaagtatgcagggtggcacccagaaccatcgccgcactccaaattgtgccttttcactggctgagtattcgagcgaaaaacggggacaggcaacgcgtcttttgcggctgcctgtccccgcttttcgccgttccgggaataaagtgtcaagttttttaacaatccctgaatattaacgatgctcaagcacaaggttgtgagtggcgcccgatctgacatttgaaaatatcaacgccttttttcgaaccacatttacggctcagaggggcgcggcgtttattagccggaatggctataaatgaatgccgtaatagttaataaagattgcttttttgccgatactcccggattccaatcaatcgtatcattaatgtgttgacatacatcttcatgggacgaattgtcgtcgtgtttctttcggcaaggtatttgttgcgcaataacaaatatgctctgcgcggcgggatatcaggaggatgctatggttgaacaatttagaataatgatagaaatattcattataggcatgtgctttagaaatcaaaaagggagaaaagaaatgaacatccaaacagaacgatattaacgcgcagaagaggactaatgtgtggcgcgctttgataggcttcggagcgggagcgatagcgggggccggagcggcgcttcttctagcgcctgcaagcggcaaagaaactactgccgccatcagggaataatgggacgatgtgtctgacaaggtctgcgacgtttgcggcgaagcaaaaagcatggtctcgcatgcgcacgataaaacagccgccgctgtcggcaatgctaaagagcggtttgccgcaaaaaaagacgcttcagaaaaagactgaacggcaacgcgaaactcgggctgaaggagaaaatcatgccgacgccttcaatattcatggactacctcaaagtgcaagacatgagggaatacggaggacttgccgtattccctctgacgttggtttcgcccgccttcgaggcgaaagagcttttcaccgtcataggcgcgggagaactcggcgacggcataaaagcgatggaaacaggcaaaatgaattcggtaagcatagagaacagcggcgacacgcccgcgctggcgctggacggggcaatcctgatcggaggagcggctaacagaatgctgacggcgagcgcggttattcgaccgggtgaaagcgttgttttacccgctgtcagcgtcgaggcgagccgctgggaatgcgaggcgctctctgggggagcttcgagaataacggcgaccgaccccgctttttaccgctcggatttcgctccggcgagcctccggcgagagcgccttgagaagtcgtttccgacgatgatcaaagaaggcgcgtcgagggtggatcaaaatatggtatggaagcatatcgaaggcctttttgagcggtcgtctataaagaccgaaaactacgatatctgcgcgctatacgcggagagggatatccttcacgatgagtacgtctcgcgcatagagtttacggaggcgcaggtcggctgggttgttttcatcgaccgcacatggtggtatcttgatttattttacaatcacggcgtgtttgcggatatctttccgaatctgcttaaatcttacgcgatggaagcggtgttgacgagggtcgtcctagacgaggaacaggatagacggcgaccgcccgaactgacgcttgcgcaagacgcgttcgcaaagataaaactgattaaaatcaatccgattaaatcgaccgggggcaaaggcgaaggagccggtttcttcgcttccgtgaaatccggcggaatcatactgagcgaaggcgcggccctgatgcacatggcggcatgttcgagagacgatttcgtttttcggccgcctaaagcaagcgctaagaacgaagccgtgacagtcggcgaaaagacggaagctacaactgcggggcttctacttaaacaatagcagccgcgggccttgatcgagaccggccgcttgacgttcgaaaaaaggagaatcctatgggagatcagttcacccgcacgctcggctctgattcaatcgacagcgtagatagaatcgatcagacttcgaccgtcagcccggtctcgcgcgtagtgggaaaaaaagtggggcgcaaaaccggaatcgccgccgacggcgacagttttctgtatcgcaatacaggcttgccgctgccagcccggccaaaatcagcgctctggaacacggcgctggacgcagtgtcgaagttcaatgaaagcatgatcgagcgcaaacagcctttctctgtcagagtgtgggcaaagaacagcggatttcgcatacagcttatcggcgagaaaaaagggattgttatcaagcaaacagaagacattccgtttctggacgtgaccggggaagacctgaataaaatcattaattcgcttgcggcggaggaaggagtcgttgtggacattgagggataagctccgcgtccgcaaaaaaggagaacgcatgacaggaaaaaacgacataaagcaagcgcaagacgcggaaaacgccatagccgaggctaagcttgaggcgacgccgcaacgcagacgtttctgggaaaacatctggttcatgctcggcacggttgttttgacaatcagcgtcattctcgcgcttgtcaacaataccgacaccacgataaatcttctggtggcgactatgagcgtgaaactgcctctgctgattattggcagtggtattctcggagtcgcggttgaatattttatatttctcggaccgagagcggacgcccgcgcggaaaaccgcagtcttcgcaagcaagtcgcagaccttagagggttgtcatcacaagtatagttcgccgcgactgtggcgccgctcggcgcgcaggccgcagtccgcaactagaaattctggaggttatgacaatgaatcgctcgcgcattatgttgttggctagcctaacggcaacagccgtgctggcggcgtatacgctcgcgcgagccggcgcaatcggcgagaatccggtgatggatgtttaccggatacacatgaatgacgagatggagatatcggtttacggcaatgaagaccttttaaaaacagtgaccggcaggcccgacggcatgatatcgtttccgctgatagaagacatgtacgcgctcggaaagacaacggagcaaatacgcgcggaactggaacagacgattgccgcgcgcataaaagacccgaaggtttcgttgcttgtgacgaggtttcacaagccgcaagtttatatccttggcgaaatcacagcgccggggccttacgaactcacagacccgtatatgatgtacaaactcctcgcgcaggcgcggctcgcgcatcctagaatggatgaacgcaaagtattcgtcgtcagaagcggcgtgtccatgccggtggcgctgaaacgaggctcgatatcgccgccgagcgcggaaacttttcaactcatagacggcgacgccatttatgtttcatatcatggaacgacttcagtgtaggtgctgggagatgttccggagccgggtttctacccgattccggaaaacgcagccaacttaatcggacttctagccgcggcgaaggcccttgacgcgcagatattctcatcggaagtgacattgatacgacaaggcgagatgagttcggtttcagtcagaaatcctccggacggattcgagcttcttcctaacgatgtcgtgcttgtaaagcccgcgaagaaagagtccataactgtgacgggatatatcaacactcccggaatttatccttatgtcgaggggcagacgattctagacatcataacgcgctcaggcgggtttgcggcgaacgccgccgacagcggggtgacgataacgcgaaactaccctgaacgacctgagataatcgaggcggggaatctgaaccggacgacgggggacatcccgtcgctgcgtcccggcgatgtcatcaacgttcctaagcgaaaagccacattgaaggaatttttcatgaaaaaagctgtgccggttatccgcgatataacaatcatatacaaagtcttgaatgattagacatcacattatcgcgcaaactccggcaggtcgcattcttcagagattcatttaacattggatattgaaaaatgctatcttatgaacgcatcataatgaaggccgctgtctcgacggtcccgcactggtattcaagcgagcatgcgaatcatgcgttcgaattgacaatgggcgctcacacagtcgtattttgctctcacaatccgttaaccccgaatttgagatcgctaatatcatatattcagaacaatctcgatatctggagagcaaggatgccagtcgtgccgaccccacgctcactgcaacaggtcgaagaggatatcgcggtgcgatggcttgagatattcgacgcgggcgttaactggaacaagtttatcgcatacatcgaggatgtcaggttcagaacctacgagaacaatcgggtgatgactaacatcgtgatcggggagggagagggcgcgttgtcgctgtctgacgcttcgattcaaaagattgtagatcctcttgcgtcgagcatgcaagtctattttcgcgtggacagagaactgaggtttttagactatcaggaaatcttgtggaaggatgtcagcgagtcttttgagccgaagtttattcccgagtttcttgagccattcgcctcaatcctgaaaagcggagaattctcagttcatctgcgacagcgtggagacatcttcataatggactcgcgcggacttcttgccgcgaataggaagggacgatggcgcgtgtatgacgcccaaacgttcaaaaacagcgtgtgcgacattatgggcgacatcaacgtcggaagaaatcttttcgagctgatgtttgacctcagttacatgcgtcacggagctttgctagtgtacgatcctgaccataaagttatcgaacacgtggttaataaacagtcgataataggaggaatcgcgcccacgcccgacacggcgcgcgctatgctctccccggtaatacgagatatccgcctcggcatgaacgcgcggttgacgagcaggaaaaatctgtttcttgaaatcgccggtcttgacggggctgtgatatttgacggcgatgagttgatagccgtaggcgctatgataaaacagcatcccgatctcggaagctatctcggagcgcgcaccatagccgcccaatccgcgcgccgctacggcggcatcccgataatgattagcgccgacggcgagatgaagatacttttcgaaagcagcgacgcgcaacaccaaaaaagcgacgccgaactatctttcatgtgagcaaatattaaagtgttgtttgagcgcaattttgctcattccgctcgttagcctaaaaggctacaaaataatgccacattggttatgaaataatgcctttttgccgatagcgcgtatatttccccaactatatatttattaaggatgaaaaacattggcgaacatgggggatagttgatgcgactgataaaagattacatgtttctcgcggtctgttgtgcgacattaacgctggcggcgtccgcattgtgctatgcggaagacggttcaaaaacgcatgaatatacgatggccgatccatatattgacggcgagatgataccgaacggtccgtctatcgcagggccgacagggcttgtaaagaatcccagcgcgtatgtgctcgccccgtgggattacgacgtcagcgttgacgtggttggatggaaggattatgtgaaagccaacgtcgggctacctcgtcgctttgaagcaggcgtgacattcgttgaaaaagttcaacaggaaggctctttgaaccttaaatggaattttgttcctgaagcgcaagagcatcctgctgtaagcgcgggattgttagacctcgcctccacaaacagaactaaatacgcggtggtcagcaagaactttacttccggtaaaaagctccgttcaaaacatcggatcgacaaaattgcgctgagatatcaagtaggatacagaacctccgacatcgacgactccctgttctacggactcgaagcaagattccttatatcaaagaaatcgccgttcatgaaggccctgaaaaaaaccactttcatggaagagtatgacggagaccacttcaatttcggcatgagatacgatctgtccgaatccgccaaattgcatttcggcattctgagcgtggaagatataagcgtgggcatcagttatagaaagaatctgtagtcatatatccgctttatcggcacgaggcgctcaaattaaaacggcgaataggtcctccttgggaccatgtgcaaataaccctcttttatagagggcttttttatttgtcgtcttacaactgcgatctgcaatctccgcaacaagaaggattgcgtttgtgtcgtaagaattgacgcgaaagttgttttgcatgtttattcatgtcgcaatagacgaaaaagctataaataaaagacttaatagttaatagtaaatgctctcgcgccgatagcgcctaaagtattgctgtttatgattaataaagacgtcaaagtcgcgaatatcgtgtttttatcggcaaatagcatataaacgaagcatctcaaaggagacgattgtcatgacagaaaaagtagataacataaagcttgtcgaacaagaaattgataaagtgtcaaaaagcggcgagaaaaccagcaagaataacgataacacacataacctagaagctggcaaatcagacgccgatgtgaaagtatctatattccgacaacatgcgcaaccgtatttcgaaattaaggcagactctggaaatagattgcctgctatgcctgacaatgaaattcgacaaattatgagcaaggacgcaaaaggctcgcaagctccattaataaagaagcatttcgcaaaaagaaagatatccaacagcttaaacaatgcgccaatattgccgaaataagaaaagcgcggagttttatatgcgccgcgcaacgcaaaagccttcaataatgactcgactcataacatgcggtcaactctgataggttctaagaaaaaagcgaatgtgcgcattagtcagagaaaagcatcgcgcgggcgaagaaaagggggagacaatgtttacgtatcgaatattcaatgaatatgaatacatcatggtttgccctgaaggagaactgggatacgatgtgtgcgatgaattcggagagattgtcacaagctgtatgagtccgggcatgcgcttgttgttcaacatgagaaaagtgtcattcctcgacagcgccggcgttgggcttttgttaagcatgaagaagttggctgagtcttggaatggctcctttgaaataagaaacatgtccaaacgcgttaaggctccctttgataagctgtctcttaatgaagcgctaaatgtggcgagcatataagttccggcgcagccacaaacgctatttattgcgcggcgcagcttcatctgagtttagctaaaacagttacaaatatatgccgcatgagctaataaagattgcttttttgccgatagcgcaacccgcttgagagcaatatgatgtatgcaacggaatatttctaaaacgaggggtgtaaagatgagaaggatattaattttggcgctgatattggttttgttcgcgatgactgtcgcgacaaaagagaccatgtgcgaatcgttagcggggagcgcggtcaacagagccgcggacgccgcctccgacagttttatgaattcgataagcgagtattttgccgttccgaagacggaagttgcgaatgtcaggcaacgaaacatcgcggaagaagatattccggttgtgttttttatttcgcggaaagccaatgtggctcctaagatcgtctcagactatcggctaaaaggccaaacgtggcaacaaatatcaaaccgatacgggttcggggcggaatcgtatcatgtgccgctcagagagggcgcggcggcagggcctccttatggaaaggcctacgggtattataaaaacaagccgcaaaaagattggaacaagataaaactcgccgatgacgacatcgtaaatctagtaaatttaaggtttatgtcaggacattataactacccggcagagaaaataatggaaatgcgcaagcagaataaaggcttcaaagcgataggggcggacatcgagaagcagagagacgccaacaaagctaaagccaaatccgcttctgataaaaagaagaaggacgcctcagcggcggccgccaagaaaaagcagtcagaacagaaaccaaaggaattgacgggagtaaagaaacaaatcaacaagttcaaacagtatttcaataagaaagaacgaaaaaccaagaagtacatgaatgacaaaggatgacaagcggcgcaagttgaaattgcgcggctgagggggaagcctatgacaaggttgttgatagcggaagacaacacaagcgtggccgaactctaccgcgaggaattcgaaacagagggatacgcagtggaggtggtggataacggagcgtcggcgatagagcgagcgcgcgaatggcagccggacatagtggttctagacatcgggatgccggagatgagcgggcttgaggcgctctccgatttgtgcgcaggcggcaggacggtgatagtgaacaccgcatatccgctgtttcgcaaagatttcagggcgtatcttgcgaaagcatgggtgaccaaatcgtcggacatagaaccgctcttggaagttgttcgccagaccctcgatggattgaggataacagacgaatgtgcggctctcattcagtctgcgacatagatgaatgcaatcaggcgcaattaacttgagcctgagaataatattcaaaaacaaaaggagaaaagattatgagcgacaaaaagacaatcggggaacgcgttgacaaggcggtggataaggcttcagacaaagtcgacaagacgaaagataaacttgaatcggcaaaaaaagacgtctctaaagttggaagagaaatttccaaaagcgttaaaagagccgtggaagacaccggcgacgctatttcagacctagttaaatcgaagaaatgacggcgcgttgttccgcgcggctatgcgcgcgctctgattaagcggctcacgcgcgcataatctaatgtcatctccaagggcatgtcacgagcaggccggcggcgttactcacgctgaaacatggaaagcgacgctcggcctcgctttgaacttcttggattgcggcaaggtctcaactgtttaattcattaaagcgcgcggacagtgtccctttaatgttgagcgcaaacaaaacaagcgcgaaaaggaggctttgccgtggcatcaagaataatattgatagcggacgccgataagctttatcgacagaaactgcgagagttatttttagcgaaagatgatttcgcggttttcgatgtgggaagcggcgaaacagccgtaaccttcgcgaccgaaaaaaaacctaacgtggttttgctcgatattatgctgcctgacatgaacggaatcgaagtctgtcgcaagataaaaatgaacgaccaatcgaaatacatgccgataatcattcatacggcaaagacagggatgcatgagaggttgagggcatttttagcgggcgcaaacaggtatatagaaaagccatgcgaattcgacgttgtttatgactgtttgcaaggcgttataacgccttattgttacgatcataatctgtcacagaatgatgttttcaaccggatgacgctttgactaagcgcggcgcgcgcggcgtcagaaacgattgataccgggggattgctcatgctggagtcgattgcattaatactcgcaattttgtggttgctggggatagttagcggatatacgatgggaagcttcattcacattctgcttgtcatcgcagtcgtagttgtattggtgagagtcattaaggggcgaagaatcgtttaactggaggctactgtgttttgaaaggacatgcgaaacaatgtttagttgcgatatagttaatgagaatgaaaccacattgatattagccgagggtgaactggcttacgatgtatgccaaagacttaaagaccttgtgttcgagtatatgcgtcagggagtgtccctttcgtttgacatggcgggagtgacttttcttgactgcgccggcgcggggcttttggcgcaattaagaacgcttactgacagatggagcggctcattcgaattgcaatgcttgcaggcgaatgtgatgcgaatgcttaaattgttgtctctaacggattatctgaacgcgaacgcgcccgaaacgcctcgtctccgcgaagcctgcgcttcaaactaaaataaataatgttttcctgttcaatcttgttgcctgagacagccttgcggcggcggttgtcgcctcttgacggcagagcgagcattagtgtccggcgcaatccgtcatcaagtcagcttcgtgttcatccgttagtcgatgtggctaaatatataaaccgcgatggttacaaacatatgctttttagccgatagcgattgttaagcgagcgacgtatcattgacgcagcaaacaaatacaaaggagaaacaaaacatgaatgaaaagaaaacgatcggcgaacacatcgacaacgttgtcgataaaagcaagagcgacaagggaacgctaggcgagcgcgttgacaaggctatggataaaatgtcggacaacgttgaaaaagccatagacaagatcgctgctcgaaaagaggatgtcgccgacacggcgcgcgatattaccaagagcatgaaaaaggcgatggatgaatccggcgatgcggtggcggacctgattcacacgaaaaagcaagagactgaagcttaaccgacatcgctagacgcaaggaattagaaagaggctgagctaatgcgttttgctcgaacaagagacgacttgttaaaaagcgcatttgtgcaaatagcgctgttattacagaaaagcgcggaggaatataatgaaacattacaagaagatagaagcaatgaacattctgagatgcttgtgttgcgcaaagggttcaagccgaggcgcggcgggacgcaacatcgttgccgcgacgattcttgcgttttcattgctggcaagcgcggttgctgaggcatcggtggaaaaaggagacagggcgatggcgagcgaaaattaccgcgccgccatcgcgcactatgaaacgcatttgcaaagcaatccgagagacgggaacgttataacaaaagcggcccgggcgtacgagggcgcgaaatggtggggcaaagcggctcagtggtgggattattacataacgatgtaccccgaaggctggaggatagaagatgtaaaaaagcgcgccgcagattgccgccgctggcttggagcaaacacatatataacaggcgggtattactggatggcggttgaagaactcgagaaatcattattgcttgatccgaaactggcggacgcgtacgtctggctcgccactatttaccagaatgaaggcatgtacgacgaggcgctggctattctggataaagggatcaaagaggctccggaagacgaagttcttctgatgatgcggaaagacgccgcgaactatagagagaacggaggcaacgcgtatgtggcgcaccggagcggcattgcccgatatcagggtggcgacatatccggagctcttgacatgttcagagaggcgatgaccgcaagcgaggattttgcggccgcgcatctatggacggctcgcatactgttcgaacaggggcgcttcgcggactcgattcctgaatggcgcgaagctcttcgaatacgtcccgacaacgaacacgctttcttttatctgcaactggctcagcgcaatgtcgccgccgcaaaataaaagcgatctcagcctaatgttgagcaatggcgcgcaacgcgacgggcagaatacattctgagtctttgcgcatgaaaacgatgtcgaggcccgcgcctaaaaagcgtttccggcatgaacaggagagcgactatgacggaagcattccgcgaagacgtggaaaaacttattgataaagaaaagacatatctgtggtctcgcgccttgcagatagcaagcaatgcggaagacgcggaagacctgctgcaggaaacgcttctcaaagcttgcgaaggttacggcggttttgcgcctgacacgaatttccgggcatggaccagcagaatcatgattaacacgcatatcaacaaagtaaaaagaaggaaagagcaagaaatctcttttgacgatagaaaacacgacaaaagcaaattggcattgaaagttgcgcgacgaatatcgcacatggactcgcctgacacggtgttttttcacaaccatataaatgaagagataatgaggcgttattattcgttgcctgagatgtacaggctggtgttttcaatgtttcatttcaacggatacacatattcagaaatatcatcagccatgaagattccgaccggcacagtcaaatcaagaattcacagagcaaaagagcgcctgtcggaacaaatgcgtgaagagcgttattctgagaacgctttgaactaggcttgcgacttccatctatcccggatttttcattaaaaaaatccgaaaaaacgaataaagggcgatctacggcgttgaatcatcgactcgaactcggtcacatacgaaacagtagacgttgagttcgtcagcaacgtatatcttgagagcgaagcctatgcgatccagtgcaacatccgcgacatctctgagcgcaagcgcgtggagcatgagcttaaacaataccgggaatgcctcgaagaagtcatagaggaacggaccgaagagcttttgcgcgcgcaagaacaactgatacagtctcaaaagatggacgcggtaggccggcttgcagggggcatatctcatgactttaacaacatcctcgctgttattatcggaacatcggaagtcgttttaggctcgatgtcgccggaagacccgaaccaagctcgcatgcgacgcataattaagtccgcaatgcgggcgaaaaacataacaagccgactccttacgttcgcaagaaaggaaaaactggaaataagcgacgcttcggctcgcgatatcctgattgacacagtggacatattgcgtgtcagcgtcctcaacaatatcgaaataacgacgccggaatgcgatatcctgattcgcggggacgcaaatcaactcggacaggcttttctcaacatttgcgcaaacgcgtgcgacgcgatgaaggagggtggcaaactagagattggggcggctcctgtttatctggacaatgaattttgcagttctcgcagagggattaaacccggagaatattgtcttatcgacatacgagacgaaggcggcgggattccggcggatatgctcgaacaaatattcgagccgtttttcaccacaaaagacaagggcgcgggcacggggctggggctgtcggtgaccaagagcatagttgagacgcacaacggactgatagaggtggaaagcaaaccgggcgaaggaacgaaagtgaaggtgtatctgccatgcgcgaaggaagcgccaacggcctacaagccggaagcggacgaaacattgcggaagggcaaaaaagaaacaatacttatcgtggacgatgaaaaagacttcacagatatgatgtcggattttcttattgagcaaggatacagttcaatcgccgccaacggaggcaaagaggctctcgatttgttcaagaagaatcaagccgatgtcagactggtgattctcgacatgatgatgccgagaatggacggagccgaaacgtttgcggctttgcggcaaatacggaatgacgtcaaagtcatcctgtgttcaggattcagcgtcgcagggaaagccatgcgattaatgaacgacggagcgcgcgcgtttgttcagaaaccattcatcggcgaagttttgttgaaaacaatctccgagacgctggccaaatgaactcggattcgcagatagagaaggcgaaacgcgggcaattatcacagcggcgctctgcctcggtctctctgaataattgaagcaggggcgccgaaatatcgcctttacagggcgaggaaaccgcgtccctatttcaaaaatgaggctcgcgcctcgcgaactatccgctcagcgcatcgctcccaaattcgtcatttgattcttttagcaatcacttcaaagccatgttcaaagcgcgctggtttcactgagttgaaacccccatccgaacgcgcacccggtgtttgaccaattctccatcgagatgaatctctgtgttcttcagacgttggccgtccatctccacccatgcgacgcctcggttaactccgtcggggttctcgatttcaatttcataaacggcttcttcatgccggattatgacgcttgctctgtcccattctgatggaagaaccggatcaaagagcagtttgccggcggcgatttttattcccagcacatcctctatccatgcccggtacatccagccggcggcgccagtgtaccacgtccaaccgcctcgtcctgttctaccgggaagtcggtagacatcagccgcgacaacataaggttcgacagcataacgggcgaccgcttccggttcgcgagcgtgttctatcgggttcaacattttgaggatagaggcggcgcggtttccgtcgccgattctggcaaacgccatggcgagccacaccgccgcgtgagtgtattgcccgccgttttccctgactcccggcggatacgccttgatatatccggggtccttcggcccggcgtcgaaaggaggggtaaacagcagaaccatattctcgtctttgagcgcgaggcgctctgcggcggattcgagcgcgcgcagggcgcgcgcagggtcagccgcgccgctcagcgcggcccacgactgcggcagcgaatcaatcatcgcttcctcattcttcgatgagccgatgggagagccgtcgtcgaaccacgcgcgcttataccagtcgccgtcccaggcatgtttctcgacggccttcgcaagacgcttcgctctctcaaggtatcgctccgccgcaaccggcgcgtctttaaccatctccgtgagcgcggcgaactgtttgagcgcgtccacaaggaaccatgcgagccacacgctttcgcctttgccatttattccgacgcgattcatgccgtcgttccaatctccagtcccgatgagaggaagccctcgcgggccggatgtcgagccgcgctcaatcgccaaacggcaatgttcatacagcgtggcgctctcgatcgactcaaccggattcccaaaggcttcgtattcttcctcgtcaagcgtccggccatcaatgaatctgatgttttctttgagtatttccgcgtcccctgtgatgcgcacatactgcgccgtcgcgtgcggcagccacagcaggtcgtcggagcatcgcgtcctgacgcccgccccgctctgcgggtgccaccagtgttgaacgtctccctctctgaactgccggcctgcggcgcgaagcagatgttccctagcaagcttgggagcggcgtacagcagggacatgacatcctgaagctgatctctgaatccgaaggctcctcccgactgatagaaacccgatctgccccacagccggcagcttatggtttgatagaggagccagcggttgagcaacaggtttaccgaatgagatggcgtgttgacgctgacggcgccaagcgttttgtcccaccacgcggcggtttgctcaagcgctttcgcgacggagccgccgtcgcgatatttattaaccagagcggccgcctcggtcgcgttgtcggcttcgccgagcagacagatgatttcgcctctttcgccgggcgcaagctcaattttcacctgaagcgcggcgcaaggatcaaatccggcgccagctcttccggacaatccggctcgcttgagcgccgcgggcgcggacaggcttccgttccgtcctatgaattccgcgcggtcgcctgtgtgcgcgctcgccgcagggattgtcgcggcgaaggcgactccttcgctgtaatccgcgcggtagcgattgcgcgccaatatcatttttgagccgcggtcatactcggcgacgacatgcgcctgcatattctctcgatgctcgcccaacgtccattccacgtagaaagtcacggacagccgccttgcgcgggacgagtcgttgcggagcttaagcctgcgcgcgcagacggggtccccgccgtcgtcgttgaccggcacaaacatcgtaagctcctgttctatcgcgtggctgttgtgctcaaagacgctgtagcccgcgccgtgtcttgagcggtaagcgtcgcgttcgcgaatcggcagaggagtcggcgtccagactgcgcccgtgtcttcgtctcgaatgtaaacgacttccgaaggagggtcgcaaaccgggtcgttagaccatccggtaagcctgttctgctggctgtttccgcgccatgtgaagcctgagccggactcgctgacaagagttccgaaagaggggttggcgattacgttcacccatggggcgggcgtctgttgttcggggccgaggaagatggcgtattccctgccgtctgaagtgaagccgcccagtccgttgaagtacggcagttcgatgaacgggagttgcgcggagggctcttccttgatggctttaacggcgagcggggggagcgttctgagggtctcggcgggaatgctgagttgttgggccagaggcccgcgcgcggcgacgagcgacacatgagacgccgccaacataaggttgatgtcttccgggggaatctgacttgctgtccttaggaaaacgccgccccgcacgtccacgcccgtgttcatcgaatggctgaagacaagccgcttcagttgttcgttcagaggctgttcatatcccgcggattcctcgtttatgataaggaggtccgccttgaggccgcgcagccgccaatagctgtgggcctgcagcgcttggcgcgccaagtcgatgtccgcgtcctgtttaataactacaacggcgattggaaggtcgccggatattccataaggccataggcgagactgcccaagtttgttctgtttcagcaggtcgctccatggacggagccgggagttgggatatatcatcgagccggcgagtttctggaatcgacgcgcgtcgtctgggttaatgcgcaggtggcgaagctcaagctgggaatggctccatgagatgtctagttcgcgggacgccgaattggggtcgaagtatttttcagcgagcaaaacgacctgttcgcgagtttcagcggcgcagagaatgagggagaaatcgcggcgcgctcccggttcgagcgttatctttcgccgcaagctgaaaatcgggtccatggacgagtccgcgacgctggacaatttattgccgagagccgcagggtccgacaaggagcgaccgcgacctatgaagcgattgcgatccatttcgaactccagctcgtcggcgggctcgtcctgctccggcatacaaatcaaatgcgcggcccatatcctcggctcgtcgggattttttacgcggcgcgtggctatgagagcgccgaaccgaggctccgtttcagtctgcgcgaaaagcttgctgaacgccgggtgctgcctgtcagagtcgtgcggagcgagggcaagctcaatgtaggtggtcgcctcaagctctctcttgcggcctgacctgttaatgagtgttatgcggcgaatttccacgtcgtcttcaggcgccgcgattatgagagtttccgtttcaattccatcgtccgagcggcgaatctccgcctgatcaagcttgaagctaactgaatagttctcaatgtcgccgcccgccggatggaaagctgaactccaaacccgcttgctcttaaggtcgcggatatagcagaagaaaccccaattgtcgctagttgtgtcggcccgccagcgagtgatgtcgaagtctcgccatcggctatagccgcctccggcgcttgtgaccattagagagtagttgccattcgaaagcatctgcgttttagggtgtggggaatgaggcgtgttgaaaacgcttgttgacggagcgatttcgtccggcgcggcatggaaagaagtctgctcccggtctgagccttggtagataggcggagccgccggagagcgctcatagaaaagcggctcgctcgcccgcactctcgggtcgcggtgaaacctccgtcgaatcgcgctgttgttgacgaggttgtcgatagccagaaaactcatcgcttgatggtgcgccatataaacttcgacaattacgccgcgctcgccttcgcggcttcgttcgcgggtgaaatcaatagactcatagaacccgtagtcgcctgacattcccatgcgcgcaagacgcttgaggttgcggatggcttcaagaggcgagacggccagcgcgagcatggatgcgtaaggggccactacaaaattttctcccaagttgcgcttcagtcccagcgccggaatgccgaacgcctgatactgatatgttctattcgcgtccacggcgctgtgcgccgattccgaaacgccccacggagcgcctctccggcgggcataagcgatttgcaggcgcaccgcttcccgacatgcgtggtccaagagcgaattttcaaaagacttctggaagagaagaggcatcaggtattcaaacatcgtgcctgtccaacttagcaaaactggcggcccccccgcggagccgtacggacgggccattgccagccagtgcttgcccggcacatctccgcgcgcgatcgccacaaggcttcctatccgcgcctcgctcgccaataaatcgtagcgcgacgagtcaagccgttgctcgctcacattaaatcctatagagaagagccgtcgctcgttatcgtacaggaagcgcatgttcatgctttctgacaactcgttgacggagttcaacaggctgccgacccggtcgagcatttcggcggccatccatttggcgcgggcaaaagcgtcttcgactcgctgtccgcattccaatcgtcgcggttcgttcaaattgttttcatcatttgccgccgtcttcgacagtaaaaaatttccctcggagagctgtcgcatggagggcgctttttccagagcctcaagacagtccgcaatcgcgccgtttcttgtctcgtcgccggcggttttcgtctcttccgcaatcgcttccatccacgggagatagcggtctatcagcgtgcgccatgacgcaagcattgtttcagtccggttcgcccagtgcgcggcctcatcgcgtggcgcggcgttttcgcacacggcccggcgcaactctgcgacagcgcctgtcaaggataaaagccgagtcgcgagttcgcacagtcgtttcggaggctcggccagttgttgttcgagaaatttcaacgcctcgttatgaactctcgctctgtcgcttttctcaagcgcctcgcgcagcgcgcggagcgtgtcgagaaggccgtggaacgcctgcggcccgatgacgggttcgtcgatgatttcctgaaagcccgcgctgagcgtccacaggctgccaagcagatttccgctgtcaacagtcgacacatatctgggttcgagagggtcgagcgtcttgatgtcgtgccagttgagaaggtgtccgttgtatttttcgagtcgggctatggttttcatgcacttcgccgtccgctcgaacgcctcgtcgcaggtcaggtagccgaaatcgagagcgcccagattgccgagcaggcccaacccgatgttggtggggcttgtgcgcatggcaagattgtttccggcgtaaacctgaaagttgtcaggaggcaaccaagatgtttccgggcctacgaagtcttcgaaatagcgccacgagcgccgagctgtgactctgagcatgatttcatcttcgcgggcgatagggcgcgcgcgcgcgatgcggcgcggcgcgctcagacgcatccctgctataggacaagccgcccacagcaaaagaaaaggcaaagagatcgagagattatccgggcgcgacagaaatatcgcgattcctaagacaacagagaacaggctgacggcgcacagttgagccagaagcgggcgaagccgttcggacgctttctgttgaaccgcctgcgcggtcgcccattcaagcagtccgcgatggcttacgaaacgacggtagaacacgcgaattatcgcgtctatggacatagctgccctgtgcggcaggaaaagcagttccgcgcagcaacgtttcgcgttgtgcgctagttgtcgccatgacagggggtccgccccgcgcttgccggtcgctcgcgtgacaagctccgaaaacaccgggaagaaggccgataacccaactattaagcttgccgcagcgcccattcccgaagatatcagccatgacgaagcgagaaacaacacggacgccgccggcgcaacgcttcggcgaaggttgtcaaaaatcttccatcgattcagagcgctgagcggatttgcaacgcgtttgccgtcaggggagggcgctttcggcatgcaccagtccgcaatctgccaatcgcctctagtccagcgatgctctcttttgacataggaaaaatagtcgccgggaaattcgtcgagcagttctatatcgctgacaaagccgacgcgaagatgcgccccttctatcaggtcgtggctgagaatcctctgcaacggaaaacggttcttcaagacatggtgaaacgctcgcggatcgtagatgcccttgccgatatacgacccttcgccggagaggtcttggtaaacgtcagaaaccgctttcgtgtacgggtcggttccgatggggtctgtgaacaagcggctgaaggcggtcgccgtcgcgctgggaagacttgagctgacgcgaggctgaatgatagtgtacgggctggagccgacggcgtccgcggggttgaacggcgggcggttcaacgggtgggcgattgtctccaccattcgtcgcgccgtgtctcttagcagttgagtgtcgctgtcgagcgtgatgacgaagcgcgcgttcttcagcaagtcagggtcgcccgcgcggacgatctgctgtccgtcgggaagcgcttcgccgttcagcaacctgtttagaatctcaagctttccccgcttgcgttcccatccgataaaggactgctccgactccgtccacacgcgttcgcggtgaaacaaaagaaaacgccccgcgccgtggcgttcgttcaacgcgttgattccatcgacggcggccgcaaggagttcggcgtctccgctgtcgcgctcggtgtcggagccggtgaagtcgctgaacaggctgaacaggagatttggttccggattggctagatagcgtatctctagcttttcgatctccctgcgcgccgtgccgatgtttgagagcatcataggcacaacgacaagcgtgcggaattcgtcggggatgccctccttttcgaacgacatcttcggcagaaggcgaggcggcaaaaaacgcgtcacaaggtagttgatcgcctgaacggctatctggctggcaggcagagatgagagagccgacgcaagcgcggttagcgccgcgctccctcccgcgaaagagctgaccgccgcaacggcggcgaccgccgcgaccgtcggaagcagaatggatgaaatatatatgaccgtgtggttgcgatagacccaatgaagaattcgccgccgcagggtttcccggcttgccagttgggaggccagacgcggacggccctcgtcgatcagatagtatccgacatggttttttcggggatcaagcggcttgtcttccgcgtcggccatcagaaccgccgcctccgccgcctcttgctcggaaacgccgccgccgcgagccagttcctcgaccgcatggcgatatctgtcctttgtggcaaaatccatgctgcagtacaccccagacgggtcctcgcaaagttttttctcaaccacgcacaagtcttcgaaaacatcccgccaatcaataagagacagttggcgcaaactggctatcgcgctgccgatggaagcgttatgcgcggcctgtcgcgcctgctcgcgaatcgcgctgtcggccaagacgccgccgctcttgcgctcaaaccaactcttaacgtgcgcgagaacctcgctctccccgaagagatgtccggtgaggtgaaacgcgaagtggtcgctaggctcaggctgttctcgctccagttcggacagaagaaaaaaaagactgtcgggggcgagccgcgcggcgaccagaagtcgattggcccagaagtcggcgttctcgcgctctctcagccacactgtcatctgattggttaggtttcttatgaatgagataagcgcgatgcgaagcataagcggcatcgcccacaactcgcccatcttcaaaggactgaccgcttgatattcgttaagatggttcaatatggtgtgacgatccagttggccgtcagtatgcgatacaaggtccgacgctatgcagtaaatcctcggcatgttctgaacctgctcagcggccagcataggcagttctcgataaaaatttccgggcaggttgcgtcgcacatcgtcgtaattggctttgattagatgatagttgtcaagaatccattccgctgaaggggaaacgcgctgttcgagacgcgacgccccggcgagttcacggcggcaaaggtctatctccttaacacaaacatccacaagctcaagaagatggggcttgacgcccatatatgactgaacgcgatgatatccggctagcagtctcgcgtgcacagccaactgcgaggctgtcatgtgttcattcttgtcagatccagattccgcctctgtgacccggtcatggtgaaaaacaaaaatcgagggttgcgtctctccggcgacgcgcatttgcgccaaagcttgatccagcgactccaacggagctttcacgatgacggccgtttcttcattcacaagccatcgggatcgcttcttcgtaaaatcgcgatcctcgctcgactgaaagacataaaccgccagccttgcgacaatcgccccgccggcagccgcaagcaatagtccgactacgcatcgccatgccactatcgcctcgaatgttccaaaagacagatgcgcaattattattccaatcgcgacgcctgcgaccgctcctacgcatgtccaatatctatcctccgcggcgtttttgcgaaccacgccggaggcggtttttgaaattatcgcggttctgcgaaaatgacggcgtcgcaacatcctaaacgccacattagcttcttttcggtccacataaaacccaagcagtattcctgattctttcattgccttgctccaaatcattaaacgttgcgcgcgcgaatcgttgttaacacatgaacaagcgtattatggcgagcttacaaagtttcagccgcgctcctgtcgcagttgttctaatgtgaaaaacagagttaagcttttcgtgttttacttctaatattatagcagaatatactcgctaagagttgtgccatgcgcaaaactatttcttttgcgcatgatgctttttaccaaatagtaaatgggagctttcatttagttcttcgtatatgatacgtattactaatgacggaacgttgaaaaagtattcccttaaaccctttcaaaacttttcgcgctagcgccgatgggaaggcttcgctcttcccatcggcgcgtatcatgcgaaaagatattgagaaaggggtttcatgaggaatcttcttcttaaacatttccacaggagcgtcggtacgggacgcgtcagcgtcccgtaccgacgcgcaaggaaaagtttgaaggattttcaaggaaacttttcaaagtttccttgaaccgccggaggcgctttaatgcggttaagggaaaacttttaaaaaagttttccctcaaaacatttctatgcgcgcggcggagcgggcgcgttcgcgccatcgctccgccgcgctcatgtgaaaagttttgaagagattccaaagagaaactttttcaaaagtttctctttggccgccggaggcgcttttaaaggcggatttactgcgtctatccgtttgtcgcgcttcagtcgcttccgtatttgtctttgactttcttgaaagcgatgtcggccacttcgagcgatttcttgatgtcttcttccgtgtgcgcgcaggaggtgaaccagttgtggtgcgggtggaagatgacgccccggatggcggcctcgccgctgaagagctgtttgagcatgaagttcttctcgcgcgcgaaccgcatgaacggtatgtcgtacggtccggacatgataatctcaaacccgtgggatttgcctacgctgacaaggccgtcgcagagcgccttgccgattttcatcatgtagtttactccgtccagcctctgcatctctttcacggtggcgatggacgccgccatcggaaccatgctgctgaagaacgttcccgtgaacagaacgtgttcggcggtctctttcagtttgttcgttcccagaccggcggaggatcgggtaggtgttggctatggctttggagtagcagaccagatccggctcgtatccgaagtaggcgtggctgccagccatgtcgagcctgaacccggcgcgcacgtcgtccgatatcagaatcaattcttcctgtttgcagactttgccgatggcttcccaccagccgggagcgggcatctgctggtccgcgtatatgcagtggtggtacggcgtcatcatcacgcccgcgacctgccctttgtatgtgttgatcagttccatgaaggagtctaggttgttccattcgaagaagtgaacgtgcgtgcgatcctcgtcgatgatgccgccgtagcttggggtggaccatgcctgagcgccgtgatacgcgccgcgcgcgatcaggattttctttctccccgtgtattcgcgcgccagcctcatgcaccatgtggtgatgtccgcgccgttctttccgtacacgcaccagtccatgcccttggtgagtttaaccatcatctcggcgtactcgatgctgatcggccccggatggctcatgccgtcgcccagttttgcctgttcctgcgccgccgcgtccaccaccgggttgttgtatcccagcaccatcggcccgaaaccgcacatccagtcgatgtactcgtttccgtccgggtcccagtagtggcttccctcgccgcgagtcgcgaaatacggatacgagccggggacggtgaacgcggggtgtttgtgccctatcactccgcccggaatgactttgcatgcccgctcgaaccactcgtatgatttatcaaatttgtaagtttccattttcaagccctccagttgggtatagtcgtccggcgtcaactgatatacaggccgatgcgctccataacgaccgcgaggctttcagccattccgacgtgcccgcgcagccttatgcggcacaggcccagctcttccatgaactctacattggcgttcagcatatcgtacgccagcttgatgtctttaatttccatgacgaccatcgggttcgccgccggccctttggccacagcgaactttccgttgtccagcacgatatgcgccaccggcccgtccggcagcacctttatctccatcggcccgttcggcactttcgacactattccttttacatacgtgtcgtgctctccgacggccttcatgccatagacggccatcatgagtttcacgcgcgtatggaactcgaagaagtccttgtttttgagatcttcttccgacggtctcagatacttctccatgagtttcgtcagcttcatgaactttccgagtttcccgatgttccagaagccccatatcatgggaatgaccgtgccggtgttctctatcattttgttggcggcttccggcgtcggaatcctcagcgagattgtgggcatgctcacagcgcccagtttcgcctcgcatttgccgtctttgaagacgaacctgactcccgccccgccgggcacgtgcatctggatcgtgcagttccagcctttcgtcagctcgcgcgcctccgcgtcatacgcgattatctcctcaagctgaggaaggacggcgttaaggtaaagatacgactttactaattctttttctttttccttatccatcgcggcactcccctgatgaattttgacgggcgcgtcgcagttcgttccgcgacactccgccaacaggcattattattgttattgagatatatttttgcaactttatttaaatcggccctagaacggcgtctatcccgctccaaaccgattgccgccgcgccgtcaatccccgtcaggcagggatatttcgcaaagaatagcgaaatggtcgggcgcttcctgaatcggagcccccttcggatgcccgtccagccgttccgtcccgggcgactgccccagcgtgacgcaagagccgcgcgccgcgttcgttatcacgtggtccagcgtgaacccggagcatgtcctgaacggcgggtcgttttccgcaggaccgctcagatagtaatatttcttgccatccccaacatgcttcagccaaaccgccacgtcgtcttttgcggcgtcccattgaaacgggtccatattcatgtcgcccatgataatcgcaggactgtccgtggccgcaagcgccgggaacccttcgtatccctcgaacaaccttctcaactcttcggcgcggcatccggcgtccgccgccgacggatgcccgttgactatcctcagccgtttcccattaatctccgcgtccgccccgaacacgaccgtctttgtcgagcatccttccggcgtttcgattgtcagcggccagcccggagcgcggcacagttctccgcgcccgcaaccttcaatcgtcccgacgctttttttcactcctatgcactcgtagttggcgcgcccgtcgcacactatcgtataatcatctcccaacagcctgcgaacctgatgcctctctttcctgtcctcaaaccggaagcacacattcttcttgtttttctccacggccgccgcctcgcaccactgaacgtccagaacttcctgcagcgacactatgtcgggcgacagcttggctatcccttccgcgaccttcttctcccattccacgagacacagtttgtaaaaatatttcgggccgcagttcagtatgtccgcgttgccgacgtttgcggtgagaaccctcagcgaagcgggggagggggagcctccgtccgcgagcgcgcggggactgcccgccataaacgccgccgcaactatagccaacgcgattgtttttgccttcattctgaacgcctccggacgcggtcaaccatcgacagttttttaatctgatttcttccggcaaatatttttcttcaagttcgggttcaagcttcgtttttataagggccgctcttgccgccttctttttccataaggcggaaagggccgatggagatgtctttctggacggctttgcacatgtcgtagatagtgagggcggccacggtcgcggcggttagcgcttccatctccacccccgttctgtccatcgctttggcttccgcgtcgataacgattattccagcgtctctgtcggcgctgaactcgacggaaactttcgtcaggctgagaggatggcacagggggataaggtcggatgtttttttcgcggcgcacacggcggcgacgcgggcgacttggaacacgtctcccttggagattccgccggacagtattttgtctatcacgtcgggcctgagccgcacttcgccccggacggttgcgcgccgcgcggtacgttccttttccgacacgtccaccatcgacgctcggcctttttcgtctatgtggctcagttcgcccccgctcattgcgtgtctccgttcgccgagcgcagaatctccaccgcctgttcgggcggaaccggattgatgtagaacccggtgccccactcgaatcccgctatgttggtcaggcgcgggattatctctatgtgccagtggtacgtgtactgtcggctggtgttcacggggatggtgtggatgatgtagttgtacggcgggaagtccagcgccttgtccagatatttgagcgacttctgaaaacactgcgccagagacgcgatgtcggagtcttccaagtccgcgaaattggggtcgtgatgtttcggcacaagccacatctcgaacgggaaccgggacgcgaacggcgcgaaactaataaatcggtcgttctcgctgatgacccttctctggtagtccctctcttcgtctatcatgtcgcagaagacgcagcggtctttgaagtcgaagtattcctgagcgccgttaagctcctcggttattctcttggggacggtaggcgtggcgatgagctgggagtgaggatgagccagcgacgccccggcggactgacccgcgttccggaatatcagtatgtatttgaaccgttcgtcgttctcgaggtctatcatcctttccctgtacatccacattagctgttccatgttttgcggttctagggtggatatggttttgtcgtggtcgggcgtctcgatgaagacctcgtgcgcgccgatgccgttcatgatgtcgtagatgccgcgcgcccgcttgttgaggtcgccctcgattgagagcgcgggatacttgttcgacaccacgcgcacgcgccagccgggcttgttcggctccgtgcacgagtcccgcaccgcgtctatctcaggcggcgtcttgtcttcgttccccggacagaacgggcagaagcccgttttcggaagaggtttcgctgcgatgaaatcgctcggcctgtcgccgcgctcggaggatattatcacccatcgacccaacacggggtcgcgtcttaattccgacatccttaatcgtcccgctttccttgcctagtctcaattatacgcatttgcgccccggtgtataccccgcgcccgcaacccgcaaagcccggccgccccgcataggcgatagcccggctaatgtttccattcgaccgggaacagcatgcgtatgtgcgtgacgtctttcagagctttgtcgtcccgcccggacaccgacggcatccgcgtccactccccgccgccgatccgcgcctgaactatgaacgcccccaaagcctgttcaagcgtttttccctgcggcccgcttttgaaatgtaccggcctgatgaaatgcctgaacagcggagccaccccttcgagcgacgggtccgccgcccccggcggcccgaccaccatccactgcgtcagcagcctcgcgttctccatctccgcgctcatcgcgtggttttcagggattatctgaaaaccgcctatctctcccaccggcgacgtcgagacgcagatgactcccgtgtggttcgccctgattctcccgacgtccgtgtacagcgagccttcgaaccttccaacccccgccaccggtttcaacacctgcccgatgagtttcggttcctctccgggatactttataaggatgaaccctccgaacctgttttcgaagacgatttccgatggatatttctccggctgttcgacgattatcagcagggaatcgccttctgacggcgtataatcctcggcgattggggagtgagcggaaccggcgcgggccgcgagaacccgcgagcctatgaacggcgattcggctcctccgaaaatgctccctccagccgggatattcgttattattgaactgttccgggaatagaaagatttataatccgccggcggagagaagaaatctttgggcaggatgctgaacaccgcgcctctgtcttcgttctgccgcacttttatgtgaatggcgtttacggcggtcgcagcgacagcccccgaagacgcccagccgctggcggtgtacgctcgcggatttatcgtcccggcggccagcaggacttttccggcggccgtccacgaagcgcctccgtcttcgctcacttccaccgctccgcccgccgcgttctccacctttatcctgaaaatttctttcatcgtcgcggagttttcgcctgctacagaggcgtttggcccgcgcgcgtccggaagaaccgccgacgccggagcgcagaccgccgccgccagaaccgccgctattatcgccattttaactttcatctgtttcctccgaaggcttgcggcctcctcgcggctttcgcgcctacagctcgattagctctgccttcatccccgccgtgtcaaaaacggcgatagtcgatttgcctgtcagccatccgcaacactctccgggattcactatcacgggtttgccgtccttgagaacaggctgatgcgtgtgcccgaacagcacggcgtccaccggcagcgccgccatcgcgtcgtccggcataggctcgtgaagcacggcaaaacgcgctccgcccatctctatgaaagccggcggcttctctatccgccctatcttcttaaatgtttcggaaagataaatcaattctccgtcgttgtttccgaacactccgaaacactcctcgaacccggcttccgcgatagctttcacaacgaacggggaaacgatgtcgccgcagtggataagccgcgcggcgccgcgggatttcagcgtcgatatcgccgctcttaaccggtcaaggttgtcgtgagtgtcggatataattcctattaacatacttcgctcctcggcgttcgcgccccgcattctccggttcaatacgcgaatccgcgcaagtttcgcggcgtccccaccgcaaccgcctcgaatcattatatcagcgattaaataaaattagctatcagcgcgctcgctatccgcaaccctgtcatcacgggtggcgtccacaactccgttgcgggcgctctcaatcggcaaaaccgattaagaactgatataatatccgaatcgcggcggcgtcgcgacaaacaataacctgagggccggaacaatgaccagagcggaagaattcggcataaagatagacaggatgcgggagagaatgaaagagcggggctggggcgcgctggcgctatcgcggtcggacaactttgcgtgggccgcttgcggagccagttgccacgtgaacatggccgccgaagcgggcgtcgcctcctttgttctgcttccagaccgatgcgcggtcgtgaccaaccgaatcgagtccgcaagaatcagagacgaggaactcgtcgggctggacgtggagcttgtcgagattccatgggccgacgacaggaacgcgaagatagcgcggatgtgcgcgggggcgggcgtggcggcggcggacatgccggcctccggcttcgtcccggcgggcgaggatttctccgacctgatgatggagttgacggaaagcgagatggacaggttcagggcgctcggagcggacgccggggccgcgctcgagtccgccgcgagggctttgcgtccgggcatgaccgagaacgccgccgccgccgcgctcgcctccgagtgctggacgcgggacgcgcagccgatcgtcgtcctcgtagcttccggaggcaggctcccggcatacaggcatcctctgccgacgcggcagccccttgagcgagccgcaatgcttgtcctctgcgccagaaggggcgggcttgtggcttccgccactcggatggtcagcttcggccccgccggggacgacctccgccgcagacacgccgcctgctgccgcgtcgatgcggctttcaacttgctcacccgacccggcgcgaagatttcctccgttttccgcgacgccaccgccgtttactccagcgaaggcttcgaccacgaatggctccttcaccatcagggcggcccgtgcggctacaagtcaagatacttctgcgccagccccgacacccccggcgaggtcaaacccaattgcgctttcgcatggaacccctccattacaggcacgaaatcagaagacaccataatcgcgtttgccgaccgcgccgaattcatcacccgcacaggcgaatggcccgaactcgaagttgatttccaaggcgcccgcctgtcccgccccgacatccttgagctttagcgcccacacctgcttcgctcttgtccctccgggcgcgccccccaaactcgtttctgcctatgcctaaggatcagccaaaattaatgtggaactttggagtgcggcaattcattgccgctttgcctttccgggaatttattcctagcatcccactccttaagccaccccatccgccctccacaacacacaacctcccaccccccgttgccaaatcgttctccttcgttcataatggcaacataaccgccatgaagctgcgacagaccacacatccgcgaccgaacaactatccctacaacagccgtgcttatacaaaatcaagatcagccaaccagatcaactctaattctgtaaacaggctccgcctgactccaccatatgcggttttgctgatgatactgtgctgcttggtgtggacattgattgcttttgtcagcgcatccgcagatgatttcacgggtttgaaagcgtgtccggatgaagagataaagatgggagaggaagttttaaataagtttctggataatccatctgattctttcagagctgacgagtggtgccctgtttggtcttcgcggaaaccatcatatattgatccccggaaagacttcgatgatatggatgaagaagagcaaaaaaagcatcagcggttgatatatgaatacgatagaagaacgttttgctgtgaactaccgctaaaaatatatcaatacaaaaatcatcttacttccgagtttgcgaagggacttgttttagtagacatagcaaattctcgagacccacgtatcgtccccttgcttgaagacataattaaatctgacataagtccagaattgcgaatgaatgctaccaatgaattatgtaggttggatgtcaaatctcaagctgtgatatcaaacgccataaatgacaatgacattagagttagaggcgtagctgccgggtgtcttctaagatggggttatgaggacaaagcattgtttgtgatggaaaggatcgcgagtggagaagaaaaacagagttactttaacgatattactcgtgacagagaaagaatagatttgtccagaggaaaaatgccgaacccccccagcaatgaatctattcacagagaccacagcgattttcagaactcttgtatacgaaaccttggcgaatatggaaaagacgctgcaattatgctcttgtgcaaacttcttgacgaagcagacaaccaagaaatacaggaatacataatcaaagtattgcgcagaacaaacaatcccaaagctgttgactgcctgactcaacacaaatagcaaatgcgagaagaagcgaagaagaagtggtcaggtttgaaattagcaattttaaaaacgggagcatctatggtaaggccgaggcttttgacagtttacaatgtcgctgataggcgaaatagcatccgggcgggtgaaaatggattcccgctttcgcgggaatgacggcacaagagaaaaggaatgacggcaagaaagaatgaattaagaaacaaaagataaagaatgaaggcacaaaaagaggaatgccggcggggggattgattatcgtttgcgtaatgtctgtttgtgttcaataaacattcgatgtttctactgtgaactctgagcgaaaaaggggactggcagcgcgcgcctcagcgatgcctgtgcctgcttttcgccgctccgccgttgtttctactatgaactcaggggtggattctatatcgagtcgatagctgcggatactttagagatgtcatcgtcggcgtttttgatattgcctgaaaaccgcactatgccttttccatccactacgaacgcggcaatccctttttcatcataaccgtaggttgccgctatctcgcctttccagtccatgaggaacgaaggataacgcggctctttcatgcggtttttcaccatcttcttcacgaaagcgggaacgccctttaagttcgccgcgccgactatgcggatatccttgccggcttttttcccgtcttcccgcccgctatgtttcttgtcgagtttcttgatgatttcagccgcgtcgtcgaatccgtttctgccggtgtagattatgacaaccgtcgatccgcgcagcttgtccagttccaccaactgcatgtgctggtcgttcagtttgaaattcttcgcctttgcgcccgttgcgacatatcctgaatccgaagcgagcgcaaccgaaataacggaggaagcggcgataatcaggctcagacaagttatccgcgcaaacatcgttttcatcttgcgggcgtctcctgtttcacgtcttgttcaacgcgtagatgcagtaattgagatatgtcgcgaacccgacccacagcgcgtatggcaggagtagaaccgacgccgcgcgcgatttcttccacagaaccggaatgagcgcaagcagcgtgatttcaatcgccatcgaatctataaccgccgggcctatcatgcgccgggcaaaaaaaatgtagctccatgcgaggttgaacgccgcgttcatcatgaacagtccggccacaagatagaatcgggaatccccagcgaaaactctccaagctataatcgccgataccgccgtcagtatgtatatcgtcgtccacactatgcctatgacggaacccggcggtgtccatgtcggcagttgtatagtccggtaccagtccatgccggacgacgtgaactgccccccggcgaacgacaacaggagaacgactccgatgataacgatttggttcagtttcatttgacgctcactttgcggcggcggcggccgtcgcggcgcttgccacggaacacaggaatgtcccccaaagcatgtccgccaccgtcatttcccaagaccaccccttgagcgtggccatgttcgtaaggtcgtaaatgccataactgattaatccgaataacgcgcccctgacgagagaattctttatgcgcccgctgccggactccgtatccaccgcgaatatgttcaggcctgccgtcagcgcaacgtaaaccaatatcacggcggtccagtcgggggtcagcccggcgtcgtttcttctggccagttctccgagatgttctttataatagtcgctcataatgacgcccagccagacggagtcaagcgccgccagcgtcgccgcggtcgtcccgattcttttcataaacttccatattttcattgcggcctgtctccttatttcatgctcaacgtcataacgctctggaacttgctaacatagcagtactcattaacgctcaccgctatgacggcggtatcgtccgcccttaagaaatccactaaatgaggatgcctttccgcgtatagctcaaagtaaatgctatcattgacgcggtcgatttccctgaccgctccgagaatggttacggctgcggcgtcatgaacgtcgcctttgctgttgctcctgttgtcaaccagaagcgaaacgcgcggctctccgagcagattgtcgaatttcctcgtgtttcggggcgtcgcaaaaacaagatgtttgagatcgtccgtagccgcaaaaccgattatgtttgaatacggactgccgtccctctgtaccgatgaaagaacagcaaagtactggccgagcaatagatgtttaactttttcaaacaggtctttggaatcgttcacaatatctcaaacctcgccgtgatggatttgtttcacaatcaataataaaacagaataacggcaattttgttccggacgccgaaattccggacgttaattctattaattctattagccggttcacccccacacgcgtggggaagacagcggcaatcgcgccctcgaccacgctcaagccggttcacccccacacgcgtggggaagacatattggcggcgacggcatgatctctaggattcggttcacccccacacgcgtggggaagacgatccgctcacggtcaatcaagtgctgatccacggttcacccccacacgcgtggggaagacgcagacatatgggaacaatttatcttcaacggcggttcacccccacacgcgtggggaagacttgtttgttgatttcctttgttagcttccgggcggttcacccccacacgcgtggggaagacctgcggtgctttctgccatttcaatcgccctccggttcacccccacacgcgtggggaagacgcgtcggcggtcgcaactcaaactgctcgccgcggttcacccccacacgcgtggggaagactgccatccccgaccccgtcagccgacccccgcggttcacccccacacgcgtggggaagactttgcaagtttttgagatgttgtttcttccatcggttcacccccacacgcgtggggaagactatcaatagttgggtttgtgtcatgggcttctcggttcacccccacacgcgtggggaagacccaacggcgggcattccatctgtcaaaggctgcggttcacccccacacgcgtggggaagacgctaaagaagaagccgtaagcgtcgccacccgcggttcacccccacacgcgtggggaagactacgtaagcggcctggtggaagacaacgatggcggttcacccccacacgcgtggggaagactgccacagatagcggcgacggattagagtttacggttcacccccacacgcgtggggaagacgtacatcggttcgccgcacgtggggcatttaccggttcacccccacacgcgtggggaagacgttcaggattttaggcaactgcatagcttcgtcggttcacccccacacgcgtggggaagactttctgcgaaaaaacgctcatcatttcacccccggttcacccccacacgcgtggggaagacggctctcaattttatagacaacatgggaaacacggttcacccccacacgcgtggggaagaccggcgcagatacaggattcgggtattcgagtatcggttcacccccacacgcgtggggaagacacaaacataccgaaaggatcaaagcatgaagacggttcacccccacacgcgtggggaagacttatagctgtacatctggttccagttgacaaacggttcacccccacacgcgtggggaagactgtggcctgtttagtggatttcatatcgcccccggttcacccccacacgcgtggggaagacggcgcgcctcggtcgccgtcgttctcagtcggcggttcacccccacacgcgtggggaagacaccagcatattgtatgccggtttttttaaaacacttttagtagtattgtcaaatcaatcatcttgtgaagactccttattattttgattgatcaaagtctcgtcagtcctttcagttttgtaaggagaaagaacaagggcaagtccatcgacatcgatcattggccgggccggtttcccacaggagcggtaaagatatccttgcggagagcgggtgtcgctccatatctgagtgacgccgccgtcgcgtattttcttgacggctttgttccacagaatatctctaatcctcgcgctcggattgccaaggtagagtcccggtcgcggctctatcatccagcgtgacaagtctcccctcaagctcgccggggatttctccaatatcatcaccagcatctaatacctccgcgatatccggcaagacgcgtttcatcagctttgttttatgaaaaacgtcccgacaagccaatcttacattgcgctcgacatcgacatcgctttcagagcaagtttgaaacgcgagcggaactgctatttccatcttgtacaggtcggcgacgtcatagacgaaggaaagcatcttgccggtatgaatgaatccgatggcaggagaatatcccgccgaaagtattgcagcgtggcacaagccgtaaaggcaggcgaaagcggatgagagcgcccggttgagcgggtcggcctgatcccagttctgcggattgtatattctgccgcgccacatcacgccgttctcttccgcgagcttgcggtatgcctccctgactctgtgcccttccattcctcttacggtgtcgagagaaacggagtcgggaagtttttccggaaagcgcatgttgtacatccggcgaatgacggcgatgcgcgaatccatgttgacgtaaagccccgcttgtcgaagcaagcgtcttgaggagtgagagcctcccgtgctgtgcgcgtaaagacggacgccttgttcgcctgtccagcacacaagcgtgttgttgtcggcaagaaaacgcattgccgattgagtgacggtcgtgccggggcctagcaaaagcagtcctagctggttaatcggaatctcgatagacccgtcggtcccgtgaaatagcaaggctccggccttttcgtccagccttccgtgttcgaggaaaagatggctccatctattttcgaatttcggcagttcacgcaagtccctcatggcggtcatatccgggcgaggctgacaaggccgaaaccgaagcctttgccgccgccgatgccgtttgtcactgcctctttgaatagatccgcgtccgttattgtaataacgccgtcgtaccggacggaacgaagcttttgccctttaaggttttcgttccgcgcgctcacatagacataagacggagttaaggacagagagtttttaacgacggaaaaacccgcgcgttcggctcgcgaatgtagccattcttcaagtttatctgaggccaccgggacacgctttccgttgcgtcttttgccgtcttcgccggtcttggtgcagatttttcgagtcgggtttgcaaggagcctgaaccggtattgcatatcaagggaaaagacaggctcgaaggcttttacttgcggttcggcggagagaagaaacccggcgttgtggaacgcatattgccaatcgggcattgatgcggactgaacgatgattgcggctccgtttcccgcaagagggtcgacgcggaacagaaaaccggtatcaggtttgcgagggacatgcacatggccttttgcgaagccgtcaggcttgaatggcaaaagaaaatccgggtcggctaacgatgcggaagacgaagggaacgccatgcacaagcgctgatggactctgtaaagattgcgcaaccatattcttcccggacgcggtcggtcggggttgtcgccggtgttgattaaaaggcaagaaagaaacatgacgattattccacctcctctgcgctcaggcgtctccgtcgggtttcgagagaccggtatcggactacttcttctcgtttcttgataatttcatcgcgccattgagggtgttcggggtttatccggtcaagccccattccgtgtccgtactctatcatggtgactgcgtcgtgacagagtcggcaaagagagcgcaaatcttcttgagattcattgccgccagcgcggcgatatgtcacatgctgaactgttgtcgcgggagatttgcagaaaacgcaaagtccgtggtcggagttcagccgctcggcccgcgcgttcttgtatgcggagtttgaatagtccgcgcgggaacgtggcggatcgggaactctgctttgcgccgcgtcttccgctatcctgacatctccttctgttccaactgagaggtttttcagcatcacaaaccgaggctgatgggatggcggctcgaacagtatggggacatcgtgccacactaacgcgtcatccggcgcttccggctgttcttgcgtgggcgtccagtcaatcaggcagtcgattgactgcggcgcttcatcttccttgttccttctgcgccaaggaacagatgacaacgccgagatcagatcaggatgcgattccggagggcgctcgctcaatggccgcgatggaacgcagttcttccttcccagatagagcgtccatttcggatttattacggcggtttcgatctgatcgatcactgctgaatctccctgcaaagcgactaaaaaagaagcgtcgcaaagatattctcgacgcgtgagcagcgcgcctttctttgtcttgccctcggcttccgcaatgctcatctgcatttctgcgcccacagtgtggtagtcccaccagcggattccggccctgtcaattctgacgcccataagcaaagagcgaagcttcggcaaccagaatgaggatgcttctgctcgcggaacgccaagcgcggcgcaaataatcccggaaacgccggacttcgtgggggcttcgcaggttctgcggacgacaaacttggactcatgtccgccccacgcttgcaatggcccttctagacggagaaacatcgtgttttcgcccatcatgccacctctgaattaagaacaacctcttttactttgctccagtcatatccgatagcggagacgatggcggggatcagttcgtcaagtgatttgacgttgttatctgagagatcgatttctttattctcctctatcgtctgcaacgggaaccgcaggttcggagagaaccagaatcggttttccggtttaccgtagccggcgtccagatcgaggatgtattgtccgagttgagcgacgctctgagaaacgatgtcgcgccctccgctgatagagaccggccttgcgaatgcattggcataactaacgggcgattttttgagttcaatcaaaatgccgtctggaggattatgcgcggcgaagctgttttgttttcctgtgggattgactgtcgccgcggcgcggatgaaagctcctacggtgtgtgcggcgagttctttgttgcctttcaagtttttaactaaagcctcaaaatcaattgagaaatatttgtaaaagcatgcggacgagaacaaagcttcatcaacatacccggcgcccgcgtcggctcccggaatgtcgtctgcggcaacgtaataatcaacttccggacgggcttcgtgcgttgatatggcgtgagcgacttgaagcgcggcctcgactgttgtgtctttaagaacaccggtttcaagcattcttccattcaaggccatgtcgggaacagcggtcaattcagaaataagccccccgaattccgatgcaagctcatcgtcggacttgccggaactgttttccagcaggtctgccattttcgagatcgcttcttttgtggtgtagaccaacatatcgcttttttcttcgtctttaggagcgatgccgcactttttgagtattgcgacagctctctttttggcgtctgccttgccttggattctttctgaaatcagttttgccaactgtcttgtgcggacgccgccgcatagagatttgaactcctcgctcatccttatgcttcgtttgacgcattggctggaaatgcgcgagcggatgactccgccgaaatagcaggttttcggcgcgccaaggtcgtctctgttcaagttggccggactgtggttctgtatcatgtggatttcgattagcatgttattctccttttcggtttagaaattcttccgcccatctcaggcgggttgactcgcgttcccagatggaaagatcgtcggtcagcttaacccaatcgagattgagtttttttgactcgattctgtctaaagcccattgtaaactcggctcaatgtcgctaagggatgcaagaagcaggttgtcgaaagcctgcctaaggcggtttgactcgtcggaagtctgattgcgcggcatagaactcccaagttgagacgcgagagtctttccttgttcgttggaaacggcgggacgaaaagcgtagagtttcgctatcagccacgccacttcgcggcgcggcgcgcgttgactccgttgtcttaacggccaccatattcctgtgaacaaatcaaatgcggggacggactcgtcaagtttttgtcctgagtgagcgcgcaacaggcttaactcgccggatttaaggttcgtcagcgtgtcgataaagcgctgcgtttcactcatctttttttcctcctttcttcacgcgggattttccggcggattttttttcacgcatatcggggatgacgcgggatatttgtctgcgtctttcgagagccgaagaagtaaaccccggggataaagctccggcaaccgcgctcattaatggtcggtactcgcgcgaggcgtcgtcccatgcggcagggtcgccggttagcaattcgtcaagtcgcgacgaaaccacatgctcaacatgaggacgtatcgttgcggccattgatgaattttctttatcagatctcgaaccgatccgctgtttttctatcagccaactttcttttttccataattcgataagcgtggccgccgtatctgtgcttgcaggttttgacggtattcttatcgttcgttcccagacatctatatttttcgctttgtctgtggagaaacctatcacgagaatcatattgtccgtatttgcgccaatgaatctgtttgattgggatattcgagatgccgtttccggccacggtctatccattctgaatctcccagtcgatgtgggatccggagcttttaatgatttgcgaggttctttgtctgtgtacaaaacatgaggatcatcccataattcgtttcgaagttctccggcgctctggaattcacatgttgttatcaaaaagtcccgtttgccacatcctatacagtctgacatttcgtcatcgggattgtgcagaaagacctttcttgataaggtcgtcaatccgtcaagcaaaggcgcgcaagagctagaattattagtaatcgacggcgcgacccatgagggattgcctatactatcaacatgcatccaatttgaaacgagggtttccttaagattaggcccgatggcaaatatatagattggcggagtcccgttaatgcctgcttttaggtcgggcagaccggacacggaaaacagagggagcctcaatagccccattgcgcaacatgccttgcacaatccgttgatattatctgtcgaatggcggaaatgtcgaaaattgttgccggtaggtatttcttggagcaattccgttgttgatttcttcctattcgctgattgattttgaaaaaatctttttccttctcccagcagattgaaacagtctttttccgcttcaagtttttcaaaccattcggcaggaaatgaatctcctttcaattttgtttcaccttctgtcgggttgcctttgcaccaataaagcacggccaatagaaatctcatgatggcgaaacggtccatagggttgctcgcggctatctggcgtatgcttccggctcgcgtgaacgcttccttaatgccgatggcgcttacttgtccgttgttccatagaacgggaatccattcctcatctactaaattaaacatagcgttgcctcctgttatgtgatatagccgccttattatatcagatacatagtccctttttgtcaatcaattagaatgcgacaaccttgtcatgcattctactcgttgcctgtgacattattgcgcgtcaaattgccgtctttgaaaaatatttaatcggacagtaaaaaaggaatgtcggcagggggtgggattgttcttgttggaattgttatgtcctgcgagcgaaagcaggctatgttccacccgcccggcaaacatttacacgctaaaatcggggactggcagcgcgcgccccagcgatgcctgtgcccgcttttcgccgctctgggaatgaaaggcaaattcggcgactgtgtcggaatactaattgaaaatcccgcttctttccttgattatttatgtgcgctacaaataataccatgtgcagatttggagttttcatttaaacccggatccatcattaggattcgggagcgaatgttcaaagcggaagaaatgcggaccgcaaggcgcgttattcaaagtagaggcggggttgccccgcccggaacaacgccatgatagggcgcggaaaccgcgcccctacagaaaaacaaacatgggcggcgctcacaagctcgtttgtgcgtgagaagcagtgtgccgctataaaaatggcccggttctcaggggtctataaataaagccgggttcaagcatgaatacggcagtttcatttaacgcgtttatgccagttcttaattgattttacccactcgtttgtgtgccatgcacaaaatgttttttttgtgcgtgagcgaaaacagcaacaattcatgagtaatttcaaataataagtcgtttatatcggcgaactattttttagcggcggccagccatttattgtagtctttatcccagccgctttttgccgcgtcggtgtatagcttgatgagcgggtcgaagtcttttatggtaacggggaaaaagcgtatttttgttgttttcataaggcttctgtagggtttcagggtttcggacttgtgggcgctttccatcacgctggacagcctgttgactagcagggtaggggcgttcttgtgtttcattatccccggctgaactgtcgcttccgagcaaacaagctcgttcagtttgcttatcatggcggggttgaacagcttgagggaaaagacgttcatctcgtgcacaagggcgaggtcaacctctttttttgcaagcatgtcgagcgaggccatgccgttgctgttcaatttcacttccttgaaaagcccatcgagaattttgtctccgaacatcttgcggagcggatagtagccgtcgtgttccttgtaggtggctagacgcaggtctttcattttgtcgatgcccgtgattttcgtgtccgagcttgagtagaggcacatccgggcggttttcttgtcgaaaagcgacacgccaagtatcggctcatagccgagtttagtggccagaagaaaaaacggatcggtattttttgtgaacgcgaaatcgagaacgcctttcgcggcgtcgtcggtgaaggccttttcgtcgtcgtaccatttgagttgcatatcgaccttctcgatgtcggcgacgtatttgaccaccgcgccgagaacggttttaagctgctggtcccgctcgtccggccccatgtaaacgccgaagttgtatgtttcagccgcaaaggtcgcgaccgttgacgccgctatcatcgccgccgctatcatcgccgccgccacaatctttttcatagcctccgcctccgttccgagggaaaactcccttgccgcatgttatccggtattttgtccctcattactatattaccgaaattcctcagggtttacacgaaaccgcgaaataattaacagcgccgccggaataataaacaaagaaaaagggagatatgaagagattcagaggcgcatatttgccagcaagcgaaatatagcggaattccgcagtttatgttcaatgtcatataaaaaaccgtttgttcggatgaaataattggtataattcaacaatggaaaatctgagcgacatcgcgaggctgttcgcgctgaatctgccagcagcggcggcggcgtgggtggcgtcggggttgctgacggggaatcgacgcgggcctgagcggttgcttgccgcctgcgtcgtttttgtctccacggtcgcttttaccctgctcctgttgtctatggcgggcgcgattaagtacccgaacgcgttcgcggcgcagatcgtgattctggcggttgttgtcgcggcggcgcgcgtcaaggcgaaatcttcgcgggcggtttactcccctgacgttctttcttttggcgaagcgccgcattcggagccggacgcgatggcgggcgcggcgatggccgcagtgaaaatcatatccgccgtccttttcttgatgatgtgctcgtttgcgctgaccatgccgcctgcccccacggacgcttttctggaccatctggtatttccggcggagtggctgcacgcgggaaagatagttttcgttcagacgctaagcccggaacaggcgacgacctactatccggggaacggcgaactgatgtatctgtggctgatgctgcctctgaacgacgacctgctgtgcgggctgatggagtcggcgggactgctgactgcggcgcttgcggcgcacgtaatagggctgcgggcggggatgccgccgaagagcgcggcgacggcggcggcggcgggttccgcagtcccaattgttcttgcgcaaacccttcaattcggaatagacctttattttacggcatttttcttggccgcagtcgcgtttttgatcccgcggtcggacggcgggcgcgcgaaaggcgacatgctgatggcaggtctagcggcggggctggctgtcggctcgaagtatttcggggcggtgatgctggcgctactggttccgctggtggcggcgcgcgcgcgcggcgagtcatggaaaaaagttctgtccagagcggacgcatttttcgccgccgcagcagccgcaggcatattctggtacgcgcgcaacctttcattgacaggcagcccgttctacccgatggggctggacatattcggatggaaaatattcgagggggcattcgagagggcggcgatgttccggtcatacctgcacatacccgcgtcggacatgggggcgttcgggaagatagtggtcgggcgggcgctcggcggcggcgcggctgcggttttattcggcgcggcgctgattgcgggggcgctgaaagcggctcccggcagggcgactgcggcgcgcgcggtggcgttcgcggcggcagcgggggcgattgcggcgcaggcgcgttaccccggttttttgccggcttcggcggcttctgcgcttccgctggtatcgggagtcctgtttttctcgctgatgtccgcagcgttgaaaacccgccgcgcgccgcatgttcgcttggttatcgcgctagtcccggcggtatttctcctgttctggcatgtgaacccttacaacatcgagaataacgcgaggtttctggctccgggtctgatgcttgccgcgatagggatagggattgcgatgtggaaggggaagtgggaaaggggatggtgggtggtcgcgggcgcgttggcgttgggcaacgtaggggccgcgacgcgtttcggcgcgttcgcgcgggacgcgtttttcggcggggccgggttgccggaatgggtctcaaacgcggctccggcgcttgcgctgttcgctatggcggcgctcgcgggggcggcggcgtttttcgccccggcgggacgaaaacccgctcgcgcgattgtccccgcgatgatggccgccgcggctctgtatttcgcgctcccttacaaatccggccacatggaaagattcagatacgattggtacggcgctcattatctggcgtcaggatggcgggcgctgaattccatcgactcggctttgacggtcgcgtattccggcaactgttcgccgtacggactatacggacacaggctcaaaaacagggtgatatacgcgaatgtggacggcaggcagggcgctgtttttcaccactatgaaaaagacctccgctcgttccccggctacaagccgccctcggaatcggtttggctcaatcacatcttcaggggatatcccgatttcgacgcatggcttgctgtattaataaaggaagatgtggacgttctattcctaacgcgcgagtttgcgcgcgggagagtggaaacgccggtggaagcatattgggcggcggacaatccggacttgtttcatccctatttcattcagggcgacacttttatattcgtaatcaacaaagcaaggttcaaaccggattccccggagcctgtcgaacgagaaacagattcgccggaatagaagaagctgcgagcgacggctgaagatggaatttcgctgaaaaacgagtcaaagagatgttcattgtttgtcgcgccgtgcgcgcggaaccggaagcttttctgacgaaaaatgggagcgctttatgaaagaaatgacgaggcgggattttttgaaggggatggccgcagcgggagcgggtgtggcggcggggatggcggcatggccgttcggcggcgcccgcgcgagcgaggaactgaggatatccgcgcggggggcgttcgtgcgtcagcgcggagagggtttcgcccgagtgcgcgccacatcgctcgagccggggttcaggattcaggggggagcggcggggacggacgcgtttagaatcgaactggcgaatgtccgggcaggcaggctgtcgttttcgggaaaaggagtcgagacggcggagatccgggagtcggatggaatcgtagcgctgagggcgaacgcttcgcggccgggaggcgcagttctggaaaccgcatacaacccggcgcccggcgagcgactgaactttatcgctttcagcgacacgcatctgggggcggacggggcgacggagcagttcgcgcgcgtgcgccgtcaggtcaacttgcgcagaccggttttcgtggtaaacgcgggggacaacgtggatgtggacgaaccagcgcaatggaacgtttttgaaactgagacggcgaaactcgaagctccgctgtttgcgacaatcggcaaccacgacagctacctgtcgaccaagctgtacagggagcggatgggcaatctttattacgcggtgaattacggggacacgcaggttctgatgctcgacaacgcgcagaaacacaacgacgcaacgttgaggatggacgggccgaaaccggacgaacaatgggagtggcttgaggagcagcttgcgcggcccgccgagcacaggttcgtttttttccatttcccggtctacggaaaccgaagcatgcttgacccgatgtacataaggaacacaacgttggaggaaagagaaaaggaagtcgagaggatgatagggatgttccagaaggcgggcgtggagtatgtttgttacgggcacaagcacagcgcgcaaagggaagaaatagaaggaattatatatatacaattaggaggggggggcgcgccgccggacaggacaggggagcgggacttgaacttcgttcatttctttgtggacgaaaaaggcgcgagggattacgccgttcacattcattccgaccccggagagatcacaaggatagagttctgcgaattgagggagacgctcccggtcggcgcgaaagagccgataatcgtccacggagtggcaggagacaggcttgtggcggtggagccggaggcgagaatactttccggccccggcacgatagaggatggttgcgtgctatcggcggacgcgcccggagagacgttgttaggatgttcgctcggtgaactatacgtcgaagctatgttaaatatagcataagcaaatatccaaatagataaaagattattttgaaaatctatgtcatttctgacatagatttctattaatttctcattctattgacacctcttttcatcgtgggtattttgaagtggttatgagaagaaactgtgtaagctaaaggtgtatttgtttgattaaaaataaatcctatgagaggggtgagttcacacacatgaagctgaccagaagaacgtttctgaaagtttcgggcgcgacggtagccggactgtcgctcagcggaatcggtttcgggttcaagagttcccgagcctatgccgcagagttgcgcacaaaaggcgcgacggtaacaaccaccatctgcccgtactgttcggtcagttgcagcatcttggtgcacgctgttgacggcaagataatcaacaccgaaggcgacccggatgctccgatcaaccgaggcgcgctatgcagcaaaggcgcgtcgctgtatcacctcgcggtgaacaacgacagagtgactaagccgttgtatcgcgagccgtacggcaaggaatggaaagaagtgtcgtgggactgggcgctcgacgagatcgcaaagcggataaagaagagccgcgacgcgagttttgccgagaagaacgccaaaggagagacggtgaaccgcacggaaggaatcgcgtccgtagggagcgccgcgctggacaacgaggagtgctacatctaccaaaaattcctcagaggtttgggcttggtgtatatagaacaccaagcccgcatatgacactcggctactgtagcggctctgggagagtcgttcggccgaggagcaatgaccaatcactggatcgatttcagcaacagcgatgtcgtgttggtgatgggaagcaacgcagcggaaaaccatccgatttcattcaaatgggttacgaaggcgatggagaaaggcgggaaacttatcagcgtcgacccgcgtttcaccaagacgtcttcaaaggcggatatttacgcccgccttcgctccgggacggacattccgttcttgggcggcatgattaagtatattctggacaacgatctgatcgacaagttctatgtccagaattacacgaacgcttcgttcctaatcaacaaggacttcaagttcgaggacgggctgttctccggatacaacgctgaaaaacgcaattatgacaaggcgacgtgggcgtatcagaaagacgccaacggcgtggtaataaaggatccctcgatgcaggatccgaactgcgtatatcagcttctgaagaagcattattcccgctacgacatcgacaaagtggcggaagtgacgggcacgaccaaggacgagcttttaaaggtctataagacgtacacttccacatccggtcccgcgaagtccggaaccatcctgtacgcgatgggttggacgcagcatacggtgggaacccagaacatcaggactatgtcgataattcagttgttgctgggcaacatgggagtggccggcggcggcgtgaacgcgctgcgcggcgagtcaaacgtgcaaggctcgacggacttcgcccttctattccacatactgcccggctatctgaagttcccactcggcacacaagccacgctggcggacttcctgaaggccaccacgccgacgacggcggagcctcagagccttaactggtggagccacaccccgaagtacatggtcagcctgcttaaggcattctacggcgaatcagcgacgaaggaaaacgatttcggatacggctggctgccgaagggcgatgtgggagccaactactcgtggcttaacctgttcgaccagatgagcaagggcaaattctccggattcttcgcgtgggggatgaacccggcatgcagcagcgcgaacgccggaaaagtccgcaaagctctcggcgaactcgactggctggtgaacgtgaatctgttcccgaacgagacgggacagttctggaaaggcccggggatggacccgagcaagataaagaccgcggtgttcatgcttccctgcgcggcgtcggtggaaaaagaaggcagcatcagcaacagcggacgttgggcgcagtggcgctacaaagccgtcaatcctccgggagaagcgatgccggacgccgagattatcgacggcctcattcaccgcttgaaagagctatacaagacggaaggcggagcattcccggccccgatactcggactagcgtgggattacgaggaaaacggacacctaagctctcgcaagatagcccgcgaggttaacggctattacacgcaggacgtggccggagcggacggcgctgtgttaaaaaaggggacgcaggttacgaacttcgtcggcctcaaggacgacggctcgaccgcctgcggcaactggctgtacagcggaagttatcccgaagccggaaacatgatgatgcgccgggacaacaacgacgcgtcgggcatcgggctttactccaactggtcgtggtgctggccgttgaaccgccgcatcatatacaaccgcgcgtcggtagacctcgacggaaacccgcgccgccccgaactgcccgtcatcaagtgggacggagccaaatgggtcggagacatcgcggacaacgcggctcccccgatgtcggacaaagaaaaaggcaaactgccttttatcatgacatgggaaggagtaggcaagatattcggtcccggactggccgaaggcccgttcccggaacactacgaaccgctcgaatgcccggtcgagaacaacgctttcagcggacagagaatcaacccgaccgtcaagctgttcaacgaaaagggcgagggcgagggcaaggacgtttatttgacctgcgatccgcgctatccgttcgtttgctccacgtacagggttgtcgagcactggcagaccggactcatgacccgctggaacaagcagcttgtcgaactggctccgcagaacttcgtcgagatgagcaaagagctggctgccctcaagggaataaagaacggcgaaatggtcacaatcaagtcggcgcgcggccagatcgacgtcgtcgcgatggtcacatcgagattcaaacctttcacaatcaaaggccagaccgttcatcaggtaggaaccacatggcacttcggctggtgcgcgcctgaaaacggcggagacaccgcgaacctgctcacgcccaccgtgggcgacgctaacaccatgatccctgaatccaaggcgttcatggtgaatatagaaaggaaggggtgatcgggaatggcatacgcaaaactttttgactcttcgaaatgcatcgcctgccgcggttgccagaaagcctgcaagaactggaatcaggacgccgcggaaaagacgaacaaccgaggaacccaccagaacccgcccgacctttctcaccagacccgcaccgtggtcagattcaaggaacaggaaggcggagacctcggaatcatctggacgttcttcaaggactcctgccgccactgcatagagccggcctgcaagatgatcgccgacggcacggatgacaaagccgtcgtcatcaccgacacgggcgccgtcatatacaatgagcggacagctaaggtcgaagggatgaattgcggctacaacatcccgaaacaggaaaaagacggagcgccgtacgttaagtgcacgctctgtttcgaccggatcacgaacggcctgcagccggcgtgcgtcaccacttgcccgaccggagcgctcgaattcggcaagcgcgaggacattgttaaactcgccctccagcgcgtcgaagaggccaagaaacgctacccggacgctcatatttcgagcgattacaaggaagtcaactacattcaggtcttccactacaaggaagagatgttcgaaatgtacgcggacagggagaaacagcagaagatcaaaatggcttcccgccgcgatcttctcaatccgaagaaagcagccggaatgatctcgaagctgctgggctgacattttaagaagcacaagcgaaacgcaaggggcggctttcgggccgccccttttttattatatcaaaagcatccgaggcgaatggcggcaataaatgctgattgtcacaaatgcgtttgcgcgtatatacgaagaattgaatgaaggttcccattaactattttggtaaaaagcataatgcgcaaagaaaaaagtttgcgcatggcgcgcttggtagcgggtggaatcatttaataacatgtatagcctaatgacaaacgttgccaattgcggttttagctgtaggggcaattcatgaattgcccgctgattgggctgtcgcctttttcctttatcgcacatccgggcaacccggcgggtcgccacctacgggcggatgtcgggtatattattggcaacatcagaagaggcgcgcttcacattttgccgaaggggtcgtcccgccagtcggacatgaacgacaacagcttgtccatgtcgggagtctcgcctgtcatcacgtaatagcctgagcagcacacgcccatgaggagggccgtttggggatcggttccgagagcgagggcgagggagaaagccgcgttgaaatggtctccggctccggttgtgattacggggcgttttgtgtgtgggccgtcctgatggtaggttttgccgtcgacgacggtgacggcgaattcgacgggatgcaccacgacggagtagatgtcgagcgcgcgggagatttcctcgcaggcgcgggcggcggcgtccggcccggaagcgtcggcggagacgccgagcgcggacgctatctgcccagcctcgcgtccgttcagcccaagtatgactttatagcaacttgaaaacttcggaactatgctcaacatccttttaatgtcggacaactcccgtttctgggggtcggcaaggtcgatgaagaaaaagcggtcgccggctttggaaagtttcgggcagacttccgcgatgatattttcccagatgtcggacatgaacgggagcatgctccagttgacgagagcgagcaagtgggcctcttgcagcaatctgacaaaacgctcttttccgacatcctccagaatcctgtcccaagtgacgtctgatacgggggccatctttcccaccatgatttttccgtcgaggaactccaccgcgtccgtatggcaaggctctgcgatggatattacgtttgcggcgtctttcagggggcgaaagacaggatggatatccggcctgccgagcgttccgatataagtcgtcgagacaccgagagaggcgatggcgttcgccataatcgggccgttgccgccgatcttcactcgctgcggcacgtactctatgttgccgctcttgcccgcgtagctttttatcctttcggcgtagttggacatcagttcgagccgctcgtattcggagttgttcttgcgggtgtccaccacgtggactatctcgtctatgaatccgtccaagccgacgacgcagcgtctgtttccgggggatttcttttttgtggatatgttcttattgagccgcgaaacaagctctctttcggtttgttgtgacattttatctctccgcgcgcagtgtcgataaaatcggatatagtatataacggcgtagcggcgaagtgaaggaaacgccgtccgaaatagcgggggattagcgcatggaaggaaagatatacatcaaaggcggaacagtttttgacggggtcggcgggccgggcgtcaggagcgacgtctacatagaaggcgatacgataaaggctgtgggcgacgaggcgagcgccatggcccgcgcggatgatcccgcgctttcatccatcgacgccacaggcaagatggtgtgtccgggcttcattgatatgcacgcgcattcggatttcaagatagccgtgaacggctcaatggaggcgaagctgaggcagggggttacgacagcggttgtgggctcgtgcggtttttccggagcgccgatgaacgacaggctgaggagggatttcaggggatacctctccggcatgtttggaacagagtgtcagtttgaatgggattccaccgccgggtatatcgaacatatcaaaaggatcggaatcggagcgaatgtgtttctgcagaccgggttcggcaatttgaggcagatgacgatggggcgttcgccgttaaaagcgaacgcggggcagatagaagcaatgaagtcgttgctggataagtcgcttgacgaaggcgcgagagggttttccgccgggctggcgtatccgatgcagatgttttcgtcgagagaagaagtgaaggctctctgcgggacggcggcgaaacgcggcgcgctgttcagcgttcatgtgagaaacgagatagacaagcttgaggaagcgaaccgggaggcaatcgggatagcgatggaaacaggagtgtctctgcagatatcgcatcacaaggcaatcctgagccgaaactggggcaagccgcgcaaaacgatgaagatgatggaggaggcgcgcgcgcgcggcgtggacgtcgaggcggatgtctatccgttcacggcgttttccaacatactcgccacgacgatgctgctgaacgagccggggatggaggaaaaggtgattttcctcgaactgaaaaaattgaagcagtacgaggggcgcacgctggcggatgttatgaaggacacgggcaagggcgctaaagccgccgcgctccatgtgcttctaaaagaaggtttcagcaacgccccggtcgcgggcgaattcatatccgaagacgacctgcggttcatcatgtcgcatcctcttagcagcataggatcggacggggtggagacggacgagggggcgaaggcgcatccccggctgttctccacgacggtcaggttcctgaagcattatgtcattggagagaagctgatgccgatgggagaggccgtaagaaaaatgacgtctatgcccgcaaggaaaatcggggctgcccgcaggggattgataaaggaaggttatcttgcggacatagtggtgttcgaccctgacgcgcttcgggataattccacgtatgaggaccccgtcagatatccgtgcgggttcgacgcggtgattgtaaacggcgaaattgccgttatgaaggatgagattacaagcgcgcgcgcaggaaccgtgctttgactggcagagtcagaaaaataatagttcttttatatactagataaaatatataaatatgttatattatacggattcgcgcggatgtccgacgggcagacgcgcttgtcaagtccgggtttttcttgcgaaaaatccgggttaggcgcgcaaccgaccggagagagttttgagggtaatcggcggcgatttgaagagatccaagctgttcggcccggaggatggagacgacagcataagagtcacatacgaccgagtcagggagagcatattcaacctgaccgggccgatggacggagcaaggtttctggacctgttcgccggagcggggagtgtgggaatagaggcgttaagccggggagcggagagagtggtgtttgtggatcactcgtcgaaagcgatacgactggtagagcgcaacgtcagtaaattcgggcttgagggcaaggttgaaattataaggatggacgcaagggaatacgtcgccggaggggcggcgaggggaattttcgatctgattttcctcgacccgccgtatgacggggggatgttcgaggcgacgatggaatcgccggggctggcggacatgctggcggacggcggcaggattgtcggacagcacggagcgaaaccggtttgcggggagttcggaagtctttcaatgcgggactccagaaggtacggctcaagctgggtgacggtctggaaaaacattaaggacatcgaaaaatgaacatggcggcgtatccgggaagtttcgacccgatgaccaacggtcacatggatatagtgcagcgatcggcctcggtgttcgacgagcttatcgtcgcgatttccaacaacccgtccaaaaaacatcttttctcgattcaggagaggatggaaatagcgaaggaactgacgaaggacatcgccaatgtgaaggtggagagtttcgacacgttgcttgtggattatgtgaaggcgtgcggagcgaaagcggttgtgcgcgggctgcgcgcggtcacggacttcgagatggagttccagatggcgctggtgaacaaaagactggctccgaacgttgagacggtgtttctggtgacgagcacggagcattctttcataagctcctcgataataaaggaagtggcgtctttcggcggggacgtgagttctcttgtgtcgccgatggtggacgcgaagctgaaggaaagatattcaaagaagtgagagcgggataaggcgactagggaaggcgggccgggattgaagaaagaaaaactggcaaggtttcagaagttgctggacacgctggaatcgcatctggacagcggttttttcctttcatttataggaaaaatcgttgtggacgaaaagaagatatacgcgacgctcaatgaaatgaggtcgatgaggatagagatggaggccgaggcggaagaggactcggcaagggcgacggcggagaaaatgtcttcgcctgagggggccggcaaaggggacgtcggggccggcgcggaaatgtatgccctccagacgcttgacaatctggagcaaacattgcacaaagttatgagcacggtgaaagaaggaagaaagtttttagagagaaaaatggagcgggaggtgaaagaagatggcgcttccgaaatataagaaatcgcgttcgagcacacgaagccagaaggcgcagtggaaaagaggcttgaagacgccgacgctgacggaatgtccgcagtgccacgaagtgaagatgacgcatcgcgcatgcgcgaaatgcggctactacaagggcaagactgttcttgtgaccaaagtcgagggataacggaggcaggacgataaatgtcagacatgatagatcgcctgaagaaagtgatcatggcggagcttggcgtgtcggaggacaggatagtgatggaggcgtcgttcagggacgacctcggagccgactcgcgcaagatattcgacttgataatggccgtcgaggacgagttcggcatagaagtgccggacgaggacgcggtaatgatagtcacggtgggagacgccgccgattatctgaaaaaacggcaggtgtgacccgttgaacctttcccccctcgaagttcgggacagagaaggattcccgaggccgctcgaggacttgctgggaatcatcggcgtggatttcaacgaccagtcgggtttgagggcggcgcttacgcatccgtcgtactggggttcgtgtgtgctgccggaacgcgagcggcttgaacgcagctacgagcggctcgaattccttggcgactccgttctagctctttccatctgcgaacgcctgttcaaatcttttccggaagacgatcagggcgcgatgagcaaggccaaggcgcacattgtcagcaaaggcgttttgctgaaagccgcgcgaagaatcgagcttggagatttcatccgggtcggcaagggcgtcgaggagtctgccggcagagaccacacggcgttcgtggtcgattgtttcgaggcgctgataggggccgtcttcatcgaccaaggattcgagagggcgcgcgatttcgtcatcgagcggatgtctgagttccttgaggaggcgggcggcgaggccgcgcgcgacttcaagacggaacttcaggaatacgctcagaaacgccacaagactctccctcgatatgttatgatatccgagaacggcccggaccaccgcaagatgttcaaagtggaggtcttcatcaacggggcctcgcacggaaccggcgaggggcgaagcaaaaaggaagcggagacggaggcggcgcgcgcggcgatactcggcatgagcgccgacggctcctgagacgataaaaaacaacaaggcccgcaatgtatctgaaatcggtgtcaatgttcggattcaagacgttcgcccgccgaacggtctttgagttccgcgagggcgtcactgcggtggtcggcccgaacggcagcggaaaaagcaatctggtggacgcgataacttgggcgctcggcgaacagagcatgcgctcgatccggggccgcaagctcgaagaagtcgtctatcacggcagcgccagccgcaagcccctcggcttcgccgaagtcgtcctcactttcgacaacgacgacggctattttccgctaccccaaagcgaaatctcgataacccgaaggtactttaaatccggcgagagcgagttcgccatcaacaacgagtcttgcaggctcaaggacattcaggagttgctgatcgacaccggactgtccaccacgaactattcgataatcaatcagggcgacgtcgagtacgtcatcgacttgtccccctcgcagcggcgggagatattcgacgaggctgccgggataaataaatacaaaatcgaaaaaaccaaaacgctgtcgaaaatcaaagacacgaacatcaacatctcccggctgaaagacattctgaccgagatctccgaatcgctggggcctttgaaagagcaggcggaaaaggcgaagcggtacgacgagatagtcgaggagatggaaaggctgaagctgggcgttttcgcgtccgagataaggcgtttgaagagccgcttggaacagctttccgtcgagggagagggccttaaggcaaagagggcggaagggctgaagaaagtcggcgagctgagacagtccagagagaatgtgggtgcgggcatagacgcggcgcgggcggaaatcgactcggctctgcgcgagttggcggacatcggctcgaaactggggcgcgcggaggaatccgcgaggctgctggcccgcgcggtggaagacgcggacagaagggccgccgccgctgacatcgaaaaagccgatatcgtaaagcaggagaaaaatctcgaaaaagacatattagaccttcgcgcgaaggccgagcagaaaaaacgcaggctcgatgaagccgccgccgaacttgaaaacgccacaaaacaatcctccgacgatctgaagctgaacaggaaagacctgacagagaagcgcgacgggcttctgccggaagccgaggatttgaagaagctggaggcgagccttgcgggcgagctggcggtggcgaaagacaggcttgcggggatggccgcgcgagtgaagtctctgacctccgcccgcgattccgcgcgggacaggctgtcggcggcgcgggaacgcggcaagtccgagagcgaaaaagtttcgcaatttgaaaaacaaatccgcgaaaaagaatcgcaggcggaaaagcttcgcgcgggcatcgaggaaacttccgccgcgcgggataaagcgcggtcggcgcttgatgcggtcgtcgcggagcgcaacgctttgtcggcgcgggtcgaagctatcgaacgcgtagcgggcctgatggccgtgagcgaaaaagggaaacaaaccgcccggctcgccgacgagattgagatcaaaaccgggttcgagcctgccgcgcgccgcgctttgaacgagcttttcaacgcttctatttcgacgtccgcggacatagggaaggcgctcgaagaggccgccgacggcggggccgcgaggctgattcttgactggttctcaggagccggggcggcggctgcggcggctctcaaaaagaaaaaatgggcgaaacggctcctgtcggacgcggtttcggtcaaatccgcagcgccgaacgagttgctgaatgtattatcaatgttcgcgattgtcgacaccgacgcggagatgaaagaggcgatttcggaactgccttcgggagccggggttgtgagggcggacggagcggcgtgttttatcaacgggacgctgttcacgggcgaagctctgccgaccagcgaggccgcaagagagcgcgtggccgagctaaagtccgaactcgaaaagaagaacgcggaagtcaaggcggcccgcgccgcgcgcgaagaggctgaaaagaaatacgcgtcgctgaggtcgtcgtccgaagcgtctggaaaagaatttaacaaactgaatatcgaactggccgcggcgcgcgagcgcgcggcggcggctgtggagcgcgtcgaaattctgacgaaagacctagaatcggcggaaaaagcgctggccgaatgcgcgtcaaccggaggcggctcagagtcggatgtcgccaagctcgaatcgaagttcaaggaagtttcagaaaagagaaagagcctcgaagccgagttgaagacggcgcagtcggggctggacgagatagcggacgcgttcaggaaacgggagatgcgcgaggttgatctgcgcgtcgagatgggggaactgaggcgggagatagaggcggcgggcgacgccgagaagtacaggcaggcggagttggagcgggtgcgaaggagaagcggggatatcgacgcggagaagtcgaagctgtcggcggacaggctccggacttccgaagagatgaaagcgggcgaggcgctggcgaaggagcttggggccgcgcgcgccgccgcggaatccgcgctcgcgcagaaacggaccgctctcaaaggcatggaagacgaaagcctgcggctgcgcggcgagatacacgctgttgaaacccgactggaagaactcaaagaagcgatgctggacagcgagatgaagtgcgcgcgcgctgaaacgcaactcgaagagatcagaaggcagttctcggaggagttcgacgatgtctccgaggagcgggcgcttgaggaaaccgcagacggcggcccggccggaaaaggacgctacctcgcgctgaaaaaagagctcgagacgcttcagccggtgaacatgctggctatcggcgaatacgaggagaagtccaacagattcgacctgctcagcgagcagataggggatcttgaagacgcgcgcgcgaccctgatggacatagtgaacgagtatgacgaccgcagccgagcgcagttcatggagacgttcgagcgggtgagggagaagtttcaggagacgttcgtcgagatgttcggcggcggcgaggcggagctgatgcttgtcggcgacggcgaccctctcgaatccggcgtggacgtttcagtgcagattcccggaaaaaggatgagggcgataacccttctgtccggcggcgaaaaagccctttgcgcgctggttctgattttctccatactcaaagtgaaacccagcccgttctacgtgctggacgaggttgacgccgggcttgacgaaagcaatattgtgcggttccgcgaaatgctgaaaaaacattcgaccaacagccagtttctggtcgtcacccacaacaaaggaacgctggtgggagccgatcaattgttcggcataacaatggacaaacaggaaggatactcgaagctccttacggtatccatggaataacaaccatgttcgacagattgaagaagggtctcaagaagaccagcgacagcttacggcataaaatatcagccgccatagggcgggccgtgaagatagacgacgagttctgcgagaggctggaggaagcgctgctgttgtcggacgttggcgcgtccaccgccgcgctgatcgtagatgaaatcaaaagcaaagcggtcgaaaaacgcccgccggacgcggaagcgctaaacgcgctcatcgtggacatactctccgagatactcgaatcgggcgctgcggcggagcctttggcccccgggctgaacgtcgtcatgatgatgggcgtgaacggctccgggaaaacgacgacgataggcaagctggcgatgcgctataaagccgaagggcgcaaggtgatgctggcggcctgcgacacgttccgggcggcggcttccgagcagcttgagatatgggccaagcggtcggacgtgccgataataaggcagagagagggcgcggatccctcggcggtcatgtacgacgcgatacaggccgcgcgcgcgcgcggcgccgacctgcttatagccgacaccgccggacgccttcacactcaatccaacctgatgcgcgaactccagaaaatccaccgcgtggcggtggaaaaagccggggtcgagaacttcagagcgtggctcgtcctcgattccaccatcggaagaaactcatacaatcaggttcagcagttcggacaggccgtcccgatagacgccctcgtgctgacgaagatggacggaacggcgcgcggcggggtcgtattctccatactcaaggaatggcgcatgccgattatgttcgtcggcgtcggggaaaagatggaagacctgctgccgttcaacgcctccgaattttcccgcgcgctgctcggcgacgcggttgacccggtctaaacctgaaaaactgtataaatccgaaaaactgtataatcctgataaaccgacacaagagactgtcgcttttggcgattggggaaaaaccctttgaaaagggttctttccccaacccccttttcccaaacttctcaattttgttttatgataactgatgcgcaataaaaaatataaccatcggatgtttctatcaaagaacagacgtctattattatcaacccaaagagcgacagaggaacctccccccattggttggacagaaaatgggggtttataaggtggggtttggtgtaggttttagtcttttgcctttgactttgcctgttcctgacgcacgcatcatgcgtgcgcgcgcgcgtgtacgtgtgctcacacgcgaggagttttcccaagtccccgcattcgattgttttgctttgccacctcctgtcgccgggcggtttttctctctgtaaaacgcccctccattcctctgtggcgcgttttcttttacgccgccacaatatcactcgccgcgctgtttcgcaagccctgcgggccaatttcgacgctccggtcaaagtacacctgggcgggcgtcgcgtagcccagcgcctggtgagggcgcacttcgttgtaccagcgcaaatatctcgaaatctcacgctccgcttcccatacgtcggcgtaatccttcaggtaaacctcctcgtatttcaccgaccgccacagccgctccacgaagatgttgtccatgtaccgcccgcgcccatccatgctgatggcgacgctcctgtccagcagtggctttgtgaacgcttcgctggtgaactgcgcgccctggtcgctgttgaatatctccggccatccgcgcgaaagcgcctcttccagcgcttccacgcaaaacgccgcgtctatgaaaatgctcagccgccacgagagcacgtaccggctgtaccagtccatgatcgccgccagatacgcaaccctgtgcgcatgcggatgtacgtgatgtccgtggcccacacctggtcgggacgctctattgccagccccgccagcaggtacggatacttgcgggccgcggcgtcgggaatgctggtgcgcggcttcggatacaccgccgcaagccccatcaccctcatcagccgctctatgcgcttgtgattcacctcgtgccccatgtttcgcagcagcttcgtgaccttcggcgaccccagactcggatgctccgtgtacagctcgtcaatcagcttcatcaggctcctgttgtactcgctttccccgcatggctcgtagtagtaactcgaccgcgccagtcccatcagtttgcattgccgccacaccggcagcgcctctctcgaagggtcgatcagccgccgtttctgctcagtcggcaagtccagatttttttttaagccagtccaattcgaccttctgctgcccgatctgccggtaaagctcccccacatgctcctcccggcctttgtcctctctggcccgcttgccgttgaatacacccggcaattcttccagcaccttcttcttccactgcccgatctggttcggatgcacctcgtaaatcttcgccagctcggcaaccgttttctgccccttcagcgcctcaagcgccaccttggccttgaacgctggggtgaatttcttcctcatcgctcatccctccaaaactggattctacaccaccacggtttccaccttaaacctctgtccagtttttggggggaagctcaagacgattgacaacaagaccgcccgatatggtatagtaacaccatgcgagaacagcaaaaataaaggaggcgtaaataggcggctgtaccgggatattctagcaattttagttgtttagcattgtggtggttcccggttttgctctgattcatctcggggtgactgatggaaatattgaaatgcaggaatagctttatcactacagacaccacatcaaggcaaaatgacaggctcatttattgacattttagatgtttgcgaataatgttaggtgaaatccttatttgtgaaggtgaaaaatggaagcatggtggggtgcattaagctcttttgaaaaggtattttgggctgttgctgttgtattctcggtgtttttcttgctccagctcatattcactttcgcagggggcgacgatatcgactccggagatgtagatccgggcagcgacacgcatagcgatttatttcttggtttttttaccatcagaaacatggtggcgtttttcctcggtttctcttggtttggtttggcctgcttggagaaaggcttgtcgaagtcgatcacggtaatcatcgccggtgtttgcggagttgtaaccgtagcgttggtgatgctgcttatgaaagggctttcttccatgaaaagcagcggaactctgtcgctgaaaaacgccgtcggaaaagaaggctctgtaacgatagcagtgcccgaaaacatgaatggcagaggaaaggtcaatattgttcttcagggaagactggtagagcttgatgcggcaacaaagggagataggctaaataaaggagaacagataaaagtaatagagacggtcggggatcaaaccttggtgattgaaaaaatcaaataatgtttcttgcggaggattattaaatgtacatgcttatcggtcttgttgtagtagcaattgtgcttttcgcgactttgctcgccgcgatgactaggtaccggcggtgtccgtcggaccagatcatggtcgtttatggcaaagtggcgaagggtcaaacgtcgaagtgcatacacggtggcgcagcgttcgtctggccgctttttcaggcttgcgaatatcttgacctcacgccgatgacaatcgacatcggtctgaaaaacgcgttgtcgaatcagaatatcagggtggatgtcccatcccgattcacaataggcatttccaccaacccatcggttatgacggtagccgcagaacgccttctcagcatgagcaaggagcaaattgaggaaaatgccaaagacattattttcgggcaacttcgcgctaccatagcaacgatgagtattgaagagatcaatgcgaaacgtgaaaagttcgaagaagaagtaatgaagaatgttgaatctgaacttgagaagctcggtctcaagctaatcaatgtaaacatcaccgacatctccgacgaatcgggatacatagaggcgttagggaaaaaagcggctgccgaggctataaacaaagccaaggtggaagtggcccagcaggaaagagacggcaaaaccggcgaagcgaacgcgcaacagcagatgcgcgttaatattgcaaacgccgaaaaagacggcctgaccggagaggcgaacgcgcaacagcagatgcgcgttaatattgcaaatgccgaaagggacggcaaaaccggcgaagcgaacgcgcaacagcagatgcgcgttaatattgcaaatgctgaaagggacggcaaaaccggcgaagcgaacgcgcaacagcagatgcgcgttaacgttgccactgccaatgccgaagccattaaaggcgagaacactgctaaagtagtcgaggccaactcgaacgctgacagacgagaagcggaagccgaagcagagagaaaggccgtcgccgcggaaaaaaccaaagccgccgaggccgccaccctagcctacatagccgagaaaaaagcggaggaagctagggctgatagagaaaaatccacccgcaaagccgatgtggttgtgccggctgagatagaaaaagaaaaattaatcatagaatcggaagcgataaaggaacaacaaacacttaaaggacagggtgaaggcgcggaaataagagagcggctgagcggagaagcggcaggcatccaagaaatcctaaagaagaaggccgagggcttcgcggagatggtaaaagccgcgaacggcgacgcggaaaaagccgccatgttgctcatagtggagcagttgccggaaatcgtaaaagcgcaggcagaagcgataagcaacattaaattcgacaagatcgtagtgtgggactgcggcggcggcggcaatggcggcggctcgacagcgtccaactggttaggcagtttcacgaaaatgctgcctgcgatgcacgatgtctgcgagatggctggagtcagccttcccgaatttcttggaaagatcaaagatcaggaaaagaaggaaggcgaaagcagcccggaaaaccaaccgaatcgaccgtaaagcatgaccaagactcgctcagaaatgggtgaatgaccattttgggtttttgccaatccatcgcgcatccattatgggcagaacgaaaagaactggtggctaataatggcgactggtcgtgttattacagaagtcatcgacgaagtagaaacgtattttagaatcaaaagagaaaatcgagcagattataattgtgaaggcgcatattagcaatgttgttcttattgttattattaacagcggttattatcgaagtggcatacaatgtaataaagaaaagacatcgcgcgtttaaaaatttagcatttgtaaatgttattgtggcatggttcgttatgatgctcacaagagatgtgtctgatgaagatctatcatttaagctttgcataaatccaattgctttgattgttttaattataaatctttttgtctttattaaatactatttagcgttggcgatcaagacaagaagaaaaaacattgcgtttaagcaaacatatcttgatgaacaagatgtaaacattgccataaaggttgttgcgtctataagctttattttattatgtttagccattgtctacatgatattaacaggaaacaatgggcggtgactttgagaaaaacggacacccgtcgcgaaatgcagcgctgcaagtccccgtttttcgctatgcgttcacaatatggttgggagcggcgctcggcgcaatgggtaaaatcaaatggcgcttcggctattgctcctatttttgtgattattgaacagtattgcgcaaatccggcttagtaatttgatgtgaagtcgatcatgaaatcgttggtgtcggcgaaccagcgggtgttgatgcgcgtgccgtagaggtcgtagtcgacgttgaagttcttggtggagaaatggttgtttttcagattgtaaatgaagtccgtgcggagtctgcattttttgttgacggtgtaatcgaggccggaagacaggctgctgatggttgcttcgcggatgtcataagtcgccgacagggcggaattccacttaagccctttggacttcgacacgtacaacataagctggcgtttgacggtggaggagccggtgtatctgctgtcagtgaaattatagcgggcctgaatcaacattccctgccggggtctgtggccgatgcgggcggaggcggacaggcgggcgctgggcctgccttcggtgtcgccgccaagcccggtggctgtgttccaatcaatgctggtcttttttgacagggcgattgaagggctgacggcggtgagggtggtgtaggccgccgtcacggcgtcggtataatcgaagttgtccatttttatgtgagagcttacggaatagccgacgccccgcgtgttgccattgacgaactttctgttgccgtcgaagctgacgagggcgttcatggatgattggccgtagtcgccgtctccagttctgcggcctgagaggtagccgtttattctggttttcttaatgccgcccgcggctccgagccggaatcctttcgccccggaaaggtcgtagtccatctgaagggtttgcgatctcatgccggcggcgtagcgcgacatggacatggtgtagcccctgtctccgccgaacaggttgcgcatgttgaactggccgcttgtctgggtgttcatgcggaacgactgtcgcaggtccgcggaatatgtgttcgagctgtccccgtggtagttcaaatcgacgaagcctttgaagtcgcgggcttccttgtagcgcacgttggcgccgactttccagtccgcgtttgagccgtagctgacgttccggatgcgccatttgccggtggtgtattttttgctggtgttggtccagaaagggagggacattactttgttgccttttacccacatggtggcgcgccacgcttcgtactggtcgccgggatagatgcgcatgcgggcggcggtcacggcgtttgcggtgagataaggctcttcgtagatgtagaacgcctgtcccatcagaggctcttgggccgtctcgttgagttcttcgccgaccagataaaaagtcctgacgccgctttgggtttgagtgaggatgcccgccgcgcgatccaagtcgaacttaagttggtcgcctgaaaatgaagcgccgtccatgcctgtgatctgagcttcgacgcgctggtcgagcaggtcgccggtttcttcaatgtccgtcaatatagggttggtggacggcgaagccgtgtcgcccggcagcgcggaagcggatttcttcatagtggaagcgacgatgccgccttctgcgtagaagatgtgcgatttcacgtccacccgtatcgagtcggcttgaaagcgaaggttgccgtgaagaagctcgacctgtccgtcgcagtaaatcacttttcggtctatgtcgaacattatgtagtttgcggtgattgtgtagtggaggttgagagcgcgcgcgggcacagcggcggacagagtcgcgagaacggccaatgccgttgccgccgcaataacaatttttcttttcagcaaatcagacactataagacaacctgccgcagttaaacatgcccgaaaacattccgggtacgccaatatagcgcgcggattcctccgcaaccgtattgtatcattattgaaaagcaatgtcagcgagggaaaaaataatatatggataatagatttttagtaatttgcggtgaaaccatttttttgcaaaaaacaggtttccccgcgccccttccgaaaaaaactcttggtcgccgattttgctgaacttcgttctttgcaaaatcggcttttttcttagatcgatgaaaaccagatgtatggcgatgttgatacaaacttaacataacagagattccagttttgagacgatgcgggaggcggcatggccgtcccagagttcggggactcggccctgtttccagtcgccgcgcagggcggcggcggcggcgcgggagattttttcggcgtcggagccgacgaggatgttcgttccgacgtcaacggtgacgggccgctcggtgttttcgcggattgtggcgcacgggacgcccagccaagtggtttcctcctgaatgccgccggaatcggtgaggacgatcttggcgttcatggtaagggagaggaattccagatatccgagaggttccatgatgaagatttttccggcgggaattgaagcgccgtcccacgctgcgaaatggtcgtccagcccgaatctgcggatgttgttgacagttcgtggatgcgccggaaaaaagaccggagctatggaggcggtggcctcaagggcggatatgatgcgggagaatgtcgccgggtcgtccacgttggagggtctgtgaagggtgagggcggcgtaatcgccggagaaatcgccgagagggcggaccgcctcgccgttcttcactcgccgcgcgttttccgccagagtgtctatcataacgttgccgacgaagaaaatgttgtcttccgcgacgccttcccgcaggaggttgtcgcgtccgctcggttcggtgacgaagaggtaagatgaaatcgagtcggtgaggacgcggttgatttcttcgggcattgagcggtcgaagctgcggagaccggcttccacatgggcgaccggtatcatgagttttgcggacacgagcgagcaggcgagggtcgagttgacgtcgccgaccactagaacgaggtcgggttttaattcgagcacggctttttcgaaggctaccatgacggcggcggtctgggccgcgtggctgccggagccgacctctaggaaaacgtcgggccgggggatgttcaactcgtcgaaaaaactctgagacatattgtggtcgtagtgctggccggtgtggacgaggatggggcgcagggaggggctttctgccattgcgcgcataatcggagccactttcacgaagttcggtctcgcccccgcgacgatgaagattttcttttttgtcgactgagtcatgatttcatccatgccggcctccgatttcaacgaggaaggctccgcttctgagcgttttcggcggctgccagtatttcatcggtaaacttcttgaaattaggacattttttccgcacggttttaggcgagagttttttaaacagattgacgccgtcaacggtctttttatagctgtaattttttttatatttcctaaaaagttccttgagaagttttgccggggggttatcgaagtcgactgtctccggatttccgcattcaactggcagtttgatcccgcgagggaatatatcgggatcgctgagcaaccatgcttccagctcatgaacggcgaaatgctggcggaatctaggtctgcattcttccggcaaagattctatgattctttttctcgcaaaatcgattttttcatcgacagtgtttccgcctttgcacttttcgggcaatccataaaggtcgagcaagccgaagatggcgattacttcgctattatcaagatgtaattgagattttttgccggcgcgttttaaataatcgccgcaacccgaaaaaacaataggttcgacgctgatcctgttgtccagcttggaatccagccattttttaagaaaatcaggaagtgttttgttttcggtatcgccttcgacgaaaagaagtattttcatggatcatccgccgatttctctatcgagccataatctgccgagggtgtattcctccagccatttggaaagggaatcgcggtcgagtcttttcgcagtggtcgcgccgtcttttttttccacgaccacgactgattccggcatgtcggagaaggcgcttaaaagttcgggagaatgagtggaaacaataagttgagttctgtttgacgcgtctttgataagctccgcgatgatgccgagcatagaagggtgcattccaagttcaggttcgtcgatacagattatcggcgggggttccggggagagaagaatcgcggaaagcatcaggaaaagaatcgttccgtcagacaggtcggcgggtgaaagctcgcgtttaagcgttttcgagcgccatttcatatagattctgccgttttcgagaggcgggaatgtcagttcttcaaagtcgtcgccgaaagccgcttcgagagtgttgttaaactgttctttgaactctttattgccggtgtaaagagtgtgaaggacggcaatgaggttatcgccgttcgattccaacaccttttccgacctcgcgacagtcgaatgtctagccgctgcttccgggccatgattcagatttcggtaaaatgaacagtcattaaaaaaattgatgaacctatatatttgtaattcagtataatttttccatccacttttgattgaatccatattaaaaaacatggattcgctatctttaaaaatatcgaacacagccgctggaatatcgctattaatttctttcgtgaaatattcttttccatctctgttaataatcgtgcctgtgtaattggataaatcatcatcattggcaatattctcgacatggagtttttctaattcaatgccatattcgcttgaggctctcaattgttcaagttttaaactataaacatatcgtcttttcactaaatcggatgcgttttcttccgggttttcgttgaaaccaaaacgatgagagcgtattgttgcctcaaaaccgatttcctttgcggttccattccaaagaatggggatcatgccgccgtgttttttcataatggcgtcgcggagtttgccggagacggcgtcggaaagaagttcaagggcgctgattatgttgcttttgccgctggagttggggccgatgaggatgtttataggcataaggtctaggttgagttttttcaaggacctgaaaccttcgactttgaaattattgataatcatgaacaaatctcccggagccggctaaaagcctgacaacttatatggaattttacatatttccggcggatagcgccatcggagcgaaaaaagagggcgcggggagaggcggacgggggttttaatttgatttgataatgagatataatatcagacttaaccgcgcgacgggaactgcgcgcgaggtattgatgttgagattgttgccgcgtcgccacgcggatttttaataggcgcgcggtcgcggcggaacataatgatgaaatcaaaagcaaggataattctcggagcgctggcggtttttgtgacggtcgtttccggggcgatgacgcgcgtcgccggggcggctccggctgtttcgtatatgtccgcgtcagaggtcaagcccggaatggaaggatacgggctgacggtgttcgaggggctggagatatcgaaattcccggtgaaagttaaaggagttatgccgggggccggggtcagcggggggccgctgatactgatagagttgaccgggccggagcgcgagaaatacggcggagtgtcaatggggatgagcggttccccgatatatatcggcgacaggcttgtcggcgcgctttcaatgacgtttccgatgacggaccaccatctgggaggagttacggatatcgcgtccatgctgaaggcggcggagtatgacgcgccgagggccgggacggtcgagttcgacgcgcctttcgagcatggcggaaaggtttttacgagaataagttatgaatccggcagggacgagatagaggggacattatttgcgagcgcggcggcggctccggcgatggttcgcggggtgacggcgcgaacgatgccttttgcaaagagaatattcgagggaacgggaatagaagtgacggacgcgggcggcgcatgggctggggcgaaaacgggacgcaccgtaatcggacccggctcggagataaaacccggcagttcggtggccgtgctgcttctgacgggagatatggaagtgtcagcggcgggaacggtgacgcacgtggacggcaagcaagccctgatgttcgggcatccgctgttcaggaagggcgatgtaaggtatctgctggcggacgcgccggtgctcgcggtggcgcgaggcactgacatgtcgttcaaagccgccgcgaccggggcgctgcgaggagagataactcaggaccgcggccccgctcttgtgggacggctggacagttttcctctgctgataccattcgacataaccgtcactgacggagatatcggcaagacggagaagtattcgttcaaggtggcgcgggacgaggatttgttgagcaatctggcggcgatggccgcgctgcaaagtctcgacaacaccatcgacaggctcggcaaaggaacctccagagtgtcgttttccataggatgctcggcctgcgaaaaaccggtcgaaagggaaaacatgttttacgacggggacgacatcgcggcgttgtctctggtggagttcgtgacggcgcttcaattgcttaaggacaacaaatacgcggacgcggaagcgcgcaagttgaacctgaacgtcgagatagattcgaggaactcttacgcgcttatagaaaaagtggagatagacggcggggacgaagagaagccggaagcggaagaaacgaagacgggcgaaaaagagcccgccgccgagccggaagctaaagccgaagaaaaagagccgaacgcggctggagaaaaggcaaacaaagaaaaggcaagtccgcccgtggtgaagcgcggacagaagctggggctgaaagtgggggtgcggccgtttaggagcgagacggtcgaggaaaaaatatggttgaaagtgccagccgacatagcgcccggacgcgcggtgataagcgttttctccggagccagagagcttccgtcggcggctccggaaatgttgctgataaaaatccaagtcgaggggcaggaaagacaagacgaaaaagaccctcatttccttcgcgaaagaaagaaggagaaaagtctggatgaagtgttgaaggagttttcgagtcgtccgatgaacaacgagcttgtggcgaacatcgagtcattagggttctccgggccggacgacgaagacgacgaagagtatgaagacgaagaccggaacaggggcggaagagcgggcaagctgacgggctgggctttggacggcgtggcgtcgataagagtggaggtggaggacgagctgccgaaggtttctccgaaaagaaacatcagaaaatccagaataaatactctcaagggagaaaaatgataaatggaaaagaagaaaaaggccgccgctaggcagaagagggcgcaggccccggatgtggcggttgttatggggagcgattccgaccttaaaagcatgacggcgtgttttgaaacgctggacagtttcggcgtgtcgtacgaggcgcatatcgcgtcggcgcaccgcacgcacgactatgtcaaaagaatagtgacgacgtttgacaacaatggcggaaaagtgatgatagcggcggcgggggcggcggcgcacctgccgggagtggtcgcggcgctcacgaacctgccggtgatcggggtgccgatggagtcgaagatgctggggctggactcgctgttgtcgatagctcagatgcccgccgggatgccggtggcgacggtggccgtgggcggatgcaagaacgcggctctgctggctgttcagatactggctctgggcaagccggagcttgcctcgcgctacagcaggttcagggcgcagcaggctgaggctgtaattaagaaatccgaacgcctgaggactttgggctacaggaactacttttcggagggcggttcgacgagatgatagacaggtacacatacgagccgatgcgctcgatctggtcggaagagaacaagttcaggaagtggctggacgtggagatagccgcgtgcgaggcgtggcacgcgaagggaaaaattcccgcgcgagcgctgtcgacgatcaaaaagaaggcggcgttcacaattcagcgcatagacgagatagagaaagagaccgatcacgacgtgatagcgtttctgacgaacgtggcggagaatgtcgggccggactcgagatttatacacgtggggatgacgtcgtcggacgtgctggacacggcgcaggcgctccgcatgcgcgagtctgcggacgctctcatctcggaggtcaaggaaatccgcgtcattttagagcgccgcgcgatagagcacaaattcaccgtcatggtgggccgcacgcacggcatacacgccgagccgatgactttcggaatgaagatgctgctgtggctggccgagatggggcgcaaccttgaaaggctcgaaagggcgcgcgagacgatatctgtcggcaagatttcaggcgcggtgggcacttactcgaacctgccccccgatgtcgaagaagacacctgccgaaggcttgggcttaaggccgcgcctatcgccacgcaggtgattcagagggacaggcacgccgagttcatgtcgactctggcggtggtcggcggcactatcgagaagattgccaccgaagttcgcgggcttcagcgaacggacattcgagaggcggaggagttcttcgcgaagggccagaaaggctcgtcggcgatgcctcacaagaggaacccgatcacagccgagcgtctggccgggcttgcccgcgtgttgcgcgccaacgcccacgccgccatggaaaacatggctctctggcacgagcgcgacatcacccattcgtctgtggaaagggtgataattccggatagttgcatactgcttcacctatatgctggtcaggctgaaacgccttctggacaagctgttggtgtatccggacgcgatgcttgaaaacctcaacaagacgaggggacttgatattctcgcagcgggtgatgctggcgctggtgggcaagggagccgacgagggagcaggcgtaccacatcgtgcagcgcaacgcgatgagggtgtgggcggagaaggcggagtttaagtcgctgttgtcggctgacgccgaagtggcggcgctgttgaaacccgccgagttggaggagtgttttgaagtggagtatttcataaggcacgtggacgaaatatacgagagatttttcccgaagaagaaagcgcgggcgcggaaggcgaaggaatagcccgcgcggggtaaagacatggggaaaggcgctttgataagagagacgccggggatgcgggtatatcagtctgacgcgtcccccgaccggttcgcggtcgagttcacgaacgacgcggtggaatgctgggcggaaaggtcgcccatgtttccgggcaaaggcgcgttgaacatgaagatcgccgccgcgctcttcaagaggcttgaagattgcggagtggcgacacatttcgcgcgcgagacgggcgagtccgagatggagaccgtcgcggcgcggataatcccggcccgcgtggcggtgcgcaacatggtttcagatgagttcgccgcccgcacgcgtctcgccgcaggctcgatactccctgtgaccataatcgaattcaacgtgaagatggacgcggtcaaggagtttcagccggggatgcgcgcgcgcgtctacacggaagtgacggacggcgacgtgaagacgatgagaacgagggcggctcaagtcaacaaggctctgcagccgtttctttacaagcgcgggatcgctctggcggattactatctcgaattcgggaaggactcgaacgactttttccgcgtgtgcggggcgctcacgccggatacttgctcgttctggagcagggacacgctggagaagctggacaaggacagatatctgcggccgctgagaggctctgagacggcggccggcagcgtgttgaaggcgctgacagcgtaagactgtcggccggacgatttttgaaataaccgccgaaggcggcgcgagacgcgcccggcggaagcgcagaatttgaggccatagaaaaatgtcgatgcaaagaccgcaaccgcaacagcagaaaccgcagccggtactgccttcgctcgaagagaacatagcgccgaaagaaaggctgaacgcgtacctgaggtatctggccgagcacaacgggtcggacgtccatttcaaagggaacagcccggtgttcttccgtctggacggaaggctccgccctgccgacccgcgctccgtccttcccccgcagattgtggacgtgatggcgaaatccatcatgaacgagaggcagttgcgcgagttcgtggagacgaacgagtgcgacatgtcatacagtctgccgggagtgtcgagattccgcgtaaacgtgttcaagcagagcgggcttaccggggcggtgctgagaacaatccctctaaaaatactgaccatcaaagaactggcgctgccggacactctggaagagctttcagaccgcccgaaggggctgatacttgtaaccggcccgacgggcagcggcaagtccacaactcttgcggcgatgatagaccacataaatcagactcggcgagagcacatcctgactatcgaggaccccattgaatttctgcacagggacaagaactgcagcgtctgccagagggaggtcgggcaggacaccaagtcgttcgaccgcgcgctgcgctcggcgctgcgcgaagacccggacgtgatactcgtcggcgagcttcgcactctggagacgatctcgatggctataacagcggcggaaaccgggcacctcgtgttcgccacactgcacacgacaggcgcggttcagaccataaacagggtcatcgacgtgttcccgccgcaccagcagcagcagataagaatgcagctttcggtgactctgcaaagcgtggtgtctcagacgcttgtgcccgcggcgacggggaaaggccgcgtcgtcgcgcatgaaataatggtcatcaactcggccatatcgagtcttattcgagagaacaaggtcttcatgattcatcaggcgattcaggccggcaaggagcaggggatgcacacgctggaccagcacttggccgaactgatgaaacgacggctcgtcaagttcgaagacgcggtggcgaaatgccagaacgtccctgaattctccaaactagtgggcagaggataacagcagatgcatataagagagcttctggacgtaatgctccagttcgacgcgtccgaccttcacatgaaagtcggcaaccatccgatgttgaggatagacgggaaaatcgcgcttcagacgaatctggcgaaactcacgccccagacgatggacgagctgataaacagcatgctcgacgaggagcacgcgaaggaatacagggagacgtgggagtccgacttcgcgtacgactatccgggcaaggcgaggttccgcgtcaacgtgttccatcagagagggacgaaggccgccgtgctgcgagtcatccctacaaaagttcggtcgatagaggacttgagcctgccgccggtggtgaagaagttctgcgagcgcccgcgcgggcttatcctagtgacaggacccacagggagcggcaagtccaccactctagcggcaatgatagaccacataaacgcgacccgcgaagaacatataataacgatcgaggatccgatagagttcgtccaccagaacaagaagagcctcgtcaatcagcgcgaagtcggacgggacacagggtcgttctcggcggcgttgaagagcgcgctcagacaggacccggacgtggtgcttatcggcgaaatgagagatcttgagaccatttccaccgcgatcaccaccgctgagacggggcaccttgtgctcggcacgctacacacgacgggcgcggcccagacggtcgaccgcatcatcgacgtttttcctcccgaacagcagtcgcagataaggatgcaggtgtcgcagaacatcgaggggataatctcgcagactctggtccgcagggcggcagggcgcgggcgcgtcgcagcattcgagataatggttcccacaggggcgctgcgcaacctcatccgcgacggaaaaacctaccaactccccgcttccattcaaacgggaaagaacatcggcatgctctctctcgaacaagccctttatgagttgatgaagaaaaacatcatcaccaaagaggacgcgatgaacaagtctatggacagggactatctgttggagctgatgacgggcatacagaaacagccgcagagaagaacaacctgaacacggcaggcaagggcggcggaacgcccgcgccgcgccggagcgcgaactcgatggacaacccgcaacgcgtcacagtcgtcatcccgaactggaacggagagaaatatatcggcgaatgtcttggcgcgctcgcgagccagactctgggcgggcagcgagttattgtgatagacaacgcgtcgcgggacggctcccgcgaaataataaaaaacaatcatcccgacgtggaattaatcgaatcgagcgccaatgagggatttgcccgcgcggtgaacaaaggcatccgcgcggcggacaccgagttcgtggcgctgctgaacaacgacgcggttccagacccggactggctcgaaaaagcggtcgcggcgctggattctaatcacggcttcgattcggtcgcgtgcaagatagttttttacgacgaccctaaaacaatcgactcggcgggggatgagtacgcgccgtggggagccgtctccaaccgggggcgcggacagagagacgggggggattacaaccttccggcgcgggtgttcgggccatgcgcggccgcggcgctctacaggaaatcgctgttcgacgagatagggctgttcgacgagaatttcttcgcgtattacgaggacacggatttgaaccttcgggcggctcttgcgggccgcaagtgtttctacgcgcccggcgcgaaagttagacatcgctattcggcaagcacgagcggcaaggcgcggaagctgggcgtcgaggaagtgtatatacatctgaccggcgtggccgtgaaggggttgccgcttggagctgccgcatttttgagggccgccatttttcacggagcgattcttttctttttcgttcttgctcgtctgcgcaaacgcaacaggctgccttcggttccgctcataaaattcatgtccgccatgttggcgcagcggagcgcgacggcgggagcggcgagggtgacagccgtagagttgaggcgtttattccgggcggagctgttgacggcggacacggtagcgcgcggagacggcgatgtttgacattgattttttgttattctaatatgacgctgggagaaaataatgactctggcgataattgttcttttcgcactgctgttggctagcgcgctcttttcggcgtccgagacggctctggtgacgatgagcaggcaccggctcaaggccctcaaagaggagcaccccgcgcgagcgggagcgatcgacaactggttgaccaaaccaaacaacatgctcacttcgattttaataggtcttaacggcgtaaacctgctggccgcgataatgaccgaaaacataaccgaagaactgctggggcacactgattggccttcatgggtcggtcccgccataagtttcggggtggcgtcgtttgtgataatcgctttctgcgaaatacttccgaagatggtcggatataacagttcggaccgcgtggtcataaaaatgatcaagccgatttcgacgtttcacgctattgtgtcgccgataggcaaagtgttcgtgatgatagccaatctgacgctcaggatatttaccgggaagtcaggcccggcggaaggcccgttcatcacccagtcggagattctgggaattgtggacgatgccggagagcagggcatcatagacaaaactgaaagagaaatgatacgcagcgtggtcgaattcggcgaaacgcaggtgagggaagtgatgacgccgaggccggacatgcggatggctccggcggacactacggtggaccgcatggcggttctgatggaagagcacaagcattcccgcattccgatttacgaaggcggggaggacaacgtcatcggcgtggtcaactcaaggactctgttgcgcgctctgaaagacggacgcgactcggacccagtgaaagattacgtccacaaggcttatttcgtgccggaatccaagatggtggatgatctccttcatgattttcagaagaagcggacgcatctggcgatagtcatcgacgaatacggatgcacggcgggactagtgacgattgaagacctccttgaggaaatcgtcggggagatatgggacgagtacgacaccgaagagcctctttacagatgggtggactcggacactttgcgcgtggacgctaggatcgacatcgcggaactgaacgaaattctcgacgcggagttcaacgacgacgaagagttcgaaacgctaggcggattgatttttcatacgatgggcaaagttcccaaacaggaagagacagtcgatatcgaaggttacgagatgaaagtggaacggatggtcgggcggaggatagcgtcggtgattatcaaaagatcgtcttatccggggccgcaatccgagaacggcgagaaatgagactcgccgctccgcgaagtcgcggaatagactaatcaacaaaggtgaacgcgaatggaaatggcggtagggcttgctctgttcggagtgtttctggctttcgcggcgctgatgtatctggggaaactgcccgcgctgatagcgttgccgctgatggccgcgacgctgtacatcgtgggcggagctttctaccacggcctttcattcagctatccgggatcgaacgccgtcgttctggcgcgggaatttttcagagttgtgatagaagagggaatgccgaggctgtggccggtggttattacagtcgtgctcggcgcggcgctcgccgaactgctcaagtcgagcggagcaaccacgacgatcatcagatgggcgtccgaactgggcggcgacaacaagatcgtgtcgtgcgtgctgctgaccggcgtgacggcgctgttattctcgtcattggtgggcctcggagcggtcattatggtggcgtctataatgctgccgatcctcatgagcatcggcgtgactcccgcagtcgcaggctctctgttcctgttcggaatgagcctcggcggagcgttgaacccggtcaactggaagttttacactgagataatgacggcaagctcgacagtgagcgcgatcgacgctcagaatcagttgataggttttattctgcctttcatgatcccgttcgcgctggtggtcctcggttttatcattttgcacggacgtcggggtcacacatccttctgggcggttccgccgggaggaggcgcggcggcggcaggggacgcggggcgggccgggattctggcggttctcacgccgcttattcctctctctctcgttctgggattcaacattgccagccggttgagaggcggcgcaggatacgcgttcccgataaacacggcgctgcttgcgggaatgctgtactgcctgatcgtgtccggccgcggcccgaacggcaggattcagaggttgacgaaagcggtgttcgacgggataacgggcgtcgctcccgtggtggcgctaatcatagggataggcatggtgatacgcgttgtgtgggacccggcggtcggcgcatacatggagcctgtgatgaggcggatagcgccgagcgcgccggttctctacgtgattgttttcaccgcgctcgcgccgttggctttgtaccgggggcctttgaacgtgtggggcatgggaatagggatagcggcgataatgatttccaccggcgcgctgccgccgatggcggtagtcgcggcgttctactcggtggggatgattcagggcgtgagcgacccgaccaacacgcacaatgtctggatcgcgggttttctgggagaggacgttcaggtcttcacccggaaaacgctggcatggacatgggggctggccgtggcgggccttgccatttcggcgtttatgttcctgagatagcgcgcgatattttaggccgcgcgcgggacggaagccggaaagaatataataagaatatgcctgaaaagaagcccacatacgaagagttggagaagcaggtcgcggagttgcgcgcgcggctggaatcgtcccccgataactcttcatatccgcctccgacaagtctgtcggggcgaatcgactcggcagctttcagagaaatcgctgaaaacatccccgttctgatgattgaaatagacatgcagggaaaagtcgcatacgcaaacaccgccgttctggagatgtacggttacacgagggccgatttggggaaacacgtgaccgagttcgtgccggttgcggatgtgaaaatggagattgacacgctcgccagagggatggcggggaaacaggacataatcgtttcaagaatcaagacggcctctggagaaatcaggcatgtgatcaacaattcgttcccgatatatgaaaacggagagcagtccggaatcaccgtgttcgggatagacattactagacaaaaagaggcggtggaggcgctcagggagagcgaggacagatacaaagcgctgttcgagcagtctctggacgctgtgtacgtatcgacgcgggaaggcattgtgctggaagccaatcaggcggcgctttcgctgctcggctatgagagagaagaaatagtaaatagaaatgtgttgaagacatacgtggacgaaagagatcgcgagccgcttcagactgcgcttgagacccgcggctccgtcaggaattacgacgtcaaactcaggcacaagagcggacgcgagatagactgcaaaataactgcgaccgcgcgccgtgggccggacggctcggtcgttggatatcagggcgtcataagagatatgacggaacagataaagatggaaaacgccctgagggagagagaggagtatttcaggctcatagtagaaaccatgtacgacggcataacggtgttagacgaaaagggagccatgacgtatgcgaacaaccgcgcgttggaaatgctcgggcgcgaacgcggcggagtcgttggaaagtcgataacaaatttcctcgacgcgaataatttggccctatttaaaaaacaattctcaaggagaaagctcggcgagggcggaaaatacgagttgacgttcacccggtctgacggctcgcctctgcattcgctcgtgtctgccaaccctcttttcgacgctgtgggagggttttcaggcagtttcgcggtcatcactgacataacggagagaaggaaggcagaggaacaactgctcagccatcaagaaaggcttgaggaaacagtgaaggaacgcacggcggagttcagcgaagttattgaagagttgaggaaggaaatctcgaaccggcggcgcatggaggaagatctgagggattcgagggatcgccttgagaccactctgaaggcgatgccggatatattattcgaagtgaatcttgaagggcgaatagtcggctaccatgcttcgagatcagacaggctctacgcgccgcccgaggcttttatcggaaaaaaaccaacagacgtgctgcctccggaagccgcggaagcgctaaacaaggcggtcaacaaaacattcgagacgggcgagaaatccgccgcgacgtattctctgccatatgcggacggggagatgtatttcgaggcaatacactcgctgaaaggcgatttgaattcgccgaacaggacggtcatatcggtcgtgcgcgatattacacagcgccgacgcgccgaacaatcgctcagggagtccgaactgaggtatagacttactatggactcgatggccgacgcgattcatgtcgtcgacagaaatttcaacatcgttcttttcaacaaaactatgaaggaatggaacgcgcaaagcggtttgccgacggacatcgcgggccggaacgttttcgatgttttttcttttctcgatgactccgtccgggaggaatacaaatcggttttcaccagcggcaacatgatgctttccgaagagatcaacgaaatcgacggggaaacgataataacggagacccgcaagataccgatattcgaaaaagacgccgtcgccagagttgtgacggtgatgagagacgtgacgacgcgaaggcgggcggaagaggcgttgcgctacaacttcgacttccagagcgtcgttatggatatatcggcgagtttcgtgggcgtcggggcggagaatatagattcggccgtgaatgacgcgctcacaaggctcggggaattcctgcaggtcgatcgcagctatctgttccgtcttaccgacgacggattgttcgtcgataacacgcatgaatggtgcgcggagggaatcagctccgagattgagaacagcaaaaatattccgttggaaacgctcaaatggctgatgcccaagttcatcaggggagaaaccatagctatagacgatgtgtccgcgattcctgaaaacgctgaagttgaaaaaagcattttcaacgcgcaaaacatcaagtcgctgattatgttccccctgtattccaacgaaaagctttccggattcatggggcttgattcggtgaagaccagaagaagatggaagagggaccacagcgcgttgctgtcggtggtggcggagatattcgccaacgcgcttatgaggcatcaagcggaaaccgcgctcaaacggagcgaacaaaggttggacgccatcataagcaacacgccgaacgtggcggtcgagggatacgatgtcgagggccgggttatttactggaacaacgcggcggaatcggttttcggatggtccgccgaggagatgatagggagaactctggaaggagcgactctcgactctgcggcaaccgaggcttttcacattctgcttaaggagatgaatgaaagcaaccttccttccggcccgtccgaatggatttgcaacaagaaagacggctccagcgtcgtagtgtattctatgatatttccgatagacgtaggggacggaaacaaagagttcatctgtatggatgtggacataaccgggatgaaagaggcggaagaggcgctcagggagagcgaggagagataccggactctggcggaagccgccgaagacttcattttcatagtcgatcgagacgacatcgtgagatacaccaatagtttcgccgcgcgtcaacttggcatgactccggaacagacgataggggttacaagagcggagttgttcggctcgccggacgccgacaggcagaaaaagagcctcgacagggtttttgaatccggagaatcgttctacatagaaaccgtcacgcagtttcccgaccgggagttctggctgggttcgaggcttgttcccatcaaatcccccgacggtcgggtgtcctccgtgctgggcatatcgcgcgatataaccgacaggaagaggatagagcaggaaaagattaacttcctcagttcaatatctcacgagctgaggacgccgctgtcgctgatactcggatatagcgagatgttgctcaaggaggatctgccgcacgccgccaaaaagaaaatcaaaaccatcaacgaaagaggccggcagcagctcaagctggtcgaagagcttatcacgctggacgcattcgagagcggaacgacgacctacgatatggccgagatcaacatatacaacttcctcgaggcgcggctgaacgaaacgcgccttatgatagagagcatcgtccggcgcaggttccgaacgtcggaatactccttcaagaaggaggtgtccgaatcgctgaaaggcgtcatcgtcaaatgcgacgatggcagaattcggcagacgctggacaacctaatagaaaacgcggtgaagtattcgacgccggagaggctgcagttcgccgtgtcggcgacccgcgaggacggtttcgtggagataagcgtttcggaccgagggatcggaatcgcgtccgctgacctgaagaacattttcaagcctttcttccaagtcaggaaaggctcgcatcctgtttcggacggagtgggaaagggtctaagcattgtcaaggagttcattgaggcgcacggaggacggataaaagtcgaatcggttcccggagaaggctcgacgttctcgttcactattccgattctaaagactgtggagcatgtggaatcgcgcagggtgaacaggattctggttgtggacgatgacggcgacctgttggacttggtgaagacgatgctgctttccgaaggattcgacgttgcggtggcgtcgaatgaaacagagttgttcgaggagatggcggcttttgatccgcaacttgtgatgttggacgtgcagttgccggggctaagcggcgcggaactgtgcggaaagattaagagcggcccggctccggctcccatggtgttcctgttcagcgcgatgccgcgcgcccggatcgaggctctcgctcgcgagatcggagcggacggcgcggtttcgaaacccatcaacatagactcattcattgaaaccctagaaaaactcaatcagtgacgcgccgcgcccggacgtcatcgtttgacacataaatatcgaactcctacactatttggcatgattgcgattgtggactacggaatgggcaatttgaggagtgtgcagaaggcgttcgagcgggtgggggcggacgcgcgcgtgaccacctccgcaaaggacgtccgggacgctgcgggagtggttcttccgggcgtcggcgcgttcgcggcggccatgaaaaacttggaatcgcaggggcttgcggggctaatcgtctctgaaatcaaatccggcaagccgttcttggggatatgcctcggactgcagatgcttttcgactacagcgaagaaggagagcgcatccccggcctcggcgtttttccgggcaaggcgactcgcttcagaggagacctcaaaatcccgcacatgggttggaaccagctcgagttcaggaacagagggccggtcgctgatggaatacccgacggctcgttcttctatttcgtgcactcgtttctcgtcgagccggaggacccggcgctggcgatgaccgtcacggattacggcggcgagttcgtttcgtcgataacgcgcgacaatgtgaccgcagtgcagttccaccctgagaaaagccagaggatggggatgaagctgcttgagaatttcgggaggatggcgaagggatgaatttatatccggcgatagatttgatggacggcaaatgcgtgcggctgacgcagggcaagagggagctttgcacggtgtattcggagaggccggagcaaatggctataaggtgggcgcgggaggggacgaagtggctgcatgtgattgatctcgacgccgcgctcgaccagaaatgtttttccaatttggacgccgcaaaggccatattcgaggcgtcgccgggaatcaggacgcaggtgggcggcggcgtccgttcggctgctgacgtccggcgctggctggacgagggcgcttcccgcgtcatagtcggcacgtccgttctcgaatcgcgggattttgccaaggggcttttctccgagttcggcgccgcggtcgcggtgtccatcgactcgaagggcggcaaagtcgctctccggggctggacggacgaatctgaaatagtaactatagaggcgtgcctcaggatgcgagacgacggcgctaaactaatcatacttacagatatcgtgcgggacgggatgctgacggagccgaatttcgacatgatgtcgcaggcggcggacgctctggaaatcccggtggtgtgcgccggcggggtgtcccgcgtggagcatgtcgagcggctcgccgctcttgaaaaaccgaaccttgacggagcggtgatcgggcgcgcgctgtacaccggcgacttcgatctcaaggccgccgtcgaaagatttccgcagtaggcggcgcggagggcgttttgcttgccaaaaggataataccctgcttggacgttgacagcgggcgcgtcgtcaaaggcgtcaacttcgtgaaccttgtggacgccggagaccctgtcgagcaggcaaaaaaatacgaggaagccgaagccgacgaactggtgtttctggacatcaccgcttcttcggacaagcgccacataatgctcgatgtggtcagacgggtggcggagacggtattcatcccgttcaccgtcgggggcggcattactaacgtcgccaccatccggcaactgctgagcgcgggcgcggacaaggtgtcgctcaacactgcggctgtcctgaatcccagtctgataaacgagtcatccgaaattttcggagcgcagtgcatagtggtcgcgatcgacgcgaagcgagtgggcgacggctgggtggtctacacgcacggaggcagaaaaccgaccgaaatagacgcggtgggctgggcggtcgaggcggaacggcgcggcgcgggcgaaatcctgctcacaagcatgaacagggacggcacgaaaatcggttatgacaacgagttgaatctcgccatctccaccgcggtgagaatccctgtgatagcgtcaggcggagcgggcgagctttctcacctctacgacgcgatacatgacggcaggacagacgcggtattggtcgcttctctgttccactacgggattttcaccataaggcaggcaaaggaatatctgcgggacaggggaatcgcgatgaggctgtgacctcattgcgccaagagagaaggtttcgacatggatttgaaattcgatgaaaaagggcttatcccggctatcgttcaggatgaaaaaagcggggacgtccttatgttggcgtacatgaacgaggagtccgtgcggcggacgatcgagacgggcacgacgtggttctggagccgctcgcgcagcgagttctggaacaagggggcgacctcgggcaattttcaaaaagtgaaaaaggtgatgtacgactgcgactccgacgcgcttctggtcattgtcgagcagagcggcgagggggcctgccacacaggagcatggtcctgctttttcagggagttgaaaggctgatcttcatggcggagacaggccctcccaaatttttcattaaaacattcggttgccagatgaacatggacgactcggcgtcgctcgcgcggatgctgcgctcgatgggcatggcggaggcggcgacgcccgaagatgcctcgctggttcacgtcaacacgtgcagcgtgcggcgcaaagccgaggagaaggctctgagcttcataggcgtgttgcgcaatcgcaaaaagactggcggcgcgcccgtcgtcgtcggcgtgggaggatgctccgccgaactggccgacatccgcgcggaaattcgcgacgtggactacgtcgtcggggcgggcaggccgcaggactacgcggacatcatccgggaggctgtggccgagaactttcccggcttggcggcgggagcggctctgtttgcccccggcccggcgtccgctttccagacggtggtgcgcggctgctcgaatttctgctcgtactgcgtggttccatacgcgcgcggcgcggaatccagcctgactccggctcaagttcgagcggaagccgcgataaaggcggaggaaggcgcgcgggaaatcattcttctaggccagaacgtgctcgcttacgggctggacttatcgccgaaaagatcccttctcgacgccatagccgccgtccacgatctgccgggggtaacaaggataaggtttgtaacgtcgcacccgaaatgggtgacggaggagtttctgcgcgggctgtcggcgctgccgaaagcgtgcggccatttccacgcgccgttccaaagcggcgacgacgagattctcaggaggatgaggcgcggatacgacgcggcgtattatctcgaaacaatagaaatgataagaaactactcgccgggctgcggcatatcggcggacgcgatagtagggtatcccggagagacggaagagcaattcgagcggacgcttgagctggcgtcgcgcgcgcgggtggatcagttgtacgcgttcaaatattcgccgcgtccggggaccgccgccgccgggcaggccgacgacgcgccgctcgacgccaagaagtcgcggcttgcgcggctgttggatttgcaggagaatatatcgagggaaatcaacgaaagccttgtaggcggaatcgcggaaacgatggtcttcgagtctctgggcggagagcggcggcgggggcggacgcgggagaacaggatagtggatttcactgtgcgcgaaggcgttaaggccgagccgggagatgagttgcttgcccgcatcacgggagcgtctccgcacgccctgaagggagaggccgtatgaacgccactcctatgtatcagcagtacgccgccatcaaggagcgccacagggacgccattttgatgtaccggctgggcgatttctacgagatgttcggcgaggacgcgaaaaccgccgccgccgaactggaaatagtgctgaccgcgcgcgagttcggcaagggcgtcaaactgcccatgtgcggcgtgccccatcacgccgccgacggttacgtggcaaaactcatccagcgcggacacaaggtcgccatcgcggaccagacagaggacgcggtcgccggtaaactcgtcaaccgggaagtcgtcagggttgtcacccccggaacgtatctcgatctggacaggctggactcatcgcgaaacaactacatactttcggtggcggacgccggcgacaggttcgggctggggatactcgacgtttcgaccggggagttcaaggcgggcgagatatcgaggtcggcggacgattcgtctctggtcagggagatcgagcggctgtcgcccggcgaatgcgtcgtggcgatgcgcgattccggggcggacgccgccggtagaatatcggcccgttttcccgacgtgaaagtcaccgagcttgacctgatgttcgacgcgccgtaccaccgggacaggctgtgcgcgcatttcggagtgaagacgctgctcggattcggcatagaggagttccccgctgcgataatggccgccgggcagcttctggactatgtcagggacaacctgcgcgccgaccccaagcacgtgatgtccgtttcgctctaccggccccgcgacgggatgtatctggacgcggcgacgcggcgcaacctcgaactgacggaaaccatgcgcgagaaggaaaagaaggggagccttctgtgggcgcttgacaggactctcacgccgatgggaaagaggctgatacgcaactggctcgaacagcctctcaacgacccggcggagataaacctgaggctggacgccgtcggcgagcttctggaaaacaggacggcgcgggagggcgcaagggaaagcctttccgaggtaagggatatcgagaggctttgcagccgggtcgccaccatgctaatcacgcccaaggagacgctggcagtgcgcgactcactagcggcgctgcccgcgctcgcggccctcgcctccgctttcaagtgcgacatgctggagtccctgcgcgccgacatggacacgctggaagacgcgcgagccgaccttgccgccgccgtttctgacgacgctccgaggtccgcccgcgagggcggcatcatccgcgacggcttcgatgcccgcgtggacgaactgcgcgcgctgaaaaaaggcggacggaaatggattgccgacctcgaagaaaaagaacgaagggaaacaggcgtcaaatccctcaaaatcggctacaacaaagtgttcggttattatatcgaagtgacgaaggccaatctggcaaacgtccctgatagatacatacgcaaacagaccacatccaacgcggagcggttctacacagaggaactgaaagaaaaagagttcgcgatactcggagcggaaagcaggctcgaagagcttgaatatcagttgttctgcgggataagggacaatctggcggggcacatcggaaggatgctgaagacgtcgcgggcggtggcggcgctggacgcgttgcagtcgctggcgcaggcggcggaggaaaacaggtactgccgcccgcaggtcagcgcgtcggaaacgataaagatagaagaaggccggcacccgtcgctggacctgacgatgcccgcgcgcacattcatccccaacgacaccctgctcaattgctcgaagagccagatacatatcatcaccgggccgaacatgtcgggaaaatcgacttacatgaggcaggtggcgctgataacgctgatggcgcagatgggcagcttcgtgccgtgccgcgcggcggagataggcgtggtggacaggatattcactagggtcggagctgtcgacgatatcacccttggcctcagcacgttcatggtggagatggtagagacggcgacgattctgactaacgcgacaaagaaaagcctcgtgctgctcgacgaggtcggcagaggcacgagcgccgcagacggcattagcatcgcatgggccgtctccgaatacatacacgagaggattggcgcgagaactctattcgcaacacatttcaaccatctgacgcgcatggccgacctgttcgagaggatagagaacttccacgtttccgcagttgagcggggcagggagattctgttcacgcacaaggtgcgccccggcggcacggataggagtttcggagtcgaggtggcaagactggcgggcatacccgcctcggtcatacgccgcgcgtcggaaattctggtttctcaggaagcggagtcggacatcgaagtccctgaagcccggacggcgcaactcgcgcttattcccgaccagcctccgagccgcatcgaggaaatgctccgcgcggcggaccccgaagagctgactccgcgcaaggcgctcgatctcgtgttcaggatgaaagatattatagaggaaaacgacaggtcgcggtgaaaacgcggcggctgccgggaggcgcgcgatgagcggaatacccgctgttttcatagacagggacggcactctgagcgaggagatcggctatgtgaaccatgtcagccggttcaagctgctcgaaaagtcggcttcggcgataaaaaagctgaacgaagcaggagcgcccgctgttctggtcaccaatcaggcgggcgtcgcgcgcggctatttccctgaaagactcatagcggatgtccacgcgcgcatgaacgagctgctggccgtgggcggcgcaaagctggacgggatttactattgtccccatcatccgaccgccggagagccgccttacaggatggactgcgactgcaggaaacctaagacgggactgattgacagggcggcggcggaaatgggactggacgttgcccgttcgtacatgattggcgacaagctcagcgatgtggcgctggcgaagcgcgcgggctgcgccgcaggcatactcgtcctgacgggatacggcagaggcgactgggagttcaacagggagcgcgaaggcgtcgaacccgacttcattgcagaagacctgtcagaggccgtcgactggctattgaaagacctcgcatcgcgagcttgaccctcgttttttttcgatagaggcaatttccacccacataataaggaaactgtataaagggcgctttgcggcgcggtgtgcgcgcgcgcccggaaaacaggaataagattttatgaaccttgcggacaatctaaaaaatagcgcggagcggtttcccgaccggcccgcggtcgttttttacgacagagtgataaggtacgagcagctttacgcggacgcgctgaggtttgcgggcgcgctcggcgagatgggcatgtcgcgcggggacaggatggcgatagcgattccgaacgttccggaataccctgtggctctttacggggccttcgcggccggggtggaggtcgtcactatcaacccgctgtattccgcccgcgagattgaatatatgctgaaagatagcgcggcgaaactggcgataatgcatccgatgttcgagccgcccgtcagggaggccgccgcgaacgccggaacgaagttgctttacagcgattctatgggcgacccggccaagcgcgacatgaagaaggcgatatcagaggcggtccccgcgccggcgcccgcggacctagatccgaaccacacggctgctatcatctacaccaacgcatggaggggatatcccctcggagcctgcctaactcatctaggactgatgaccaacgcccgttcgagcgtcgcgacggcggcggcgcatgaagacgacgcttttctcaccgtcattcccctgttccacgcgttcgcctgcaccacatgtctgcatctgccttttctcgcgggcgccaagaccgttctgcatgagatgttttcagaggatcgcgtgatggcggaccttaaaaaagagaagataagcgtttttccgaacgtgccgacgataaacaaaaggctgcttgataaattcggctcggcggggagcgacctatcgttcgtgagggcgatagttcccggaggcgctcctctgacagacgatctatacgaagggcttgtggagagactcaacgcaaatgtatatcaggggtacgggataactgaatgcgggccggtgacttcggtgaacccgatgcggggcagggagtttgtgaaagccggctcagtaggcccgccgattgaaggcataactgtgaaagtcgtcgatgagaacggcgaggcgctcccgacgggcgatacgggcgagctttgcgtccggggcggcaacgtcatgcgcgaatatctcgaaaaacccgaagacacggcgatgtttcttaaggacggttggttgttctccggcgacctagcccgcatagacgaagacggatatatatacataaccggccataagaaaaggcttgtgcttgtcggcgggttcaacgtctatccgcaggaggtggaagcgctgctcggcgcgcatccggcggtggaaagctgccgcgtcttcggcgtcccggacgattccctcggagagagagttatggcggaagcgaaacttcgctccggagcctcagctgaaccggctgaactgaggaaatttctccgctctgcgcttgctccctataaagtcccccgccgggttgatatcatagaatagttccagcgcggattggtgataaatgcggtccagcagcgtgaaagcggattgcgcggattctcaatctttagcctttagttctgttttcatttgctctttgaactcgaaaccgctgaaatgaactgtgtttgacagtgttttgggcgcgggtgtatacttttattgatatagatacattatgaggcaaattcgcacgcgttctcggacgggcaaattgtttgactccagtcgaaatggggaataccatagttagccgaagcgcttttttattgcgcgcctgaaacagaataatattcagggagaaaaaatgcgaaacaagcgacgccgggaaaaaggattcaccttggcggaaattcttgttgttttgtgcataatgctgatattgatgggcgccatgacgccttcgtattaccagtatcaggcgtcaacgagagtgagaaacgccataagagcgactcttgttcttaagacggctatcaacgatgccgccaactcgtgcaagggatttcccgtgagatccttgatcggcacggacaacgcttccctgatggaattccttcccatcgtcgatttgactgagtgcggaaggacggacgacatcaacgaaacggcaatgaaggtttttccgacggacgcggattgttcgcacacggccgtcgcccagacggtgatgccgtcgcatccgtactcggcggatttcacgccttccgggctttgcgcttcggtgtgcgacaggtccgacagcgaatgtctgggccaaaaaggattcagttttcaggggacatttattcgggacgacaacgctgcggaacagaggttcgagctttgttcccccgaatattcaggagtttccggacctgattactccggcaactacaaacccggctggaactacgctttgctctccaatctgaatcctcttgataaacccgtcggcgtcgtatgctccgtcgctctcggatacaaaagatccgtactcataatcgtcaacaccagcggatataatacggccacaagtatgcaagttgcggaaggctcgggcatttttgatatcgaaggcgatgatcttgacgagccgtgcccgtgcggtccgtactgcgaggaactgtttgaggctgctggggacgggcagagcgggtgctgttcgccttgcattgccgcggacggaacaaagtatgacggcatagggtacaagttctaatcccccatttttttttcacggacacgactgaagatgcgaggaacgtcttagcgcgacgatttatcccggattcggcgataagaaatacggcttcataaatttcgctgataccatgtaccggggggtctgaaaaaacgtaaggttctgtcataacttcggttccgaatactttcatttgggggttgtggactttcggaagtcggggaatttggttgcgcgggtgaaagtattcgatgggtttggaagaaaatattttttttgtgttgtggcggcgggggccgtccttttttttgtggagcgtcaggccgggcgcgggagccttctggcggcgcgggccggatcggggccgttaggtttcggaaacgaaagtaaaaagggcgggcgcttcgcggcccgatggatgagatcgcggcgcgggttgtcaccggggagcgggctggcggcggtggtcgggccggatcggggctgaaggtttcggggatgaaagcaaagcggggtgtcgccggggagcgggctggcggcgggagtccagaggctccgggagcatggcggtgtttcgatggtgacggcgggtgaagcgggcgggcgcggcgcgcccgatggactatttaaagacaagagattgtatatatagagaggggtatgaggcgtaagagggtgagtttcggaaaacagtttttgcaacaattcgggatttgtttcaagttttgcaagggcattgcaaaaaacggacaatcgagagaggggcatgagggtgaggcggtatattttggagaaaagctttgcagcatttcaagatttgttgcaaattttgcaagggagctgcaagaaaacgggatgatcttgagggtgtgagttcgggttattttttcgtttttttacgtttatcgggattagctggggactcggaagcttccgggggcgagccatgagcggaacgagatagaagacatcttttattaatatagatagagagggaaccgactatcggaagaatcacttcttttttcgagggggacattttatcgtttcgccatcagttttatctaataaaaaccctgaaagtaaagcttctctttcagcctcatctaaaagatataatcttttttggtttttttctaaggtatcaaatatgtctgaattgtcattgccatgcaaaaagaaatcaaacaatactgggtttttcaattttaactcaaataatacagtaaccaaacgtacatttaaatctttgattttattggtagcgtatttaccataaaagattaggtctgatatattcatcaataaaaacactgaacggtaagcaatccgttgtggatggttttcatcctctggcagtagtttttcagtggaaataaaaacatcgcctaaaccatgaaaaatccaatataaattaatgttaaaaaaagcttgcattgcatataataattccgcgctaggcttatacttacctgtttcaacctgtgataaaaaaccataggaaacccctttagaactctgtaaaaactcagatagcaaatcggcaaacactttttgagtgaaacccaactcggttcttgcctgcttaattcgctgaccaatagcaaccttgtcaaaaggaggcattttgggttttgaaggagtttttttttcttccacgctctcttttacctcaaatcacacgtgtttggttacgcaaataatatttggcaaacatgttgacacccacagtataccgagctataatcacagtatgccaaatctgcataaagcaaaccatacaatcagccaaagcgattatatcacacttcaagccaatggacaacagctttcctcgtcaaagggagtatgtatgagcagtcaggcggaaacgatagcgtggcattccagtaagacattagagcgaaataggcgtagcaagctggctaccgcaggaatacttacacaacgagaggcggcaaaaaggctcggtgttacgacaggagcggtttcgcgtgtcatttgcaataagcgcaagtcgaattggatgcgcgtcgccctcgcccgaattgccggaattgactatgaagagttttggaatgtgaaacaaccaatgttgacagaatgcgacattataaaactcagaaacgtcgggatcgaggtcgaacgatgagcggcaaggaaaaaggaaaattcgcgaggctgggcggcgacgcggcgcggttttactttgataccggctccattccgaaagtttgccaaatgttgataaaaaagcatggagtggatggggaagtttccgagttcagcttgcataattggaaacgccggggacggtggcgtcaagtccgggctgaactgtccgcgctggaaactgaagacgcgctcttacaggctttcgagggtcggatcgagagcatggtcgcgacgctgtcggggtgtgttatgaggctccgggagcagatcagggcaatgaaggacggcaaaagtgataactaaatatagacgatttgttttctgtttctcctccaacgcgggcggggtcggcggtcgccgatctcgcctgtctttaacagagcctctatgttcatgttttcacaggatacaggcgggcggcgggtattacgcgggtcatggttcacctcctttcaagcggttttgccgctcgcctctttttttagcatttagttgatatacgacaatataacataggagaaacacacaatgaatggtgaaaacaacgtctcgctagaagcaatcgacaaagccgaaatcgtgaacaccgatgttgaacttctggatgtaaaaaagcttttgccgccgggaagcgggccggacgtgctggcggcggcggcggcgaaatgcagaatgatagacttgcaaagaaaaacgatcttccacgaggttgacaagctgacggctttgcaaggcgctttactgaacgaagtcaaaacgcgcttcggcagggaagcctttcaaggattttgcgaggcaataggaatatgtgagagaagcggatacaactatataaaatttttcaaaaaccgggaagtgttttttataggcaagatgtcggactcagttaaggcccttgagattatggggcttttgaatgatccgagtgtccgattcgagggcgacaagattattgttcaggagccgggggacacagaaaaactgactttgagcatagatgaagcaaacgcgctcccgcgcccggaatttgtggcctttataaaaaacataaagaaggcgcttagcacgcaaacaaagctcgtcgatctcagggatgagagccttagaaaactacaaacagacaaagataagttaataaaaaagctggaagaacttgaacttgagagcgcgaacgagccgttgtttaagtatattgttgtgctccgagagagggcgaagctgtttagcggctcgttgaaagaggttcttgaacaacgagaagtggttcagatgcagcctgagaatgcggaaacgagagaccgaatcagggacgcgatcagatgcgtaggcaatgagatgtcgagattcgatgatatgctgggctggcatccagaggagagcaaacttcctaagttagatacaaaaggagagagagattgagtccagacatggtacggcaactattggaagcggcggagcgtgttgagtccgcgccgcacggcgaacgaagcgcggcgatggcggcggaagctgcgaagttaaaaatgtcgcctagaaacctatcgcgaaacattgcgaaattgagaggccggaagcgcgctttgcgctcggattataaagccgacaagagagaaaacgagcttgttgaatatacgaagatagcttgcgagtaccagaaattgattgcgatggccggggaaaaaaagagggtgttgccacttgagagcgcaattaaagcggcagagcgcgacgggcgaatcccgcagggagctttgaaaccggcgaccgcgaaatacatcaggcgaaaactcaatattacaactagggaagagtatcgaagattaactgaaaaatacgctaatcacgcatggcaatttgacggcagcggcagcgaatatctatacccggtggatagggacgctgctggggaatggttgtttgccgtccgatccacaaaaagagaaagctggaaaaactcccgaatcaacgctgatggagttttagaagacgcgcgccgggagatgttttactactacggcgttacggacgggttttcgggagtccttttcatcgacgcggttgtcgcgcacggcgaagacttcgacggctccgcaaggtttatccagaaagcgtttcagaagaaggatgacaatccgcttttcgggttgccggaaaagctgataacggacagcggcccattgggaaaaaacagaggcgagttgttgtttagggagttaggggtggagcttgaaacaaacaagccatacaactcaaaagcgaaaggaaaaattgaacgtccgtggaggactttgtggcaaaggtttgaacttgagttgctacttgataaggaaagagtatttacgttcgcagaaataaaaaacatgctttcaaattatctgaaagattataacagtcgctctcatcctaacccgaaattcgcggggatgtcgagagagagaatttacggcttgagcctcgctgaaagagagcagagattttaccctgaaggcgcggacatattccagtatgcgccagtgacgttttacagagttatggacggcacaaaaagcgttcggataggcaacgagtattacgaagtccttgattgtccgaaagctttcataggcgagaagctgctatgtcggcagttcccggacagggttgaagtgaggaatccgcaaaatctgagttggatggcgacaaaggtttatgagccggtgatcatcggggagcatcgagcattcaagcacgatatcaacgatgaacttgaagagcgg

SEQ ID NO: 515 - DNA, 120848 bp, Artificial Sequence; identical to SEQ ID NO: 514
  Synthetic Oligonucleotide

SEQ ID NO: 516 - DNA, 116459 bp, Artificial Sequence
  Synthetic Oligonucleotide
tttactatttggtgaaaagcatcatgcgcaaaagaaaaagttttgcgcatggcacacttggtagtgggtagaatcatctaataacatgtataaaccgtttccatgtcgagccagttcggcccggctttgacgtctgccggaagttcgacggatagagcgccccaatcgcggcccgctgcttccattgctctgcgggttttctccgccgtgtccgccactttttcggcaggcgtttcaagcacgatttcgtcatgaacctgaaggagcattttagcgtccatctcgcccgcgagtatcatcttgtgaacgtcgatcatggcgagtttcataatgtccgccgcagagccttgaatgcgggtgttgaaagccgcgcgcaatcccgcttcgcgctcctgccggttggaagacctcagttccggcacgcggcggcggcgtccgaacagcgtctctgcgaaaccgtcttcgaggagtttttcgtttgttttctctatgaagtcgcgaacgccggggaaccgcgagaaataagtttctatgaagtcggcggcctgctgccgggagatgccaagctcctgtgaaagcctgaactcgcgcatcccgtatatgaggccgaagttgattgtcttcgcgtatctgcgctggtcctgcgtcacttccgagacggggactccgaacacctgagcggcgacggacgcgtgaatgtcttcccggttgcggaacgcttcgagcagggaagggtcgccggacatctcggcgaggagccgtatctcgatctgggagtagtcggcggagacaagggcgaggcctttggagccggggatgaacgcgcgcctgatctcgcgcccatcctcggagcgcaccgggatgttctgcatgttagggttgctgcttgacaatctgcctgacgcggccagcgtctggttgaagctcgtgtggactctgcccgtgcgcgggtttatcagcgcgggcagagcgtctatgtatgtgccgcgaagcttgctcgcctgccggaactttattatcagcgggaccgccgggtggtcgcatttaagctgttcgaggacggctatgtcggtggattctttcttgacttttctgaggccgagttttacgaacagcaactcggccacctgtttcggggaattcaggttgacatccgccccggcaagctccgccaccgccgcgctcagcgcccgctctcttgcggcgaagtcttcggacatccccgcgagcgcggacgcgtccagagccactccgttccactccatctcggccaataccgggataaggggcatctcgattttcctgaacacgcggtcgaggccgtctgcggccagccgcctcgaaagctccggctcgatcctcaacgcggcgtccacgtcagcgcaggcgtaatccaccgcgtcccttatcttgacctcagagaatttcttctgagattttcccttgccgaccatatcctcgtatgttttcaggcccgctcccagcaggttcgccgcgaccgttttcagcccgtatctgcggccgtccgggtctataaggtaagcggcgatgaatgagtcgtaagcgatgttggcaagagacacgccagccgcgcgaagcatctgcgcgtcgaatttgaggttgtggccgattttttctatgtcagggttttccagatacggtttcaacaaagcgattgcgcggtccgggtctatctgtttttcagcgtccgggtcggagtcgtcttcatcgtccgagccgtcgccgccgccgaaaaggtcgccgccgccgcgtttcacggtggagccgtgtcgaatggggatgtagatggcgtcgccggcctcggaagccagagcgatgcccactatggggtcggcgaaggtgtccagcccgtcggtttcgaggtctacgcaaagcctgccgcgcgaggcggcgcgctcaagcgcttcgatgacttcggcttcgtcgaagacagccttataaaccgagtcgaactgaacggcggcggggcggggcggggcggccgcctcctctttcattccaagctccgatatgaaacttctcatttcatatttctcgaagaacgccgcaagcttttcgttgtcgaccgccgggagtttgtacgcgccgatttcaaatgggagcggcgcgtgtttctctatcgtgccgagccttctgctcagttccgcaagttccctgttagccgccagtttttcccgcagccctttcttgtcaatctgttcaagagagtcgaacacggcgtccatatctccgaattgttcgagcagagacaccgctgttttggggccgacgcccggcactccggggatgttgtccgaactgtcgccttcaagccctttgaggtcgggtatgcgttccggataaacgcccattttttctttaaccgcctcgcggtcgaacttctcaagctctgaggagcctttcagcgacatcagcactgatacgctgtcgttcaccaactggaacatatctctatcgcctgtaagaatatcgacctcaaggccgtgttccgcgcccgcccgcgccagagtgccgatcacatcgtccgcctcgtacccgtcgagcttggccggagttataccgaaagcggagataagctcgttgatggccggaatctgttcccgcaactcgtccggcattctgtccctgtgagctttgtaggcggcatattcggcatgcctgaaagtgggtgtctcggactccatcgccaccaccagatagtcgggcttattatctttaaaaatcttcagcagcgcgcgcgccatgccgaacaccgccccggtgggaattccctccgccgtcttcatcttgggcatggtgtgatagaacctgtatataaggccgaacgtgtcaatcaacaacaatttgtctttggtcataatcccggcgtctccccgcgaggcgcggctgcccgccgcccgcgttgaatattatagcgcaggcgcgccgctcacgcgcgcggaagcggcatgagcgaaagattcttgcggggaagaaaaagggaaaacttttgaaacgtttcgtcacgagtatgcatagaagaagccgctaacgattataggctttattataaagcttatttatttcacagacagcttgattgtttttacagaaaccattactgtcagaaggcgggtcattaataactgtcgggttgcgcgcctcatttgtcagcataaagcgcgcgaccgacccatttccgcatgagtcgtttcgtatgacataaattaattcatgtcccaaatcgctctccaaaacgccaaagcggccatcgctgtcgcctgaatcagtcttttcacaccgtgacagtcacaacggtgtaaacgctattgaaaccagtgtgaatcccgttaaaacacgttaaaaaacctgttaaaaccgcgtttgtaaaaacaaacgaaaaacgccccttttgcggcccttttcggggttaaaaaacgactgaaaaccatgccggaaacgccccgtttcaagcgcgtttgacaagaattaatttatgtcaatttgaatgaaacgacaccgcagaacgcctcccgcgctgccgcgcaaatgctcaaatatgcctttatataatgatgtttatgattgcgttcgaacttcagataatgcgtattatccgcagttacgccctgccgcgcccgtcaacaaccttttgtttatcgcgcttttttcgcaccgccttttccgttcggaccgtattatctgaagtcttttccgcgtttacttgaaacatcccgctgcatagggtcctccaaagacatcgagaggaacgtaaaaaatacattttttgtcgaaaatgaaacgctatgggcaattcgggccgctttggaaatgcaaagagctttcgaagaattaaaacgcgactggccgccggagttgaaaaaactgggaatcggcatagggataaactacggcgaggcggttgtcggaaacataggaactgaagaaacaatggattacacgatcataggcgacgtcgtgaacaccgcacagagggtagagtcaatagcgcgcgccggacaaatcctaatcacaaagaatgctttgctgcgggttgaaggaaaaataacgttacgcgcattagcgccggttcaactcaaaggaaagtcgtttcctgttgaaatatttgaggttgcaaatatcggacagtaggatcaactaatcaatacaacattcgactctcgctagccaatatggttacaacaacaagccataagagttaatcaagaatgcttttccgccgatatcattggcttctgatatttcagataatttatgcatagagaataacaaaaggcgaagggatatgtatcgccgacaattatgaaagatttcatgaaaatgtttatcatcaatatctttaagagtcgacgtgcttatcttttgtttagtttaattctgatcggtatagtaattgcgggatgcggaggaaccggaaaatggaacccgccgcctgtaacagacaccgccgcgcccgctgtgactgccgttgttccattaaacaacgcctccggcgtggcaatcaatacgaaagtaatcaccgccgccttcagcgaggcgatggatcccgccacaatcaccacggcaacatttaccctgatgcagggagtaacggaaattccgggttctgtggcgtacgtcgatgtaacagcgacttttacgcctgacagcgctctcgatgaattgaccacttacaccgccacgatcaaaacaggccccgccggagccaaggatgtggccggcaatgagttggtcggcaactaaaggatttcttatattgcccgatgcgggcaacagggagtcagaagtttagaaacatcgtctatgtgtctttgataaagtgaaatgtttgcaatacacaaaacatggaagaatattatgaaacattctattagaagaataatcaattccgttcacaggggcagccgcaaggccgggcgctgcggcgccgtcaaagccctcattttcatagcgatgtttgccgtggtcgctcagttcgcatccgtggttgcgtcggcgtctgattacacgtgggaatttacaaccgcggatataacgccgcctgttcagagcgcttgggatcctgcgaaagattcgacgcttgcaacccactcgccgacgattacgttcaacacgaatgagaacgctgattgcaaatggtcgcttgccgatcaggcatacggagacatggccgacgactgcgacggcgacggcacaatgagccagagctgcgcaacgtcgggtctcgcatcgggcgctgtaactgtctatattgcctgccgcgacacatcgctcaacgcggacgacatcgcaacgaatacgcatgtgaattatcttatcaacatagcgccggtcgccgatgcgggggcggatcaaacgctcattctgccgtgcgttcccgccgcggtcgctctcgacggaagcgccagcgcggatgcggatggcaaccccctcacttacgagtggacgcagtccggcggcccggcggttgcattgtcgagcggcacagtgcagacgcctacattcactccgacttccactggaatatacgctttcgacctgatagttaatgacggaataataaacagcgccaccgacacggttacgattgccatgcaactcactccgggcgcagttccgcttggttcgacctgcgctttcggagtcatggcagccgccaccatcaccaacaccggcgcaaccactatagatggaaatgtttcattgagtccgggcgcatcaataaccggaagtccgacagtgaccggcacgacgcacattaacgatgcggtgtcagttctagcaaaacaagacttattggacgcgtataacttcgctataggtatgacgccagacgcagacgttggaactgcggatttgggcgcgctgacacttccaccgggcgtctatagctccgccagcacaatgaacataagcacagaccttgttctcgacggcgggggcgacccgaatgccgtctgggtattcttgatcggctcctcgctgactgcaaacgctggaaatgtttcggtgaccaacagcgcgcaggccgggaacgtgttttgggttgcctccgcatccgcgactattggagccggcgctaacttcactggaaacatactggccggcgtaagcgtcacttgtgtttccggctccagaatagacggcagagtattggccggagcgacgagcgacaccggcgcggttactttggacacaaacactatcatcgttcctctcccgtaggctgatggagctaattcccgggcgaggaagtcatagcgcataaggaaagaatattacgaaccgataatgataaaccaaaataaaaggagacggaaaactatgagcaacaagaaaagcatcggggaacgtgttgacaaagctgtgaataaagtgtcgaaaaaggctgataaagtaaaggaagccgtagttgacacagcgcacgacattaaaaagaacgtgaagaaagctgtcaagtgattctggcgaggccgctttagatttgggccacacaaaaacgacggcgcatgcaacatgttgtctatgcagcggttttcagacgcatgcgtcgtctgtctttgtgctttagtattcaatcggattgctaaccgcattttcgccaacgcgggccgacgcatcaataataatcggaggatacgaatatggaaaatgttgtaaaagagactgaaacaacacaaatcggcgacgcaagcgctgtgacgactccaactgaaaagaaggcaaccggttatcagacgggcggatattcagtctattacttctttggcgctttggaaatacttttggttttccgcctcgttcttaagttgatgggagccaacctttctagcggctttgtgaaattcatttatggattaaccggatttttcattgtgccttttgaaaacatattccgcagggggctttcagaaggcatagaaacgacttcggtttttgagccgtcaacggtagtcgcaattattgtgtactctgttgtggcttggggtattgttaagctaatacgaataatctcaaaagagcaacagccctcatagtttgtttaatatgtttggtttgggagcgtgttggagtattgcgatatttcgaaattaaaggagacgaaaaagcatgagtgacaaaagaaccatcgaaaaacgcgcgggtaatgtgtcgaaaaaggttgcaagaagcaagggtaagatcgacacagaaaaagagaatctctctgggattttgcatgacatttcagaaagagacgagaatgcggtcgatttgagcccacagattgcaaagcgcgcctatgaactatacgaactgcgaggccgacaagagggcctatctgttcaggactggggacaggcggaacgagatattcggaaacaagaactctattaaccggcatttttcgccaacgcaggttaacattgggagcgacggatgaaagtgctcatgataggcggttcgggatatctaggaaaacttctggccgtgaggatgcgcgaggagtggggcgaagacattaacattgtcaacgttgacatctgcgtggacgacgacagacaggagaagtggctgggtgtaaagcgcatttacggagacgcgcgaaaaaagcgcatcgaggatgtgtttaaaaacgagggaaccatagacgccgtggcgcatctcgccctcggccatggcgagagcctgactactgatgaacggatgatgacgaacgtttacgggacgttccacatgatcggccttgcgcgcaaatacggggtcaagcagttcatatatccaagctccaccatcgtttacggcgcaaggcaggacaacccggcggttattctcgaaagccgtcctctgcttggcaaccgagacatcctcagcatcagagaccgcatcgaggcggacatgatttgccaaacgcacgcggaaagctccgacagcctcagagtgatcatcctgcggatggttcccatctggcgagattcaggagccagcattctaggcgcttatatgaaaggcaaacttgttcccacgcttcttgggttcgaccccatgttccagattatttacgaggacgaaatgctggacgctttcattcgagttctgcgcagcccgaacgctcacggcgcgtacaacatcagagggcgcgcacacctgccgttaagcgaggttatccgctcgttcggaaagacgccggcgccgcttcctgaatttctcgcgcgccgtttaggcaggttcatgtggtcgaacaatctgaaattcgatctcaattacataaagtatccgttcacagtggacggcgcgcgcgcgttcgaggaactgggatacgacccctccggatttgagaaaatccgcgcggaaaggaaaaagaaaggcgctgcggcgcatcgaatcagacttcgccgcgcccagagctaggatgaggatgattaaactatcgcaatcaggggaaatcgacttgtgaacacaatggacgactacagaaaacttaaattcaagcatttcttcgacggcacagcgaccgaatatatgagaaaccgcatactgatgtcggacatacagtttgacccaagcggatacgacgagttcggaaccagcctgaatgtcacatccaaagcgggagcggcggcgctgttcatgtacatgaattactttcgcgtggacgcgcacggcgcgcagaacatccccgccgaaggagtcggcctgatagtgtccaaccacgcgccgatactcccattcgacgccgtgatgatatggaccgccgggctggtggagcttgagaagccacgattcatcagaacaataatccacagggcgctttcaggcatccccggcggctccatcctcttgaaccggtgcggccagatagtcggctgcgacgaaaacgtaatgaaaatcttcgagaacgaaaacctcattgttgtgtttcccaccggcgcggagagcgacttccacaccatcttcaacaaatacaaagtggacgcgttcccccccggattcatggaatacgcgattgagtaccgcgctccaatcatcccggcatgcgtcaccggctcggaggaatccgctatgacaattggcaaactcgacatgaaagtgatggggttcaaacatctgccgataacgccgatatttccgtggctgggcttgctcggacttttgccgtttccgtcaaagttcgacttgcacttcgacacgccaatacattattacgaagattgccacgacgtcgagcccgatacggagcgcgtacgctccctcgttgacggtctccacgatcatatacagaaaatgctcaacgacagactcggcctgcatcaagcgcatgtattccgtgaatctaatgcgtaacttcgacaaatttgtgttatttccgactactggttatggtttttcagctagcctgctcggctatgcccccggcaatcgcttccaccgacaagaacccagcccactcgcaaaaggcaaattatggcgccgctttacgcgacgaaataaagcggcatatttcaatctcttccgcagattaaacgggcgtctttcacattccggcgaagtatattttccaattcacgcgcgagttagtttcaagtgagttacaattaaagaaaagagcctcttcgttgagtctgagaaccacatctttgcgcaacatggaaagcgccacaggattcacttctgtcaaaccgaatccttttctgggattaaggcgcggttattctacggctgaatctcgaggcgcaatttgcagcaaaagagacttaactcggatttttcacaggaaaaatcaggctaaggttctcgcttaaaaaatgcgacgtcaacaaagcatctcgccgttatgaaatttgccgaagatttgccggctctatcggccaatccgactagtcaggagactgttttatgcctagaaagataaaaaccgatgttaaggcccccgctgaatcgcccaagaagacgcttgtggatgaggtttccgcagacaatggaaaacaagacctcccaaaggatttccccatcgtcggaatcggcgcgtcggcaggagggcttgcggcgttcgaggcttttttttcaggcatgcccgcgaacgccaacccggatatggcttttgtcctcgtgcagcatcttgctccggatcacaagagcatcctcaccgagttggtcaaacgctatactcgaatgaaggtattagaagttaaagacgggatggtggtggagccaaactgcgcatacatcatccctcccggtcgcgacatggcttttatcggcggcacgcttgaactgttggagccggccgcgccgcgaggccagcggcttcccattgatttttttttccgctctcttgcgcaggatcagcgcgagcgagctatctgcatagtgctctccggcacgggcagcgacggcgctctgggagtgcgggcgatcaagggcgagggcggcatggttatggcgcagaacccggaatccactgaatacgacggaatgcctagaaacgccatcgcaaccggtctggtggattatgttctgccgcccgccgaaatgccgccgcaactaatcgcttacgccgcccatgcgttcggcaaaacaacgcgcccggccgcaggctctctccctaaaccggaagatatgctgaaaaaggttttaatcctgttgcgcaaccagaccggacatgacttttcccaatataagcccaataccatccatcggcggatcgagcgccggatggccgtcaaccagatagacaagatagaggaatacataaaatatcttcagcggtcaaaggacgaggtggacgccctgtttcgagacctgctgattggagttaccagttttttccgagaccaagaggcgttcaaagcgctggagaaacaggctctgccgcttctcttcgcaggcaagcccgcaggcgccgcgctgcgcgtctggtcgctgggatgctcaaccggcgaagaggcttattccatcgccatgttgctgcaggagcgacttgaggaacagaaacaaaatttcaaattgcaggtgttcgccacagatattgatggccacgccatcgacactgccagaacaggcctatatccggccagcatcgccgccgacgtctcgcctgagaggctggagcgtttttttgaggccgaacccggcggcggctcctatcggattcgcaaaagccttcgcgatattttgattttctccgaacagaatgtaatcaaagaccctcccttttcaaaaatcgacctcatcagttgccgcaacctgctaatctatatgggcggagaccttcagaaaaagctcattcccctcttccattacgcgttgaatccgaacggatttctttttctcggcacatccgagacaatcggcgatttcgcgagcctttttgcctccgtggaccacaaagcaaaactatatcggcgcaaagatgacattcaaggcgcgcagcgcgcgtccctcagccgctttcttccgagttcggcgacggaagaagcctcgtcccgccaaaaaagaaaaacaacggatgaatataaaatgcctcttcgagagttggctgagaaggcgctgcttcaacacgcggcaatgaccggcataatagtcaacagcggcggcgacatcttgtacatacatggacgagccggccattttctggaaccttcgcccggcgtcgcaggcgtcgccaatgtgttgaagatggcccgcgagggattgggccgcgaactaacaacggctttgcacaaaaccgccgtctcaaaggaagccgtgcgccatgacggcctgcgcgtcaaaacaaacggcgacttcacgacggtaaatctgacggtaaaacccattccggcgcccactggcgcggaaacagcgcaagagcttttcattgtcatcattgaagagcctcggatatcagacagtgaaaagcgagaaatcgccgccgacacagacggcgctttcgacaacgcaacagacatcggctcgcgcttggaggcgatgaggaaagaattgcgcgccaaggatgagtatcttcagaccaccaccgagcaacttcagacatccaacgaagagctaaggtcttcgaacgaagaaatgcagtcgataaatgaggagcttcagtcaacaaacgaagaactcgagacgtccaaagaagaactgcaatcggtgaacgaggaacttgcgacagtcaacgccgaactccagcagaaagtcatcgacctttcgagagccaacaacgacatgaacaacctgctggcaggcacgggaatcggcacagtattcgttgacgaccaactgcgaatcatgcgattcactccgaccgccacccagattatcaacctgatacccagcgatgtggggcgtcccgtcgggcatatcgtctcgaaccttgagggatacgacgggctggtcgccgacgcgcgagatgtgttgaacacgctgatcccaaaagagcgcgaagtgaagaccctgaagggcgattcgtacaccatgcgaatcatgccgtaccgaaccatggaaaatgttatcgagggcgtggttgtcacatttgtcagaataaccgcgcgcgggaaatgtgtccggtctgaatccggcgaagaaaaaacatcgccgaaaaagaacgggggcgacaatgtgcgatgacaatagccggggaaaagcggacgcagaccttcgcgcgcgggccgagaataaagcgcttgaaaacgccgcatccggcgctcctgttaatcttgacgagttgtcccccggtgaaacaaaacgcctgctccacgaactgcgcgtgcatcaaattgagcttgagatgcagaacgaagagctgcgccgcgcgcaggcggaacttgaagcgtcgcgggcgcggtatttcgacctgtacgaccttgctcctgtcggctacgttacaatcagcgagaaggggcttattctggaggcgaatctcaccgccgccggactgctgggcatgtctcgaagctcgctgttgaaaaagccgctgactggattcattctctccgaagatcaggatatttactacagacaccgcaaggaattgtttgaaacaggcgacccgcaggtatgcgaaataagaatagcggggaaaaaccgcgacttcttctgggcgcgaatccatgcgattgtggcgcacgaagcggatggcgcgcaggtgtgccgagccgcgctcagcgacatcacggaacaaaagaatcacgaagacgcaaggagaaagtatctcgaacaggataaaatggcggccatcggccagcttgcgggacggatggcgcacgatttcaacaacgttctaaccatcatcttgggaacgagcgaattgctcctgacccaagacttgccgccggacgtgaaatcagatgtcgaaaccattctggaaaccgcaaacagaggaggcgggctggcaaggaacttattgttctttgccaaggatcagcagcttaaactaagccgatttagccttaacgacaagatagacatgattatcaagacgctgagaggcaatttgaagaatatcgatgtggtcgtcgattacggagcgggtttggatggcgtgattgcggacgccgggcttctcgaaaacgccttgatcaaccttatcaataatgcgacacaagctatgagcaaaaccgaaaaaccggtgttgcgcataaaaacgcgcgcggaaaacaacatcatccgaatcgaacttgccgacaatggctgcggcattcctcgtgaatggaaagacaagatgtttgatcccttgttctcgttgaaaggcagcggggatatgaccggagcttacccgccggacgtaaaaggcaccggatacggcctttcaaatgttaagcgttgcatggacaagcacgggggaaccgtcgagtgcgaaagcgaagcggacaagggcgcgattttcagaataacgctgccgataatcacagaagctgcccgcggcgacaggaaggcggttgccagcgaaaataaagatgcgaaagggaaaaacgtgcttgttgttgaagacgaaccgcaactgggaagaattctatgtttgcttcttgaaaaactcggtcattatccgaccctagctgttgacgcgaaaacggctctggagcgacacggcatgaattctttcgacgccatcagccttgatttcgtcctgccggatatgaacggaatggaggtgtacgaaagaatcagggaaacagactccgaaatcccgataattttcgtgtctgggaacttcgagtatttgcagtccatgatggaattagagacgagggatccgaaaatggatcacttggccaaacctttcagcaatatggaatacataagcatgattcaaaagtggctgacataaacgatgcaattcaattgtaagcgattgaaacagggtatcgacaataatgtctgacagagaagacaagagggccgccccggcggatgacctgcgcaagcgcgcggaggatagccgcagcggcggctgaattgcataaggagaaatgattatgaacgataacaaacgcgaagaggagaagttagctgttcttcgcaaaaaagccgaggtcgaagccgataaaaacgctgagcgcgctcatgagcgtctggaattaatgtccaccgacgaaataagaaaactgctccatgagttgcgcgttcaccagattgaactcgagatgcagaacgaggaactgcgtcgcgcgcaggatgaattagagatgtcgcaggcgcaatattacgacctttacgacatggccccggtcggatatttatcagtcagcgaaaagggaataattcttcaggcgaacctcgccgtttcaaatctgctacaagtcgctagaagcgaactggtgggaaaaccgttttcggcgtttatttctaaagaatatcaggacgcgcactaccttcgccgcaagaaactactggagacaaaagagccgcaggcgtacgagataatggcgaagcgggcggacggttccctgttgtgggcgcaagtagaaacctccgtgacgcgcgacgcgcaaacgcccgttgtttatcgggctgttttgagcgacataacagaccgcaagaaggcgcaagccagccttgcgaaaagggagttgatgtttctatcccgcagaatgattcaatcgcaggaagaagagcgcaaacaagtggcgcgcgaacttcacgactccatcggacagaaaatcatctccatgcaacttgagatcgaatggctgaggaaccgcgaatgcgcatgctcggatgtgagtgtttacaataatttgattaagcagacgatagaagcgtcggaagaacttcaacagatatgtctcggtcttcgccctttgattatggatagaatggggtttaacgccgctatgaaaacattgattgcggatttggaaaacgccagcgatatcttcatagaatctaggataacgcccgtcgacgagtctcgcgtcagtcctgacaacgccatcaatctgtacaggatacttcaagaggctctggcgaatattgtccgccattcaggctccaaaaccgcgttgatatctttgaaggaaactgattctgaaatcgttcttcaggtgaaggacagcggttgcggaattgaagaagacagcgagcagggcagatacaatttcggcatccttggaatgagggagcgggcgaacatgatgggggggcggtttgaaatatgttccgcgcccggaagaggaacacacataaaagtggctattcctttcaatgtgaagaaagagattggcggtccgatatgagaggaaaaagagggaggaagcgatatgcccggcaaaaaagcaaaaaagaaatcaaaacccgcaaacgcggcggtagaaacaattaaggttcacaagcccgttggaggggctaaaaagatgataagagttttggttgcggacgaccacggagtggtgcgcgccggattgtgcaggctgattgacggagaaaaagacatggagattgtcggagaagcctcggacgggcgcgaggctgttcagaagtgcggcgagctgaaacccgatgtggttgtgctggattacgaaatgccggttgttgacggactggaagccacaaaacagatcgtcgagttgaaactgaacacaaaaattctaattcttacgatatacgacagaaaagagtttgcaataagttttattaagagcggagcggccggctatttgtgcaagaaaatctcagccatggaactatgcgcggccataagaaaaatcgcggcgggagacatctatttctcggcttcaaatggagccgtaacgaatcaaaacgaccatgacaaagaaggcgacctgctttcccagctttcaaagagagagtatcagatattcatcaggatggcgcgcggaatgacaatgagcgaagtcgccgacgaacttgacgtgtcctacagcacggtgaaaaccttcaagtatcgcatcatggggaagcttgacatgaaaaaagattcggacatgacgtttttcgccattaataaaggactaatcgaaaaatcataatatcaggcgcgcgcgcgcgtctgtattaatcgctcgattgcaataaaaggattcgctgaagaactggcgagtcggaacgctttatcacataggcgaactgcttcgttggcgccgcatttattcctatgtatgggcggggttgccccgctcgaaatgtcgctttcatcaggaaacaggcgatgaatcgcgcattccaaatcacgcgtttcttatgactgataccaacttgctgccattcactcaagtatgcagggtggcacccagaaccatcgccgcactccaaattgtgccttttcactggctgagtattcgagcgaaaaacggggacaggcaacgcgtcttttgcggctgcctgtccccgcttttcgccgttccgggaataaagtgtcaagttttttaacaatccctgaatattaacgatgctcaagcacaaggttgtgagtggcgcccgatctgacatttgaaaatatcaacgccttttttcgaaccacatttacggctcagaggggcgcggcgtttattagccggaatggctataaatgaatgccgtaatagttaataaagattgcttttttgccgatactcccggattccaatcaatcgtatcattaatgtgttgacatacatcttcatgggacgaattgtcgtcgtgtttctttcggcaaggtatttgttgcgcaataacaaatatgctctgcgcggcgggatatcaggaggatgctatggttgaacaatttagaataatgatagaaatattcattataggcatgtgctttagaaatcaaaaagggagaaaagaaatgaacatccaaacagaacgatattaacgcgcagaagaggactaatgtgtggcgcgctttgataggcttcggagcgggagcgatagcgggggccggagcggcgcttcttctagcgcctgcaagcggcaaagaaactactgccgccatcagggaataatgggacgatgtgtctgacaaggtctgcgacgtttgcggcgaagcaaaaagcatggtctcgcatgcgcacgataaaacagccgccgctgtcggcaatgctaaagagcggtttgccgcaaaaaaagacgcttcagaaaaagactgaacggcaacgcgaaactcgggctgaaggagaaaatcatgccgacgccttcaatattcatggactacctcaaagtgcaagacatgagggaatacggaggacttgccgtattccctctgacgttggtttcgcccgccttcgaggcgaaagagcttttcaccgtcataggcgcgggagaactcggcgacggcataaaagcgatggaaacaggcaaaatgaattcggtaagcatagagaacagcggcgacacgcccgcgctggcgctggacggggcaatcctgatcggaggagcggctaacagaatgctgacggcgagcgcggttattcgaccgggtgaaagcgttgttttacccgctgtcagcgtcgaggcgagccgctgggaatgcgaggcgctctctgggggagcttcgagaataacggcgaccgaccccgctttttaccgctcggatttcgctccggcgagcctccggcgagagcgccttgagaagtcgtttccgacgatgatcaaagaaggcgcgtcgagggtggatcaaaatatggtatggaagcatatcgaaggcctttttgagcggtcgtctataaagaccgaaaactacgatatctgcgcgctatacgcggagagggatatccttcacgatgagtacgtctcgcgcatagagtttacggaggcgcaggtcggctgggttgttttcatcgaccgcacatggtggtatcttgatttattttacaatcacggcgtgtttgcggatatctttccgaatctgcttaaatcttacgcgatggaagcggtgttgacgagggtcgtcctagacgaggaacaggatagacggcgaccgcccgaactgacgcttgcgcaagacgcgttcgcaaagataaaactgattaaaatcaatccgattaaatcgaccgggggcaaaggcgaaggagccggtttcttcgcttccgtgaaatccggcggaatcatactgagcgaaggcgcggccctgatgcacatggcggcatgttcgagagacgatttcgtttttcggccgcctaaagcaagcgctaagaacgaagccgtgacagtcggcgaaaagacggaagctacaactgcggggcttctacttaaacaatagcagccgcgggccttgatcgagaccggccgcttgacgttcgaaaaaaggagaatcctatgggagatcagttcacccgcacgctcggctctgattcaatcgacagcgtagatagaatcgatcagacttcgaccgtcagcccggtctcgcgcgtagtgggaaaaaaagtggggcgcaaaaccggaatcgccgccgacggcgacagttttctgtatcgcaatacaggcttgccgctgccagcccggccaaaatcagcgctctggaacacggcgctggacgcagtgtcgaagttcaatgaaagcatgatcgagcgcaaacagcctttctctgtcagagtgtgggcaaagaacagcggatttcgcatacagcttatcggcgagaaaaaagggattgttatcaagcaaacagaagacattccgtttctggacgtgaccggggaagacctgaataaaatcattaattcgcttgcggcggaggaaggagtcgttgtggacattgagggataagctccgcgtccgcaaaaaaggagaacgcatgacaggaaaaaacgacataaagcaagcgcaagacgcggaaaacgccatagccgaggctaagcttgaggcgacgccgcaacgcagacgtttctgggaaaacatctggttcatgctcggcacggttgttttgacaatcagcgtcattctcgcgcttgtcaacaataccgacaccacgataaatcttctggtggcgactatgagcgtgaaactgcctctgctgattattggcagtggtattctcggagtcgcggttgaatattttatatttctcggaccgagagcggacgcccgcgcggaaaaccgcagtcttcgcaagcaagtcgcagaccttagagggttgtcatcacaagtatagttcgccgcgactgtggcgccgctcggcgcgcaggccgcagtccgcaactagaaattctggaggttatgacaatgaatcgctcgcgcattatgttgttggctagcctaacggcaacagccgtgctggcggcgtatacgctcgcgcgagccggcgcaatcggcgagaatccggtgatggatgtttaccggatacacatgaatgacgagatggagatatcggtttacggcaatgaagaccttttaaaaacagtgaccggcaggcccgacggcatgatatcgtttccgctgatagaagacatgtacgcgctcggaaagacaacggagcaaatacgcgcggaactggaacagacgattgccgcgcgcataaaagacccgaaggtttcgttgcttgtgacgaggtttcacaagccgcaagtttatatccttggcgaaatcacagcgccggggccttacgaactcacagacccgtatatgatgtacaaactcctcgcgcaggcgcggctcgcgcatcctagaatggatgaacgcaaagtattcgtcgtcagaagcggcgtgtccatgccggtggcgctgaaacgaggctcgatatcgccgccgagcgcggaaacttttcaactcatagacggcgacgccatttatgtttcatatcatggaacgacttcagtgtaggtgctgggagatgttccggagccgggtttctacccgattccggaaaacgcagccaacttaatcggacttctagccgcggcgaaggcccttgacgcgcagatattctcatcggaagtgacattgatacgacaaggcgagatgagttcggtttcagtcagaaatcctccggacggattcgagcttcttcctaacgatgtcgtgcttgtaaagcccgcgaagaaagagtccataactgtgacgggatatatcaacactcccggaatttatccttatgtcgaggggcagacgattctagacatcataacgcgctcaggcgggtttgcggcgaacgccgccgacagcggggtgacgataacgcgaaactaccctgaacgacctgagataatcgaggcggggaatctgaaccggacgacgggggacatcccgtcgctgcgtcccggcgatgtcatcaacgttcctaagcgaaaagccacattgaaggaatttttcatgaaaaaagctgtgccggttatccgcgatataacaatcatatacaaagtcttgaatgattagacatcacattatcgcgcaaactccggcaggtcgcattcttcagagattcatttaacattggatattgaaaaatgctatcttatgaacgcatcataatgaaggccgctgtctcgacggtcccgcactggtattcaagcgagcatgcgaatcatgcgttcgaattgacaatgggcgctcacacagtcgtattttgctctcacaatccgttaaccccgaatttgagatcgctaatatcatatattcagaacaatctcgatatctggagagcaaggatgccagtcgtgccgaccccacgctcactgcaacaggtcgaagaggatatcgcggtgcgatggcttgagatattcgacgcgggcgttaactggaacaagtttatcgcatacatcgaggatgtcaggttcagaacctacgagaacaatcgggtgatgactaacatcgtgatcggggagggagagggcgcgttgtcgctgtctgacgcttcgattcaaaagattgtagatcctcttgcgtcgagcatgcaagtctattttcgcgtggacagagaactgaggtttttagactatcaggaaatcttgtggaaggatgtcagcgagtcttttgagccgaagtttattcccgagtttcttgagccattcgcctcaatcctgaaaagcggagaattctcagttcatctgcgacagcgtggagacatcttcataatggactcgcgcggacttcttgccgcgaataggaagggacgatggcgcgtgtatgacgcccaaacgttcaaaaacagcgtgtgcgacattatgggcgacatcaacgtcggaagaaatcttttcgagctgatgtttgacctcagttacatgcgtcacggagctttgctagtgtacgatcctgaccataaagttatcgaacacgtggttaataaacagtcgataataggaggaatcgcgcccacgcccgacacggcgcgcgctatgctctccccggtaatacgagatatccgcctcggcatgaacgcgcggttgacgagcaggaaaaatctgtttcttgaaatcgccggtcttgacggggctgtgatatttgacggcgatgagttgatagccgtaggcgctatgataaaacagcatcccgatctcggaagctatctcggagcgcgcaccatagccgcccaatccgcgcgccgctacggcggcatcccgataatgattagcgccgacggcgagatgaagatacttttcgaaagcagcgacgcgcaacaccaaaaaagcgacgccgaactatctttcatgtgagcaaatattaaagtgttgtttgagcgcaattttgctcattccgctcgttagcctaaaaggctacaaaataatgccacattggttatgaaataatgcctttttgccgatagcgcgtatatttccccaactatatatttattaaggatgaaaaacattggcgaacatgggggatagttgatgcgactgataaaagattacatgtttctcgcggtctgttgtgcgacattaacgctggcggcgtccgcattgtgctatgcggaagacggttcaaaaacgcatgaatatacgatggccgatccatatattgacggcgagatgataccgaacggtccgtctatcgcagggccgacagggcttgtaaagaatcccagcgcgtatgtgctcgccccgtgggattacgacgtcagcgttgacgtggttggatggaaggattatgtgaaagccaacgtcgggctacctcgtcgctttgaagcaggcgtgacattcgttgaaaaagttcaacaggaaggctctttgaaccttaaatggaattttgttcctgaagcgcaagagcatcctgctgtaagcgcgggattgttagacctcgcctccacaaacagaactaaatacgcggtggtcagcaagaactttacttccggtaaaaagctccgttcaaaacatcggatcgacaaaattgcgctgagatatcaagtaggatacagaacctccgacatcgacgactccctgttctacggactcgaagcaagattccttatatcaaagaaatcgccgttcatgaaggccctgaaaaaaaccactttcatggaagagtatgacggagaccacttcaatttcggcatgagatacgatctgtccgaatccgccaaattgcatttcggcattctgagcgtggaagatataagcgtgggcatcagttatagaaagaatctgtagtcatatatccgctttatcggcacgaggcgctcaaattaaaacggcgaataggtcctccttgggaccatgtgcaaataaccctcttttatagagggcttttttatttgtcgtcttacaactgcgatctgcaatctccgcaacaagaaggattgcgtttgtgtcgtaagaattgacgcgaaagttgttttgcatgtttattcatgtcgcaatagacgaaaaagctataaataaaagacttaatagttaatagtaaatgctctcgcgccgatagcgcctaaagtattgctgtttatgattaataaagacgtcaaagtcgcgaatatcgtgtttttatcggcaaatagcatataaacgaagcatctcaaaggagacgattgtcatgacagaaaaagtagataacataaagcttgtcgaacaagaaattgataaagtgtcaaaaagcggcgagaaaaccagcaagaataacgataacacacataacctagaagctggcaaatcagacgccgatgtgaaagtatctatattccgacaacatgcgcaaccgtatttcgaaattaaggcagactctggaaatagattgcctgctatgcctgacaatgaaattcgacaaattatgagcaaggacgcaaaaggctcgcaagctccattaataaagaagcatttcgcaaaaagaaagatatccaacagcttaaacaatgcgccaatattgccgaaataagaaaagcgcggagttttatatgcgccgcgcaacgcaaaagccttcaataatgactcgactcataacatgcggtcaactctgataggttctaagaaaaaagcgaatgtgcgcattagtcagagaaaagcatcgcgcgggcgaagaaaagggggagacaatgtttacgtatcgaatattcaatgaatatgaatacatcatggtttgccctgaaggagaactgggatacgatgtgtgcgatgaattcggagagattgtcacaagctgtatgagtccgggcatgcgcttgttgttcaacatgagaaaagtgtcattcctcgacagcgccggcgttgggcttttgttaagcatgaagaagttggctgagtcttggaatggctcctttgaaataagaaacatgtccaaacgcgttaaggctccctttgataagctgtctcttaatgaagcgctaaatgtggcgagcatataagttccggcgcagccacaaacgctatttattgcgcggcgcagcttcatctgagtttagctaaaacagttacaaatatatgccgcatgagctaataaagattgcttttttgccgatagcgcaacccgcttgagagcaatatgatgtatgcaacggaatatttctaaaacgaggggtgtaaagatgagaaggatattaattttggcgctgatattggttttgttcgcgatgactgtcgcgacaaaagagaccatgtgcgaatcgttagcggggagcgcggtcaacagagccgcggacgccgcctccgacagttttatgaattcgataagcgagtattttgccgttccgaagacggaagttgcgaatgtcaggcaacgaaacatcgcggaagaagatattccggttgtgttttttatttcgcggaaagccaatgtggctcctaagatcgtctcagactatcggctaaaaggccaaacgtggcaacaaatatcaaaccgatacgggttcggggcggaatcgtatcatgtgccgctcagagagggcgcggcggcagggcctccttatggaaaggcctacgggtattataaaaacaagccgcaaaaagattggaacaagataaaactcgccgatgacgacatcgtaaatctagtaaatttaaggtttatgtcaggacattataactacccggcagagaaaataatggaaatgcgcaagcagaataaaggcttcaaagcgataggggcggacatcgagaagcagagagacgccaacaaagctaaagccaaatccgcttctgataaaaagaagaaggacgcctcagcggcggccgccaagaaaaagcagtcagaacagaaaccaaaggaattgacgggagtaaagaaacaaatcaacaagttcaaacagtatttcaataagaaagaacgaaaaaccaagaagtacatgaatgacaaaggatgacaagcggcgcaagttgaaattgcgcggctgagggggaagcctatgacaaggttgttgatagcggaagacaacacaagcgtggccgaactctaccgcgaggaattcgaaacagagggatacgcagtggaggtggtggataacggagcgtcggcgatagagcgagcgcgcgaatggcagccggacatagtggttctagacatcgggatgccggagatgagcgggcttgaggcgctctccgatttgtgcgcaggcggcaggacggtgatagtgaacaccgcatatccgctgtttcgcaaagatttcagggcgtatcttgcgaaagcatgggtgaccaaatcgtcggacatagaaccgctcttggaagttgttcgccagaccctcgatggattgaggataacagacgaatgtgcggctctcattcagtctgcgacatagatgaatgcaatcaggcgcaattaacttgagcctgagaataatattcaaaaacaaaaggagaaaagattatgagcgacaaaaagacaatcggggaacgcgttgacaaggcggtggataaggcttcagacaaagtcgacaagacgaaagataaacttgaatcggcaaaaaaagacgtctctaaagttggaagagaaatttccaaaagcgttaaaagagccgtggaagacaccggcgacgctatttcagacctagttaaatcgaagaaatgacggcgcgttgttccgcgcggctatgcgcgcgctctgattaagcggctcacgcgcgcataatctaatgtcatctccaagggcatgtcacgagcaggccggcggcgttactcacgctgaaacatggaaagcgacgctcggcctcgctttgaacttcttggattgcggcaaggtctcaactgtttaattcattaaagcgcgcggacagtgtccctttaatgttgagcgcaaacaaaacaagcgcgaaaaggaggctttgccgtggcatcaagaataatattgatagcggacgccgataagctttatcgacagaaactgcgagagttatttttagcgaaagatgatttcgcggttttcgatgtgggaagcggcgaaacagccgtaaccttcgcgaccgaaaaaaaacctaacgtggttttgctcgatattatgctgcctgacatgaacggaatcgaagtctgtcgcaagataaaaatgaacgaccaatcgaaatacatgccgataatcattcatacggcaaagacagggatgcatgagaggttgagggcatttttagcgggcgcaaacaggtatatagaaaagccatgcgaattcgacgttgtttatgactgtttgcaaggcgttataacgccttattgttacgatcataatctgtcacagaatgatgttttcaaccggatgacgctttgactaagcgcggcgcgcgcggcgtcagaaacgattgataccgggggattgctcatgctggagtcgattgcattaatactcgcaattttgtggttgctggggatagttagcggatatacgatgggaagcttcattcacattctgcttgtcatcgcagtcgtagttgtattggtgagagtcattaaggggcgaagaatcgtttaactggaggctactgtgttttgaaaggacatgcgaaacaatgtttagttgcgatatagttaatgagaatgaaaccacattgatattagccgagggtgaactggcttacgatgtatgccaaagacttaaagaccttgtgttcgagtatatgcgtcagggagtgtccctttcgtttgacatggcgggagtgacttttcttgactgcgccggcgcggggcttttggcgcaattaagaacgcttactgacagatggagcggctcattcgaattgcaatgcttgcaggcgaatgtgatgcgaatgcttaaattgttgtctctaacggattatctgaacgcgaacgcgcccgaaacgcctcgtctccgcgaagcctgcgcttcaaactaaaataaataatgttttcctgttcaatcttgttgcctgagacagccttgcggcggcggttgtcgcctcttgacggcagagcgagcattagtgtccggcgcaatccgtcatcaagtcagcttcgtgttcatccgttagtcgatgtggctaaatatataaaccgcgatggttacaaacatatgctttttagccgatagcgattgttaagcgagcgacgtatcattgacgcagcaaacaaatacaaaggagaaacaaaacatgaatgaaaagaaaacgatcggcgaacacatcgacaacgttgtcgataaaagcaagagcgacaagggaacgctaggcgagcgcgttgacaaggctatggataaaatgtcggacaacgttgaaaaagccatagacaagatcgctgctcgaaaagaggatgtcgccgacacggcgcgcgatattaccaagagcatgaaaaaggcgatggatgaatccggcgatgcggtggcggacctgattcacacgaaaaagcaagagactgaagcttaaccgacatcgctagacgcaaggaattagaaagaggctgagctaatgcgttttgctcgaacaagagacgacttgttaaaaagcgcatttgtgcaaatagcgctgttattacagaaaagcgcggaggaatataatgaaacattacaagaagatagaagcaatgaacattctgagatgcttgtgttgcgcaaagggttcaagccgaggcgcggcgggacgcaacatcgttgccgcgacgattcttgcgttttcattgctggcaagcgcggttgctgaggcatcggtggaaaaaggagacagggcgatggcgagcgaaaattaccgcgccgccatcgcgcactatgaaacgcatttgcaaagcaatccgagagacgggaacgttataacaaaagcggcccgggcgtacgagggcgcgaaatggtggggcaaagcggctcagtggtgggattattacataacgatgtaccccgaaggctggaggatagaagatgtaaaaaagcgcgccgcagattgccgccgctggcttggagcaaacacatatataacaggcgggtattactggatggcggttgaagaactcgagaaatcattattgcttgatccgaaactggcggacgcgtacgtctggctcgccactatttaccagaatgaaggcatgtacgacgaggcgctggctattctggataaagggatcaaagaggctccggaagacgaagttcttctgatgatgcggaaagacgccgcgaactatagagagaacggaggcaacgcgtatgtggcgcaccggagcggcattgcccgatatcagggtggcgacatatccggagctcttgacatgttcagagaggcgatgaccgcaagcgaggattttgcggccgcgcatctatggacggctcgcatactgttcgaacaggggcgcttcgcggactcgattcctgaatggcgcgaagctcttcgaatacgtcccgacaacgaacacgctttcttttatctgcaactggctcagcgcaatgtcgccgccgcaaaataaaagcgatctcagcctaatgttgagcaatggcgcgcaacgcgacgggcagaatacattctgagtctttgcgcatgaaaacgatgtcgaggcccgcgcctaaaaagcgtttccggcatgaacaggagagcgactatgacggaagcattccgcgaagacgtggaaaaacttattgataaagaaaagacatatctgtggtctcgcgccttgcagatagcaagcaatgcggaagacgcggaagacctgctgcaggaaacgcttctcaaagcttgcgaaggttacggcggttttgcgcctgacacgaatttccgggcatggaccagcagaatcatgattaacacgcatatcaacaaagtaaaaagaaggaaagagcaagaaatctcttttgacgatagaaaacacgacaaaagcaaattggcattgaaagttgcgcgacgaatatcgcacatggactcgcctgacacggtgttttttcacaaccatataaatgaagagataatgaggcgttattattcgttgcctgagatgtacaggctggtgttttcaatgtttcatttcaacggatacacatattcagaaatatcatcagccatgaagattccgaccggcacagtcaaatcaagaattcacagagcaaaagagcgcctgtcggaacaaatgcgtgaagagcgttattctgagaacgctttgaactaggcttgcgacttccatctatcccggatttttcattaaaaaaatccgaaaaaacgaataaagggcgatctacggcgttgaatcatcgactcgaactcggtcacatacgaaacagtagacgttgagttcgtcagcaacgtatatcttgagagcgaagcctatgcgatccagtgcaacatccgcgacatctctgagcgcaagcgcgtggagcatgagcttaaacaataccgggaatgcctcgaagaagtcatagaggaacggaccgaagagcttttgcgcgcgcaagaacaactgatacagtctcaaaagatggacgcggtaggccggcttgcagggggcatatctcatgactttaacaacatcctcgctgttattatcggaacatcggaagtcgttttaggctcgatgtcgccggaagacccgaaccaagctcgcatgcgacgcataattaagtccgcaatgcgggcgaaaaacataacaagccgactccttacgttcgcaagaaaggaaaaactggaaataagcgacgcttcggctcgcgatatcctgattgacacagtggacatattgcgtgtcagcgtcctcaacaatatcgaaataacgacgccggaatgcgatatcctgattcgcggggacgcaaatcaactcggacaggcttttctcaacatttgcgcaaacgcgtgcgacgcgatgaaggagggtggcaaactagagattggggcggctcctgtttatctggacaatgaattttgcagttctcgcagagggattaaacccggagaatattgtcttatcgacatacgagacgaaggcggcgggattccggcggatatgctcgaacaaatattcgagccgtttttcaccacaaaagacaagggcgcgggcacggggctggggctgtcggtgaccaagagcatagttgagacgcacaacggactgatagaggtggaaagcaaaccgggcgaaggaacgaaagtgaaggtgtatctgccatgcgcgaaggaagcgccaacggcctacaagccggaagcggacgaaacattgcggaagggcaaaaaagaaacaatacttatcgtggacgatgaaaaagacttcacagatatgatgtcggattttcttattgagcaaggatacagttcaatcgccgccaacggaggcaaagaggctctcgatttgttcaagaagaatcaagccgatgtcagactggtgattctcgacatgatgatgccgagaatggacggagccgaaacgtttgcggctttgcggcaaatacggaatgacgtcaaagtcatcctgtgttcaggattcagcgtcgcagggaaagccatgcgattaatgaacgacggagcgcgcgcgtttgttcagaaaccattcatcggcgaagttttgttgaaaacaatctccgagacgctggccaaatgaactcggattcgcagatagagaaggcgaaacgcgggcaattatcacagcggcgctctgcctcggtctctctgaataattgaagcaggggcgccgaaatatcgcctttacagggcgaggaaaccgcgtccctatttcaaaaatgaggctcgcgcctcgcgaactatccgctcagcgcatcgctcccaaattcgtcatttgattcttttagcaatcacttcaaagccatgttcaaagcgcgctggtttcactgagttgaaacccccatccgaacgcgcacccggtgtttgaccaattctccatcgagatgaatctctgtgttcttcagacgttggccgtccatctccacccatgcgacgcctcggttaactccgtcggggttctcgatttcaatttcataaacggcttcttcatgccggattatgacgcttgctctgtcccattctgatggaagaaccggatcaaagagcagtttgccggcggcgatttttattcccagcacatcctctatccatgcccggtacatccagccggcggcgccagtgtaccacgtccaaccgcctcgtcctgttctaccgggaagtcggtagacatcagccgcgacaacataaggttcgacagcataacgggcgaccgcttccggttcgcgagcgtgttctatcgggttcaacattttgaggatagaggcggcgcggtttccgtcgccgattctggcaaacgccatggcgagccacaccgccgcgtgagtgtattgcccgccgttttccctgactcccggcggatacgccttgatatatccggggtccttcggcccggcgtcgaaaggaggggtaaacagcagaaccatattctcgtctttgagcgcgaggcgctctgcggcggattcgagcgcgcgcagggcgcgcgcagggtcagccgcgccgctcagcgcggcccacgactgcggcagcgaatcaatcatcgcttcctcattcttcgatgagccgatgggagagccgtcgtcgaaccacgcgcgcttataccagtcgccgtcccaggcatgtttctcgacggccttcgcaagacgcttcgctctctcaaggtatcgctccgccgcaaccggcgcgtctttaaccatctccgtgagcgcggcgaactgtttgagcgcgtccacaaggaaccatgcgagccacacgctttcgcctttgccatttattccgacgcgattcatgccgtcgttccaatctccagtcccgatgagaggaagccctcgcgggccggatgtcgagccgcgctcaatcgccaaacggcaatgttcatacagcgtggcgctctcgatcgactcaaccggattcccaaaggcttcgtattcttcctcgtcaagcgtccggccatcaatgaatctgatgttttctttgagtatttccgcgtcccctgtgatgcgcacatactgcgccgtcgcgtgcggcagccacagcaggtcgtcggagcatcgcgtcctgacgcccgccccgctctgcgggtgccaccagtgttgaacgtctccctctctgaactgccggcctgcggcgcgaagcagatgttccctagcaagcttgggagcggcgtacagcagggacatgacatcctgaagctgatctctgaatccgaaggctcctcccgactgatagaaacccgatctgccccacagccggcagcttatggtttgatagaggagccagcggttgagcaacaggtttaccgaatgagatggcgtgttgacgctgacggcgccaagcgttttgtcccaccacgcggcggtttgctcaagcgctttcgcgacggagccgccgtcgcgatatttattaaccagagcggccgcctcggtcgcgttgtcggcttcgccgagcagacagatgatttcgcctctttcgccgggcgcaagctcaattttcacctgaagcgcggcgcaaggatcaaatccggcgccagctcttccggacaatccggctcgcttgagcgccgcgggcgcggacaggcttccgttccgtcctatgaattccgcgcggtcgcctgtgtgcgcgctcgccgcagggattgtcgcggcgaaggcgactccttcgctgtaatccgcgcggtagcgattgcgcgccaatatcatttttgagccgcggtcatactcggcgacgacatgcgcctgcatattctctcgatgctcgcccaacgtccattccacgtagaaagtcacggacagccgccttgcgcgggacgagtcgttgcggagcttaagcctgcgcgcgcagacggggtccccgccgtcgtcgttgaccggcacaaacatcgtaagctcctgttctatcgcgtggctgttgtgctcaaagacgctgtagcccgcgccgtgtcttgagcggtaagcgtcgcgttcgcgaatcggcagaggagtcggcgtccagactgcgcccgtgtcttcgtctcgaatgtaaacgacttccgaaggagggtcgcaaaccgggtcgttagaccatccggtaagcctgttctgctggctgtttccgcgccatgtgaagcctgagccggactcgctgacaagagttccgaaagaggggttggcgattacgttcacccatggggcgggcgtctgttgttcggggccgaggaagatggcgtattccctgccgtctgaagtgaagccgcccagtccgttgaagtacggcagttcgatgaacgggagttgcgcggagggctcttccttgatggctttaacggcgagcggggggagcgttctgagggtctcggcgggaatgctgagttgttgggccagaggcccgcgcgcggcgacgagcgacacatgagacgccgccaacataaggttgatgtcttccgggggaatctgacttgctgtccttaggaaaacgccgccccgcacgtccacgcccgtgttcatcgaatggctgaagacaagccgcttcagttgttcgttcagaggctgttcatatcccgcggattcctcgtttatgataaggaggtccgccttgaggccgcgcagccgccaatagctgtgggcctgcagcgcttggcgcgccaagtcgatgtccgcgtcctgtttaataactacaacggcgattggaaggtcgccggatattccataaggccataggcgagactgcccaagtttgttctgtttcagcaggtcgctccatggacggagccgggagttgggatatatcatcgagccggcgagtttctggaatcgacgcgcgtcgtctgggttaatgcgcaggtggcgaagctcaagctgggaatggctccatgagatgtctagttcgcgggacgccgaattggggtcgaagtatttttcagcgagcaaaacgacctgttcgcgagtttcagcggcgcagagaatgagggagaaatcgcggcgcgctcccggttcgagcgttatctttcgccgcaagctgaaaatcgggtccatggacgagtccgcgacgctggacaatttattgccgagagccgcagggtccgacaaggagcgaccgcgacctatgaagcgattgcgatccatttcgaactccagctcgtcggcgggctcgtcctgctccggcatacaaatcaaatgcgcggcccatatcctcggctcgtcgggattttttacgcggcgcgtggctatgagagcgccgaaccgaggctccgtttcagtctgcgcgaaaagcttgctgaacgccgggtgctgcctgtcagagtcgtgcggagcgagggcaagctcaatgtaggtggtcgcctcaagctctctcttgcggcctgacctgttaatgagtgttatgcggcgaatttccacgtcgtcttcaggcgccgcgattatgagagtttccgtttcaattccatcgtccgagcggcgaatctccgcctgatcaagcttgaagctaactgaatagttctcaatgtcgccgcccgccggatggaaagctgaactccaaacccgcttgctcttaaggtcgcggatatagcagaagaaaccccaattgtcgctagttgtgtcggcccgccagcgagtgatgtcgaagtctcgccatcggctatagccgcctccggcgcttgtgaccattagagagtagttgccattcgaaagcatctgcgttttagggtgtggggaatgaggcgtgttgaaaacgcttgttgacggagcgatttcgtccggcgcggcatggaaagaagtctgctcccggtctgagccttggtagataggcggagccgccggagagcgctcatagaaaagcggctcgctcgcccgcactctcgggtcgcggtgaaacctccgtcgaatcgcgctgttgttgacgaggttgtcgatagccagaaaactcatcgcttgatggtgcgccatataaacttcgacaattacgccgcgctcgccttcgcggcttcgttcgcgggtgaaatcaatagactcatagaacccgtagtcgcctgacattcccatgcgcgcaagacgcttgaggttgcggatggcttcaagaggcgagacggccagcgcgagcatggatgcgtaaggggccactacaaaattttctcccaagttgcgcttcagtcccagcgccggaatgccgaacgcctgatactgatatgttctattcgcgtccacggcgctgtgcgccgattccgaaacgccccacggagcgcctctccggcgggcataagcgatttgcaggcgcaccgcttcccgacatgcgtggtccaagagcgaattttcaaaagacttctggaagagaagaggcatcaggtattcaaacatcgtgcctgtccaacttagcaaaactggcggcccccccgcggagccgtacggacgggccattgccagccagtgcttgcccggcacatctccgcgcgcgatcgccacaaggcttcctatccgcgcctcgctcgccaataaatcgtagcgcgacgagtcaagccgttgctcgctcacattaaatcctatagagaagagccgtcgctcgttatcgtacaggaagcgcatgttcatgctttctgacaactcgttgacggagttcaacaggctgccgacccggtcgagcatttcggcggccatccatttggcgcgggcaaaagcgtcttcgactcgctgtccgcattccaatcgtcgcggttcgttcaaattgttttcatcatttgccgccgtcttcgacagtaaaaaatttccctcggagagctgtcgcatggagggcgctttttccagagcctcaagacagtccgcaatcgcgccgtttcttgtctcgtcgccggcggttttcgtctcttccgcaatcgcttccatccacgggagatagcggtctatcagcgtgcgccatgacgcaagcattgtttcagtccggttcgcccagtgcgcggcctcatcgcgtggcgcggcgttttcgcacacggcccggcgcaactctgcgacagcgcctgtcaaggataaaagccgagtcgcgagttcgcacagtcgtttcggaggctcggccagttgttgttcgagaaatttcaacgcctcgttatgaactctcgctctgtcgcttttctcaagcgcctcgcgcagcgcgcggagcgtgtcgagaaggccgtggaacgcctgcggcccgatgacgggttcgtcgatgatttcctgaaagcccgcgctgagcgtccacaggctgccaagcagatttccgctgtcaacagtcgacacatatctgggttcgagagggtcgagcgtcttgatgtcgtgccagttgagaaggtgtccgttgtatttttcgagtcgggctatggttttcatgcacttcgccgtccgctcgaacgcctcgtcgcaggtcaggtagccgaaatcgagagcgcccagattgccgagcaggcccaacccgatgttggtggggcttgtgcgcatggcaagattgtttccggcgtaaacctgaaagttgtcaggaggcaaccaagatgtttccgggcctacgaagtcttcgaaatagcgccacgagcgccgagctgtgactctgagcatgatttcatcttcgcgggcgatagggcgcgcgcgcgcgatgcggcgcggcgcgctcagacgcatccctgctataggacaagccgcccacagcaaaagaaaaggcaaagagatcgagagattatccgggcgcgacagaaatatcgcgattcctaagacaacagagaacaggctgacggcgcacagttgagccagaagcgggcgaagccgttcggacgctttctgttgaaccgcctgcgcggtcgcccattcaagcagtccgcgatggcttacgaaacgacggtagaacacgcgaattatcgcgtctatggacatagctgccctgtgcggcaggaaaagcagttccgcgcagcaacgtttcgcgttgtgcgctagttgtcgccatgacagggggtccgccccgcgcttgccggtcgctcgcgtgacaagctccgaaaacaccgggaagaaggccgataacccaactattaagcttgccgcagcgcccattcccgaagatatcagccatgacgaagcgagaaacaacacggacgccgccggcgcaacgcttcggcgaaggttgtcaaaaatcttccatcgattcagagcgctgagcggatttgcaacgcgtttgccgtcaggggagggcgctttcggcatgcaccagtccgcaatctgccaatcgcctctagtccagcgatgctctcttttgacataggaaaaatagtcgccgggaaattcgtcgagcagttctatatcgctgacaaagccgacgcgaagatgcgccccttctatcaggtcgtggctgagaatcctctgcaacggaaaacggttcttcaagacatggtgaaacgctcgcggatcgtagatgcccttgccgatatacgacccttcgccggagaggtcttggtaaacgtcagaaaccgctttcgtgtacgggtcggttccgatggggtctgtgaacaagcggctgaaggcggtcgccgtcgcgctgggaagacttgagctgacgcgaggctgaatgatagtgtacgggctggagccgacggcgtccgcggggttgaacggcgggcggttcaacgggtgggcgattgtctccaccattcgtcgcgccgtgtctcttagcagttgagtgtcgctgtcgagcgtgatgacgaagcgcgcgttcttcagcaagtcagggtcgcccgcgcggacgatctgctgtccgtcgggaagcgcttcgccgttcagcaacctgtttagaatctcaagctttccccgcttgcgttcccatccgataaaggactgctccgactccgtccacacgcgttcgcggtgaaacaaaagaaaacgccccgcgccgtggcgttcgttcaacgcgttgattccatcgacggcggccgcaaggagttcggcgtctccgctgtcgcgctcggtgtcggagccggtgaagtcgctgaacaggctgaacaggagatttggttccggattggctagatagcgtatctctagcttttcgatctccctgcgcgccgtgccgatgtttgagagcatcataggcacaacgacaagcgtgcggaattcgtcggggatgccctccttttcgaacgacatcttcggcagaaggcgaggcggcaaaaaacgcgtcacaaggtagttgatcgcctgaacggctatctggctggcaggcagagatgagagagccgacgcaagcgcggttagcgccgcgctccctcccgcgaaagagctgaccgccgcaacggcggcgaccgccgcgaccgtcggaagcagaatggatgaaatatatatgaccgtgtggttgcgatagacccaatgaagaattcgccgccgcagggtttcccggcttgccagttgggaggccagacgcggacggccctcgtcgatcagatagtatccgacatggttttttcggggatcaagcggcttgtcttccgcgtcggccatcagaaccgccgcctccgccgcctcttgctcggaaacgccgccgccgcgagccagttcctcgaccgcatggcgatatctgtcctttgtggcaaaatccatgctgcagtacaccccagacgggtcctcgcaaagttttttctcaaccacgcacaagtcttcgaaaacatcccgccaatcaataagagacagttggcgcaaactggctatcgcgctgccgatggaagcgttatgcgcggcctgtcgcgcctgctcgcgaatcgcgctgtcggccaagacgccgccgctcttgcgctcaaaccaactcttaacgtgcgcgagaacctcgctctccccgaagagatgtccggtgaggtgaaacgcgaagtggtcgctaggctcaggctgttctcgctccagttcggacagaagaaaaaaaagactgtcgggggcgagccgcgcggcgaccagaagtcgattggcccagaagtcggcgttctcgcgctctctcagccacactgtcatctgattggttaggtttcttatgaatgagataagcgcgatgcgaagcataagcggcatcgcccacaactcgcccatcttcaaaggactgaccgcttgatattcgttaagatggttcaatatggtgtgacgatccagttggccgtcagtatgcgatacaaggtccgacgctatgcagtaaatcctcggcatgttctgaacctgctcagcggccagcataggcagttctcgataaaaatttccgggcaggttgcgtcgcacatcgtcgtaattggctttgattagatgatagttgtcaagaatccattccgctgaaggggaaacgcgctgttcgagacgcgacgccccggcgagttcacggcggcaaaggtctatctccttaacacaaacatccacaagctcaagaagatggggcttgacgcccatatatgactgaacgcgatgatatccggctagcagtctcgcgtgcacagccaactgcgaggctgtcatgtgttcattcttgtcagatccagattccgcctctgtgacccggtcatggtgaaaaacaaaaatcgagggttgcgtctctccggcgacgcgcatttgcgccaaagcttgatccagcgactccaacggagctttcacgatgacggccgtttcttcattcacaagccatcgggatcgcttcttcgtaaaatcgcgatcctcgctcgactgaaagacataaaccgccagccttgcgacaatcgccccgccggcagccgcaagcaatagtccgactacgcatcgccatgccactatcgcctcgaatgttccaaaagacagatgcgcaattattattccaatcgcgacgcctgcgaccgctcctacgcatgtccaatatctatcctccgcggcgtttttgcgaaccacgccggaggcggtttttgaaattatcgcggttctgcgaaaatgacggcgtcgcaacatcctaaacgccacattagcttcttttcggtccacataaaacccaagcagtattcctgattctttcattgccttgctccaaatcattaaacgttgcgcgcgcgaatcgttgttaacacatgaacaagcgtattatggcgagcttacaaagtttcagccgcgctcctgtcgcagttgttctaatgtgaaaaacagagttaagcttttcgtgttttacttctaatattatagcagaatatactcgctaagagttgtgccatgcgcaaaactatttcttttgcgcatgatgctttttaccaaatagtaaatgggagctttcatttagttcttcgtatatgatacgtattactaatgacggaacgttgaaaaagtattcccttaaaccctttcaaaacttttcgcgctagcgccgatgggaaggcttcgctcttcccatcggcgcgtatcatgcgaaaagatattgagaaaggggtttcatgaggaatcttcttcttaaacatttccacaggagcgtcggtacgggacgcgtcagcgtcccgtaccgacgcgcaaggaaaagtttgaaggattttcaaggaaacttttcaaagtttccttgaaccgccggaggcgctttaatgcggttaagggaaaacttttaaaaaagttttccctcaaaacatttctatgcgcgcggcggagcgggcgcgttcgcgccatcgctccgccgcgctcatgtgaaaagttttgaagagattccaaagagaaactttttcaaaagtttctctttggccgccggaggcgcttttaaaggcggatttactgcgtctatccgtttgtcgcgcttcagtcgcttccgtatttgtctttgactttcttgaaagcgatgtcggccacttcgagcgatttcttgatgtcttcttccgtgtgcgcgcaggaggtgaaccagttgtggtgcgggtggaagatgacgccccggatggcggcctcgccgctgaagagctgtttgagcatgaagttcttctcgcgcgcgaaccgcatgaacggtatgtcgtacggtccggacatgataatctcaaacccgtgggatttgcctacgctgacaaggccgtcgcagagcgccttgccgattttcatcatgtagtttactccgtccagcctctgcatctctttcacggtggcgatggacgccgccatcggaaccatgctgctgaagaacgttcccgtgaacagaacgtgttcggcggtctctttcagtttgttcgttcccagaccggcggagatcgggtaggtgttggctatggctttggagtagcagaccagatccggctcgtatccgaagtaggcgtggctgccagccatgtcgagcctgaacccggcgcgcacgtcgtccgatatcagaatcaattcttcctgtttgcagactttgccgatggcttcccaccagccgggagcgggcatctgctggtccgcgtatatgcagtggtggtacggcgtcatcatcacgcccgcgacctgccctttgtatgtgttgatcagttccatgaaggagtctaggttgttccattcgaagaagtgaacgtgcgtgcgatcctcgtcgatgatgccgccgtagcttggggtggaccatgcctgagcgccgtgatacgcgccgcgcgcgatcaggattttctttctccccgtgtattcgcgcgccagcctcatgcaccatgtggtgatgtccgcgccgttctttccgtacacgcaccagtccatgcccttggtgagtttaaccatcatctcggcgtactcgatgctgatcggccccggatggctcatgccgtcgcccagttttgcctgttcctgcgccgccgcgtccaccaccgggttgttgtatcccagcaccatcggcccgaaaccgcacatccagtcgatgtactcgtttccgtccgggtcccagtagtggcttccctcgccgcgagtcgcgaaatacggatacgagccggggacggtgaacgcggggtgtttgtgccctatcactccgcccggaatgactttgcatgcccgctcgaaccactcgtatgatttatcaaatttgtaagtttccattttcaagccctccagttgggtatagtcgtccggcgtcaactgatatacaggccgatgcgctccataacgaccgcgaggctttcagccattccgacgtgcccgcgcagccttatgcggcacaggcccagctcttccatgaactctacattggcgttcagcatatcgtacgccagcttgatgtctttaatttccatgacgaccatcgggttcgccgccggccctttggccacagcgaactttccgttgtccagcacgatatgcgccaccggcccgtccggcagcacctttatctccatcggcccgttcggcactttcgacactattccttttacatacgtgtcgtgctctccgacggccttcatgccatagacggccatcatgagtttcacgcgcgtatggaactcgaagaagtccttgtttttgagatcttcttccgacggtctcagatacttctccatgagtttcgtcagcttcatgaactttccgagtttcccgatgttccagaagccccatatcatgggaatgaccgtgccggtgttctctatcattttgttggcggcttccggcgtcggaatcctcagcgagattgtgggcatgctcacagcgcccagtttcgcctcgcatttgccgtctttgaagacgaacctgactcccgccccgccgggcacgtgcatctggatcgtgcagttccagcctttcgtcagctcgcgcgcctccgcgtcatacgcgattatctcctcaagctgaggaaggacggcgttaaggtaaagatacgactttactaattctttttctttttccttatccatcgcggcactcccctgatgaattttgacgggcgcgtcgcagttcgttccgcgacactccgccaacaggcattattattgttattgagatatatttttgcaactttatttaaatcggccctagaacggcgtctatcccgctccaaaccgattgccgccgcgccgtcaatccccgtcaggcagggatatttcgcaaagaatagcgaaatggtcgggcgcttcctgaatcggagcccccttcggatgcccgtccagccgttccgtcccgggcgactgccccagcgtgacgcaagagccgcgcgccgcgttcgttatcacgtggtccagcgtgaacccggagcatgtcctgaacggcgggtcgttttccgcaggaccgctcagatagtaatatttcttgccatccccaacatgcttcagccaaaccgccacgtcgtcttttgcggcgtcccattgaaacgggtccatattcatgtcgcccatgataatcgcaggactgtccgtggccgcaagcgccgggaacccttcgtatccctcgaacaaccttctcaactcttcggcgcggcatccggcgtccgccgccgacggatgcccgttgactatcctcagccgtttcccattaatctccgcgtccgccccgaacacgaccgtctttgtcgagcatccttccggcgtttcgattgtcagcggccagcccggagcgcggcacagttctccgcgcccgcaaccttcaatcgtcccgacgctttttttcactcctatgcactcgtagttggcgcgcccgtcgcacactatcgtataatcatctcccaacagcctgcgaacctgatgcctctctttcctgtcctcaaaccggaagcacacattcttcttgtttttctccacggccgccgcctcgcaccactgaacgtccagaacttcctgcagcgacactatgtcgggcgacagcttggctatcccttccgcgaccttcttctcccattccacgagacacagtttgtaaaaatatttcgggccgcagttcagtatgtccgcgttgccgacgtttgcggtgagaaccctcagcgaagcgggggagggggagcctccgtccgcgagcgcgcggggactgcccgccataaacgccgccgcaactatagccaacgcgattgtttttgccttcattctgaacgcctccggacgcggtcaaccatcgacagttttttaatctgatttcttccggcaaatatttttcttcaagttcgggttcaagcttcgtttttataagggccgctcttgccgccttctttttccataaggcggaaagggccgatggagatgtctttctggacggctttgcacatgtcgtagatagtgagggcggccacggtcgcggcggttagcgcttccatctccacccccgttctgtccatcgctttggcttccgcgtcgataacgattattccagcgtctctgtcggcgctgaactcgacggaaactttcgtcaggctgagaggatggcacagggggataaggtcggatgtttttttcgcggcgcacacggcggcgacgcgggcgacttggaacacgtctcccttggagattccgccggacagtattttgtctatcacgtcgggcctgagccgcacttcgccccggacggttgcgcgccgcgcggtacgttccttttccgacacgtccaccatcgacgctcggcctttttcgtctatgtggctcagttcgcccccgctcattgcgtgtctccgttcgccgagcgcagaatctccaccgcctgttcgggcggaaccggattgatgtagaacccggtgccccactcgaatcccgctatgttggtcaggcgcgggattatctctatgtgccagtggtacgtgtactgtcggctggtgttcacggggatggtgtggatgatgtagttgtacggcgggaagtccagcgccttgtccagatatttgagcgacttctgaaaacactgcgccagagacgcgatgtcggagtcttccaagtccgcgaaattggggtcgtgatgtttcggcacaagccacatctcgaacgggaaccgggacgcgaacggcgcgaaactaataaatcggtcgttctcgctgatgacccttctctggtagtccctctcttcgtctatcatgtcgcagaagacgcagcggtctttgaagtcgaagtattcctgagcgccgttaagctcctcggttattctcttggggacggtaggcgtggcgatgagctgggagtgaggatgagccagcgacgccccggcggactgacccgcgttccggaatatcagtatgtatttgaaccgttcgtcgttctcgaggtctatcatcctttccctgtacatccacattagctgttccatgttttgcggttctagggtggatatggttttgtcgtggtcgggcgtctcgatgaagacctcgtgcgcgccgatgccgttcatgatgtcgtagatgccgcgcgcccgcttgttgaggtcgccctcgattgagagcgcgggatacttgttcgacaccacgcgcacgcgccagccgggcttgttcggctccgtgcacgagtcccgcaccgcgtctatctcaggcggcgtcttgtcttcgttccccggacagaacgggcagaagcccgttttcggaagaggtttcgctgcgatgaaatcgctcggcctgtcgccgcgctcggaggatattatcacccatcgacccaacacggggtcgcgtcttaattccgacatccttaatcgtcccgctttccttgcctagtctcaattatacgcatttgcgccccggtgtataccccgcgcccgcaacccgcaaagcccggccgccccgcataggcgatagcccggctaatgtttccattcgaccgggaacagcatgcgtatgtgcgtgacgtctttcagagctttgtcgtcccgcccggacaccgacggcatccgcgtccactccccgccgccgatccgcgcctgaactatgaacgcccccaaagcctgttcaagcgtttttccctgcggcccgcttttgaaatgtaccggcctgatgaaatgcctgaacagcggagccaccccttcgagcgacgggtccgccgcccccggcggcccgaccaccatccactgcgtcagcagcctcgcgttctccatctccgcgctcatcgcgtggttttcagggattatctgaaaaccgcctatctctcccaccggcgacgtcgagacgcagatgactcccgtgtggttcgccctgattctcccgacgtccgtgtacagcgagccttcgaaccttccaacccccgccaccggtttcaacacctgcccgatgagtttcggttcctctccgggatactttataaggatgaaccctccgaacctgttttcgaagacgatttccgatggatatttctccggctgttcgacgattatcagcagggaatcgccttctgacggcgtataatcctcggcgattggggagtgagcggaaccggcgcgggccgcgagaacccgcgagcctatgaacggcgattcggctcctccgaaaatgctccctccagccgggatattcgttattattgaactgttccgggaatagaaagatttataatccgccggcggagagaagaaatctttgggcaggatgctgaacaccgcgcctctgtcttcgttctgccgcacttttatgtgaatggcgtttacggcggtcgcagcgacagcccccgaagacgcccagccgctggcggtgtacgctcgcggatttatcgtcccggcggccagcaggacttttccggcggccgtccacgaagcgcctccgtcttcgctcacttccaccgctccgcccgccgcgttctccacctttatcctgaaaatttctttcatcgtcgcggagttttcgcctgctacagaggcgtttggcccgcgcgcgtccggaagaaccgccgacgccggagcgcagaccgccgccgccagaaccgccgctattatcgccattttaactttcatctgtttcctccgaaggcttgcggcctcctcgcggctttcgcgcctacagctcgattagctctgccttcatccccgccgtgtcaaaaacggcgatagtcgatttgcctgtcagccatccgcaacactctccgggattcactatcacgggtttgccgtccttgagaacaggctgatgcgtgtgcccgaacagcacggcgtccaccggcagcgccgccatcgcgtcgtccggcataggctcgtgaagcacggcaaaacgcgctccgcccatctctatgaaagccggcggcttctctatccgccctatcttcttaaatgtttcggaaagataaatcaattctccgtcgttgtttccgaacactccgaaacactcctcgaacccggcttccgcgatagctttcacaacgaacggggaaacgatgtcgccgcagtggataagccgcgcggcgccgcgggatttcagcgtcgatatcgccgctcttaaccggtcaaggttgtcgtgagtgtcggatataattcctattaacatacttcgctcctcggcgttcgcgccccgcattctccggttcaatacgcgaatccgcgcaagtttcgcggcgtccccaccgcaaccgcctcgaatcattatatcagcgattaaataaaattagctatcagcgcgctcgctatccgcaaccctgtcatcacgggtggcgtccacaactccgttgcgggcgctctcaatcggcaaaaccgattaagaactgatataatatccgaatcgcggcggcgtcgcgacaaacaataacctgagggccggaacaatgaccagagcggaagaattcggcataaagatagacaggatgcgggagagaatgaaagagcggggctggggcgcgctggcgctatcgcggtcggacaactttgcgtgggccgcttgcggagccagttgccacgtgaacatggccgccgaagcgggcgtcgcctcctttgttctgcttccagaccgatgcgcggtcgtgaccaaccgaatcgagtccgcaagaatcagagacgaggaactcgtcgggctggacgtggagcttgtcgagattccatgggccgacgacaggaacgcgaagatagcgcggatgtgcgcgggggcgggcgtggcggcggcggacatgccggcctccggcttcgtcccggcgggcgaggatttctccgacctgatgatggagttgacggaaagcgagatggacaggttcagggcgctcggagcggacgccggggccgcgctcgagtccgccgcgagggctttgcgtccgggcatgaccgagaacgccgccgccgccgcgctcgcctccgagtgctggacgcgggacgcgcagccgatcgtcgtcctcgtagcttccggaggcaggctcccggcatacaggcatcctctgccgacgcggcagccccttgagcgagccgcaatgcttgtcctctgcgccagaaggggcgggcttgtggcttccgccactcggatggtcagcttcggccccgccggggacgacctccgccgcagacacgccgcctgctgccgcgtcgatgcggctttcaacttgctcacccgacccggcgcgaagatttcctccgttttccgcgacgccaccgccgtttactccagcgaaggcttcgaccacgaatggctccttcaccatcagggcggcccgtgcggctacaagtcaagatacttctgcgccagccccgacacccccggcgaggtcaaacccaattgcgctttcgcatggaacccctccattacaggcacgaaatcagaagacaccataatcgcgtttgccgaccgcgccgaattcatcacccgcacaggcgaatggcccgaactcgaagttgatttccaaggcgcccgcctgtcccgccccgacatccttgagctttagcgcccacacctgcttcgctcttgtccctccgggcgcgccccccaaactcgtttctgcctatgcctaaggatcagccaaaattaatgtggaactttggagtgcggcaattcattgccgctttgcctttccgggaatttattcctagcatcccactccttaagccaccccatccgccctccacaacacacaacctcccaccccccgttgccaaatcgttctccttcgttcataatggcaacataaccgccatgaagctgcgacagaccacacatccgcgaccgaacaactatccctacaacagccgtgcttatacaaaatcaagatcagccaaccagatcaactctaattctgtaaacaggctccgcctgactccaccatatgcggttttgctgatgatactgtgctgcttggtgtggacattgattgcttttgtcagcgcatccgcagatgatttcacgggtttgaaagcgtgtccggatgaagagataaagatgggagaggaagttttaaataagtttctggataatccatctgattctttcagagctgacgagtggtgccctgtttggtcttcgcggaaaccatcatatattgatccccggaaagacttcgatgatatggatgaagaagagcaaaaaaagcatcagcggttgatatatgaatacgatagaagaacgttttgctgtgaactaccgctaaaaatatatcaatacaaaaatcatcttacttccgagtttgcgaagggacttgttttagtagacatagcaaattctcgagacccacgtatcgtccccttgcttgaagacataattaaatctgacataagtccagaattgcgaatgaatgctaccaatgaattatgtaggttggatgtcaaatctcaagctgtgatatcaaacgccataaatgacaatgacattagagttagaggcgtagctgccgggtgtcttctaagatggggttatgaggacaaagcattgtttgtgatggaaaggatcgcgagtggagaagaaaaacagagttactttaacgatattactcgtgacagagaaagaatagatttgtccagaggaaaaatgccgaacccccccagcaatgaatctattcacagagaccacagcgattttcagaactcttgtatacgaaaccttggcgaatatggaaaagacgctgcaattatgctcttgtgcaaacttcttgacgaagcagacaaccaagaaatacaggaatacataatcaaagtattgcgcagaacaaacaatcccaaagctgttgactgcctgactcaacacaaatagcaaatgcgagaagaagcgaagaagaagtggtcaggtttgaaattagcaattttaaaaacgggagcatctatggtaaggccgaggcttttgacagtttacaatgtcgctgataggcgaaatagcatccgggcgggtgaaaatggattcccgctttcgcgggaatgacggcacaagagaaaaggaatgacggcaagaaagaatgaattaagaaacaaaagataaagaatgaaggcacaaaaagaggaatgccggcggggggattgattatcgtttgcgtaatgtctgtttgtgttcaataaacattcgatgtttctactgtgaactctgagcgaaaaaggggactggcagcgcgcgcctcagcgatgcctgtgcctgcttttcgccgctccgccgttgtttctactatgaactcaggggtggattctatatcgagtcgatagctgcggatactttagagatgtcatcgtcggcgtttttgatattgcctgaaaaccgcactatgccttttccatccactacgaacgcggcaatccctttttcatcataaccgtaggttgccgctatctcgcctttccagtccatgaggaacgaaggataacgcggctctttcatgcggtttttcaccatcttcttcacgaaagcgggaacgccctttaagttcgccgcgccgactatgcggatatccttgccggcttttttcccgtcttcccgcccgctatgtttcttgtcgagtttcttgatgatttcagccgcgtcgtcgaatccgtttctgccggtgtagattatgacaaccgtcgatccgcgcagcttgtccagttccaccaactgcatgtgctggtcgttcagtttgaaattcttcgcctttgcgcccgttgcgacatatcctgaatccgaagcgagcgcaaccgaaataacggaggaagcggcgataatcaggctcagacaagttatccgcgcaaacatcgttttcatcttgcgggcgtctcctgtttcacgtcttgttcaacgcgtagatgcagtaattgagatatgtcgcgaacccgacccacagcgcgtatggcaggagtagaaccgacgccgcgcgcgatttcttccacagaaccggaatgagcgcaagcagcgtgatttcaatcgccatcgaatctataaccgccgggcctatcatgcgccgggcaaaaaaaatgtagctccatgcgaggttgaacgccgcgttcatcatgaacagtccggccacaagatagaatcgggaatccccagcgaaaactctccaagctataatcgccgataccgccgtcagtatgtatatcgtcgtccacactatgcctatgacggaacccggcggtgtccatgtcggcagttgtatagtccggtaccagtccatgccggacgacgtgaactgccccccggcgaacgacaacaggagaacgactccgatgataacgatttggttcagtttcatttgacgctcactttgcggcggcggcggccgtcgcggcgcttgccacggaacacaggaatgtcccccaaagcatgtccgccaccgtcatttcccaagaccaccccttgagcgtggccatgttcgtaaggtcgtaaatgccataactgattaatccgaataacgcgcccctgacgagagaattctttatgcgcccgctgccggactccgtatccaccgcgaatatgttcaggcctgccgtcagcgcaacgtaaaccaatatcacggcggtccagtcgggggtcagcccggcgtcgtttcttctggccagttctccgagatgttctttataatagtcgctcataatgacgcccagccagacggagtcaagcgccgccagcgtcgccgcggtcgtcccgattcttttcataaacttccatattttcattgcggcctgtctccttatttcatgctcaacgtcataacgctctggaacttgctaacatagcagtactcattaacgctcaccgctatgacggcggtatcgtccgcccttaagaaatccactaaatgaggatgcctttccgcgtatagctcaaagtaaatgctatcattgacgcggtcgatttccctgaccgctccgagaatggttacggctgcggcgtcatgaacgtcgcctttgctgttgctcctgttgtcaaccagaagcgaaacgcgcggctctccgagcagattgtcgaatttcctcgtgtttcggggcgtcgcaaaaacaagatgtttgagatcgtccgtagccgcaaaaccgattatgtttgaatacggactgccgtccctctgtaccgatgaaagaacagcaaagtactggccgagcaatagatgtttaactttttcaaacaggtctttggaatcgttcacaatatctcaaacctcgccgtgatggatttgtttcacaatcaataataaaacagaataacggcaattttgttccggacgccgaaattccggacgttaattctattaattctattagccggttcacccccacacgcgtggggaagacagcggcaatcgcgccctcgaccacgctcaagccggttcacccccacacgcgtggggaagacatattggcggcgacggcatgatctctaggattcggttcacccccacacgcgtggggaagacgatccgctcacggtcaatcaagtgctgatccacggttcacccccacacgcgtggggaagacgcagacatatgggaacaatttatcttcaacggcggttcacccccacacgcgtggggaagacttgtttgttgatttcctttgttagcttccgggcggttcacccccacacgcgtggggaagacctgcggtgctttctgccatttcaatcgccctccggttcacccccacacgcgtggggaagacgcgtcggcggtcgcaactcaaactgctcgccgcggttcacccccacacgcgtggggaagactgccatccccgaccccgtcagccgacccccgcggttcacccccacacgcgtggggaagactttgcaagtttttgagatgttgtttcttccatcggttcacccccacacgcgtggggaagactatcaatagttgggtttgtgtcatgggcttctcggttcacccccacacgcgtggggaagacccaacggcgggcattccatctgtcaaaggctgcggttcacccccacacgcgtggggaagacgctaaagaagaagccgtaagcgtcgccacccgcggttcacccccacacgcgtggggaagactacgtaagcggcctggtggaagacaacgatggcggttcacccccacacgcgtggggaagactgccacagatagcggcgacggattagagtttacggttcacccccacacgcgtggggaagacgtacatcggttcgccgcacgtggggcatttaccggttcacccccacacgcgtggggaagacgttcaggattttaggcaactgcatagcttcgtcggttcacccccacacgcgtggggaagactttctgcgaaaaaacgctcatcatttcacccccggttcacccccacacgcgtggggaagacggctctcaattttatagacaacatgggaaacacggttcacccccacacgcgtggggaagaccggcgcagatacaggattcgggtattcgagtatcggttcacccccacacgcgtggggaagacacaaacataccgaaaggatcaaagcatgaagacggttcacccccacacgcgtggggaagacttatagctgtacatctggttccagttgacaaacggttcacccccacacgcgtggggaagactgtggcctgtttagtggatttcatatcgcccccggttcacccccacacgcgtggggaagacggcgcgcctcggtcgccgtcgttctcagtcggcggttcacccccacacgcgtggggaagacaccagcatattgtatgccggtttttttaaaacacttttagtagtattgtcaaatcaatcatcttgtgaagactccttattattttgattgatcaaagtctcgtcagtcctttcagttttgtaaggagaaagaacaagggcaagtccatcgacatcgatcattggccgggccggtttcccacaggagcggtaaagatatccttgcggagagcgggtgtcgctccatatctgagtgacgccgccgtcgcgtattttcttgacggctttgttccacagaatatctctaatcctcgcgctcggattgccaaggtagagtcccggtcgcggctctatcatccagcgtgacaagtctcccctcaagctcgccggggatttctccaatatcatcaccagcatctaatacctccgcgatatccggcaagacgcgtttcatcagctttgttttatgaaaaacgtcccgacaagccaatcttacattgcgctcgacatcgacatcgctttcagagcaagtttgaaacgcgagcggaactgctatttccatcttgtacaggtcggcgacgtcatagacgaaggaaagcatcttgccggtatgaatgaatccgatggcaggagaatatcccgccgaaagtattgcagcgtggcacaagccgtaaaggcaggcgaaagcggatgagagcgcccggttgagcgggtcggcctgatcccagttctgcggattgtatattctgccgcgccacatcacgccgttctcttccgcgagcttgcggtatgcctccctgactctgtgcccttccattcctcttacggtgtcgagagaaacggagtcgggaagtttttccggaaagcgcatgttgtacatccggcgaatgacggcgatgcgcgaatccatgttgacgtaaagccccgcttgtcgaagcaagcgtcttgaggagtgagagcctcccgtgctgtgcgcgtaaagacggacgccttgttcgcctgtccagcacacaagcgtgttgttgtcggcaagaaaacgcattgccgattgagtgacggtcgtgccggggcctagcaaaagcagtcctagctggttaatcggaatctcgatagacccgtcggtcccgtgaaatagcaaggctccggccttttcgtccagccttccgtgttcgaggaaaagatggctccatctattttcgaatttcggcagttcacgcaagtccctcatggcggtcatatccgggcgaggctgacaaggccgaaaccgaagcctttgccgccgccgatgccgtttgtcactgcctctttgaatagatccgcgtccgttattgtaataacgccgtcgtaccggacggaacgaagcttttgccctttaaggttttcgttccgcgcgctcacatagacataagacggagttaaggacagagagtttttaacgacggaaaaacccgcgcgttcggctcgcgaatgtagccattcttcaagtttatctgaggccaccgggacacgctttccgttgcgtcttttgccgtcttcgccggtcttggtgcagatttttcgagtcgggtttgcaaggagcctgaaccggtattgcatatcaagggaaaagacaggctcgaaggcttttacttgcggttcggcggagagaagaaacccggcgttgtggaacgcatattgccaatcgggcattgatgcggactgaacgatgattgcggctccgtttcccgcaagagggtcgacgcggaacagaaaaccggtatcaggtttgcgagggacatgcacatggccttttgcgaagccgtcaggcttgaatggcaaaagaaaatccgggtcggctaacgatgcggaagacgaagggaacgccatgcacaagcgctgatggactctgtaaagattgcgcaaccatattcttcccggacgcggtcggtcggggttgtcgccggtgttgattaaaaggcaagaaagaaacatgacgattattccacctcctctgcgctcaggcgtctccgtcgggtttcgagagaccggtatcggactacttcttctcgtttcttgataatttcatcgcgccattgagggtgttcggggtttatccggtcaagccccattccgtgtccgtactctatcatggtgactgcgtcgtgacagagtcggcaaagagagcgcaaatcttcttgagattcattgccgccagcgcggcgatatgtcacatgctgaactgttgtcgcgggagatttgcagaaaacgcaaagtccgtggtcggagttcagccgctcggcccgcgcgttcttgtatgcggagtttgaatagtccgcgcgggaacgtggcggatcgggaactctgctttgcgccgcgtcttccgctatcctgacatctccttctgttccaactgagaggtttttcagcatcacaaaccgaggctgatgggatggcggctcgaacagtatggggacatcgtgccacactaacgcgtcatccggcgcttccggctgttcttgcgtgggcgtccagtcaatcaggcagtcgattgactgcggcgcttcatcttccttgttccttctgcgccaaggaacagatgacaacgccgagatcagatcaggatgcgattccggagggcgctcgctcaatggccgcgatggaacgcagttcttccttcccagatagagcgtccatttcggatttattacggcggtttcgatctgatcgatcactgctgaatctccctgcaaagcgactaaaaaagaagcgtcgcaaagatattctcgacgcgtgagcagcgcgcctttctttgtcttgccctcggcttccgcaatgctcatctgcatttctgcgcccacagtgtggtagtcccaccagcggattccggccctgtcaattctgacgcccataagcaaagagcgaagcttcggcaaccagaatgaggatgcttctgctcgcggaacgccaagcgcggcgcaaataatcccggaaacgccggacttcgtgggggcttcgcaggttctgcggacgacaaacttggactcatgtccgccccacgcttgcaatggcccttctagacggagaaacatcgtgttttcgcccatcatgccacctctgaattaagaacaacctcttttactttgctccagtcatatccgatagcggagacgatggcggggatcagttcgtcaagtgatttgacgttgttatctgagagatcgatttctttattctcctctatcgtctgcaacgggaaccgcaggttcggagagaaccagaatcggttttccggtttaccgtagccggcgtccagatcgaggatgtattgtccgagttgagcgacgctctgagaaacgatgtcgcgccctccgctgatagagaccggccttgcgaatgcattggcataactaacgggcgattttttgagttcaatcaaaatgccgtctggaggattatgcgcggcgaagctgttttgttttcctgtgggattgactgtcgccgcggcgcggatgaaagctcctacggtgtgtgcggcgagttctttgttgcctttcaagtttttaactaaagcctcaaaatcaattgagaaatatttgtaaaagcatgcggacgagaacaaagcttcatcaacatacccggcgcccgcgtcggctcccggaatgtcgtctgcggcaacgtaataatcaacttccggacgggcttcgtgcgttgatatggcgtgagcgacttgaagcgcggcctcgactgttgtgtctttaagaacaccggtttcaagcattcttccattcaaggccatgtcgggaacagcggtcaattcagaaataagccccccgaattccgatgcaagctcatcgtcggacttgccggaactgttttccagcaggtctgccattttcgagatcgcttcttttgtggtgtagaccaacatatcgcttttttcttcgtctttaggagcgatgccgcactttttgagtattgcgacagctctctttttggcgtctgccttgccttggattctttctgaaatcagttttgccaactgtcttgtgcggacgccgccgcatagagatttgaactcctcgctcatccttatgcttcgtttgacgcattggctggaaatgcgcgagcggatgactccgccgaaatagcaggttttcggcgcgccaaggtcgtctctgttcaagttggccggactgtggttctgtatcatgtggatttcgattagcatgttattctccttttcggtttagaaattcttccgcccatctcaggcgggttgactcgcgttcccagatggaaagatcgtcggtcagcttaacccaatcgagattgagtttttttgactcgattctgtctaaagcccattgtaaactcggctcaatgtcgctaagggatgcaagaagcaggttgtcgaaagcctgcctaaggcggtttgactcgtcggaagtctgattgcgcggcatagaactcccaagttgagacgcgagagtctttccttgttcgttggaaacggcgggacgaaaagcgtagagtttcgctatcagccacgccacttcgcggcgcggcgcgcgttgactccgttgtcttaacggccaccatattcctgtgaacaaatcaaatgcggggacggactcgtcaagtttttgtcctgagtgagcgcgcaacaggcttaactcgccggatttaaggttcgtcagcgtgtcgataaagcgctgcgtttcactcatctttttttcctcctttcttcacgcgggattttccggcggattttttttcacgcatatcggggatgacgcgggatatttgtctgcgtctttcgagagccgaagaagtaaaccccggggataaagctccggcaaccgcgctcattaatggtcggtactcgcgcgaggcgtcgtcccatgcggcagggtcgccggttagcaattcgtcaagtcgcgacgaaaccacatgctcaacatgaggacgtatcgttgcggccattgatgaattttctttatcagatctcgaaccgatccgctgtttttctatcagccaactttcttttttccataattcgataagcgtggccgccgtatctgtgcttgcaggttttgacggtattcttatcgttcgttcccagacatctatatttttcgctttgtctgtggagaaacctatcacgagaatcatattgtccgtatttgcgccaatgaatctgtttgattgggatattcgagatgccgtttccggccacggtctatccattctgaatctcccagtcgatgtgggatccggagcttttaatgatttgcgaggttctttgtctgtgtacaaaacatgaggatcatcccataattcgtttcgaagttctccggcgctctggaattcacatgttgttatcaaaaagtcccgtttgccacatcctatacagtctgacatttcgtcatcgggattgtgcagaaagacctttcttgataaggtcgtcaatccgtcaagcaaaggcgcgcaagagctagaattattagtaatcgacggcgcgacccatgagggattgcctatactatcaacatgcatccaatttgaaacgagggtttccttaagattaggcccgatggcaaatatatagattggcggagtcccgttaatgcctgcttttaggtcgggcagaccggacacggaaaacagagggagcctcaatagccccattgcgcaacatgccttgcacaatccgttgatattatctgtcgaatggcggaaatgtcgaaaattgttgccggtaggtatttcttggagcaattccgttgttgatttcttcctattcgctgattgattttgaaaaaatctttttccttctcccagcagattgaaacagtctttttccgcttcaagtttttcaaaccattcggcaggaaatgaatctcctttcaattttgtttcaccttctgtcgggttgcctttgcaccaataaagcacggccaatagaaatctcatgatggcgaaacggtccatagggttgctcgcggctatctggcgtatgcttccggctcgcgtgaacgcttccttaatgccgatggcgcttacttgtccgttgttccatagaacgggaatccattcctcatctactaaattaaacatagcgttgcctcctgttatgtgatatagccgccttattatatcagatacatagtccctttttgtcaatcaattagaatgcgacaaccttgtcatgcattctactcgttgcctgtgacattattgcgcgtcaaattgccgtctttgaaaaatatttaatcggacagtaaaaaaggaatgtcggcagggggtgggattgttcttgttggaattgttatgtcctgcgagcgaaagcaggctatgttccacccgcccggcaaacatttacacgctaaaatcggggactggcagcgcgcgccccagcgatgcctgtgcccgcttttcgccgctctgggaatgaaaggcaaattcggcgactgtgtcggaatactaattgaaaatcccgcttctttccttgattatttatgtgcgctacaaataataccatgtgcagatttggagttttcatttaaacccggatccatcattaggattcgggagcgaatgttcaaagcggaagaaatgcggaccgcaaggcgcgttattcaaagtagaggcggggttgccccgcccggaacaacgccatgatagggcgcggaaaccgcgcccctacagaaaaacaaacatgggcggcgctcacaagctcgtttgtgcgtgagaagcagtgtgccgctataaaaatggcccggttctcaggggtctataaataaagccgggttcaagcatgaatacggcagtttcatttaacgcgtttatgccagttcttaattgattttacccactcgtttgtgtgccatgcacaaaatgttttttttgtgcgtgagcgaaaacagcaacaattcatgagtaatttcaaataataagtcgtttatatcggcgaactattttttagcggcggccagccatttattgtagtctttatcccagccgctttttgccgcgtcggtgtatagcttgatgagcgggtcgaagtcttttatggtaacggggaaaaagcgtatttttgttgttttcataaggcttctgtagggtttcagggtttcggacttgtgggcgctttccatcacgctggacagcctgttgactagcagggtaggggcgttcttgtgtttcattatccccggctgaactgtcgcttccgagcaaacaagctcgttcagtttgcttatcatggcggggttgaacagcttgagggaaaagacgttcatctcgtgcacaagggcgaggtcaacctctttttttgcaagcatgtcgagcgaggccatgccgttgctgttcaatttcacttccttgaaaagcccatcgagaattttgtctccgaacatcttgcggagcggatagtagccgtcgtgttccttgtaggtggctagacgcaggtctttcattttgtcgatgcccgtgattttcgtgtccgagcttgagtagaggcacatccgggcggttttcttgtcgaaaagcgacacgccaagtatcggctcatagccgagtttagtggccagaagaaaaaacggatcggtattttttgtgaacgcgaaatcgagaacgcctttcgcggcgtcgtcggtgaaggccttttcgtcgtcgtaccatttgagttgcatatcgaccttctcgatgtcggcgacgtatttgaccaccgcgccgagaacggttttaagctgctggtcccgctcgtccggccccatgtaaacgccgaagttgtatgtttcagccgcaaaggtcgcgaccgttgacgccgctatcatcgccgccgctatcatcgccgccgccacaatctttttcatagcctccgcctccgttccgagggaaaactcccttgccgcatgttatccggtattttgtccctcattactatattaccgaaattcctcagggtttacacgaaaccgcgaaataattaacagcgccgccggaataataaacaaagaaaaagggagatatgaagagattcagaggcgcatatttgccagcaagcgaaatatagcggaattccgcagtttatgttcaatgtcatataaaaaaccgtttgttcggatgaaataattggtataattcaacaatggaaaatctgagcgacatcgcgaggctgttcgcgctgaatctgccagcagcggcggcggcgtgggtggcgtcggggttgctgacggggaatcgacgcgggcctgagcggttgcttgccgcctgcgtcgtttttgtctccacggtcgcttttaccctgctcctgttgtctatggcgggcgcgattaagtacccgaacgcgttcgcggcgcagatcgtgattctggcggttgttgtcgcggcggcgcgcgtcaaggcgaaatcttcgcgggcggtttactcccctgacgttctttcttttggcgaagcgccgcattcggagccggacgcgatggcgggcgcggcgatggccgcagtgaaaatcatatccgccgtccttttcttgatgatgtgctcgtttgcgctgaccatgccgcctgcccccacggacgcttttctggaccatctggtatttccggcggagtggctgcacgcgggaaagatagttttcgttcagacgctaagcccggaacaggcgacgacctactatccggggaacggcgaactgatgtatctgtggctgatgctgcctctgaacgacgacctgctgtgcgggctgatggagtcggcgggactgctgactgcggcgcttgcggcgcacgtaatagggctgcgggcggggatgccgccgaagagcgcggcgacggcggcggcggcgggttccgcagtcccaattgttcttgcgcaaacccttcaattcggaatagacctttattttacggcatttttcttggccgcagtcgcgtttttgatcccgcggtcggacggcgggcgcgcgaaaggcgacatgctgatggcaggtctagcggcggggctggctgtcggctcgaagtatttcggggcggtgatgctggcgctactggttccgctggtggcggcgcgcgcgcgcggcgagtcatggaaaaaagttctgtccagagcggacgcatttttcgccgccgcagcagccgcaggcatattctggtacgcgcgcaacctttcattgacaggcagcccgttctacccgatggggctggacatattcggatggaaaatattcgagggggcattcgagagggcggcgatgttccggtcatacctgcacatacccgcgtcggacatgggggcgttcgggaagatagtggtcgggcgggcgctcggcggcggcgcggctgcggttttattcggcgcggcgctgattgcgggggcgctgaaagcggctcccggcagggcgactgcggcgcgcgcggtggcgttcgcggcggcagcgggggcgattgcggcgcaggcgcgttaccccggttttttgccggcttcggcggcttctgcgcttccgctggtatcgggagtcctgtttttctcgctgatgtccgcagcgttgaaaacccgccgcgcgccgcatgttcgcttggttatcgcgctagtcccggcggtatttctcctgttctggcatgtgaacccttacaacatcgagaataacgcgaggtttctggctccgggtctgatgcttgccgcgatagggatagggattgcgatgtggaaggggaagtgggaaaggggatggtgggtggtcgcgggcgcgttggcgttgggcaacgtaggggccgcgacgcgtttcggcgcgttcgcgcgggacgcgtttttcggcggggccgggttgccggaatgggtctcaaacgcggctccggcgcttgcgctgttcgctatggcggcgctcgcgggggcggcggcgtttttcgccccggcgggacgaaaacccgctcgcgcgattgtccccgcgatgatggccgccgcggctctgtatttcgcgctcccttacaaatccggccacatggaaagattcagatacgattggtacggcgctcattatctggcgtcaggatggcgggcgctgaattccatcgactcggctttgacggtcgcgtattccggcaactgttcgccgtacggactatacggacacaggctcaaaaacagggtgatatacgcgaatgtggacggcaggcagggcgctgtttttcaccactatgaaaaagacctccgctcgttccccggctacaagccgccctcggaatcggtttggctcaatcacatcttcaggggatatcccgatttcgacgcatggcttgctgtattaataaaggaagatgtggacgttctattcctaacgcgcgagtttgcgcgcgggagagtggaaacgccggtggaagcatattgggcggcggacaatccggacttgtttcatccctatttcattcagggcgacacttttatattcgtaatcaacaaagcaaggttcaaaccggattccccggagcctgtcgaacgagaaacagattcgccggaatagaagaagctgcgagcgacggctgaagatggaatttcgctgaaaaacgagtcaaagagatgttcattgtttgtcgcgccgtgcgcgcggaaccggaagcttttctgacgaaaaatgggagcgctttatgaaagaaatgacgaggcgggattttttgaaggggatggccgcagcgggagcgggtgtggcggcggggatggcggcatggccgttcggcggcgcccgcgcgagcgaggaactgaggatatccgcgcggggggcgttcgtgcgtcagcgcggagagggtttcgcccgagtgcgcgccacatcgctcgagccggggttcaggattcaggggggagcggcggggacggacgcgtttagaatcgaactggcgaatgtccgggcaggcaggctgtcgttttcgggaaaaggagtcgagacggcggagatccgggagtcggatggaatcgtagcgctgagggcgaacgcttcgcggccgggaggcgcagttctggaaaccgcatacaacccggcgcccggcgagcgactgaactttatcgctttcagcgacacgcatctgggggcggacggggcgacggagcagttcgcgcgcgtgcgccgtcaggtcaacttgcgcagaccggttttcgtggtaaacgcgggggacaacgtggatgtggacgaaccagcgcaatggaacgtttttgaaactgagacggcgaaactcgaagctccgctgtttgcgacaatcggcaaccacgacagctacctgtcgaccaagctgtacagggagcggatgggcaatctttattacgcggtgaattacggggacacgcaggttctgatgctcgacaacgcgcagaaacacaacgacgcaacgttgaggatggacgggccgaaaccggacgaacaatgggagtggcttgaggagcagcttgcgcggcccgccgagcacaggttcgtttttttccatttcccggtctacggaaaccgaagcatgcttgacccgatgtacataaggaacacaacgttggaggaaagagaaaaggaagtcgagaggatgatagggatgttccagaaggcgggcgtggagtatgtttgttacgggcacaagcacagcgcgcaaagggaagaaatagaaggaattatatatatacaattaggaggggggggcgcgccgccggacaggacaggggagcgggacttgaacttcgttcatttctttgtggacgaaaaaggcgcgagggattacgccgttcacattcattccgaccccggagagatcacaaggatagagttctgcgaattgagggagacgctcccggtcggcgcgaaagagccgataatcgtccacggagtggcaggagacaggcttgtggcggtggagccggaggcgagaatactttccggccccggcacgatagaggatggttgcgtgctatcggcggacgcgcccggagagacgttgttaggatgttcgctcggtgaactatacgtcgaagctatgttaaatatagcataagcaaatatccaaatagataaaagattattttgaaaatctatgtcatttctgacatagatttctattaatttctcattctattgacacctcttttcatcgtgggtattttgaagtggttatgagaagaaactgtgtaagctaaaggtgtatttgtttgattaaaaataaatcctatgagaggggtgagttcacacacatgaagctgaccagaagaacgtttctgaaagtttcgggcgcgacggtagccggactgtcgctcagcggaatcggtttcgggttcaagagttcccgagcctatgccgcagagttgcgcacaaaaggcgcgacggtaacaaccaccatctgcccgtactgttcggtcagttgcagcatcttggtgcacgctgttgacggcaagataatcaacaccgaaggcgacccggatgctccgatcaaccgaggcgcgctatgcagcaaaggcgcgtcgctgtatcacctcgcggtgaacaacgacagagtgactaagccgttgtatcgcgagccgtacggcaaggaatggaaagaagtgtcgtgggactgggcgctcgacgagatcgcaaagcggataaagaagagccgcgacgcgagttttgccgagaagaacgccaaaggagagacggtgaaccgcacggaaggaatcgcgtccgtagggagcgccgcgctggacaacgaggagtgctacatctaccaaaaattcctcagaggtttgggcttggtgtatatagaacaccaagcccgcatatgacactcggctactgtagcggctctgggagagtcgttcggccgaggagcaatgaccaatcactggatcgatttcagcaacagcgatgtcgtgttggtgatgggaagcaacgcagcggaaaaccatccgatttcattcaaatgggttacgaaggcgatggagaaaggcgggaaacttatcagcgtcgacccgcgtttcaccaagacgtcttcaaaggcggatatttacgcccgccttcgctccgggacggacattccgttcttgggcggcatgattaagtatattctggacaacgatctgatcgacaagttctatgtccagaattacacgaacgcttcgttcctaatcaacaaggacttcaagttcgaggacgggctgttctccggatacaacgctgaaaaacgcaattatgacaaggcgacgtgggcgtatcagaaagacgccaacggcgtggtaataaaggatccctcgatgcaggatccgaactgcgtatatcagcttctgaagaagcattattcccgctacgacatcgacaaagtggcggaagtgacgggcacgaccaaggacgagcttttaaaggtctataagacgtacacttccacatccggtcccgcgaagtccggaaccatcctgtacgcgatgggttggacgcagcatacggtgggaacccagaacatcaggactatgtcgataattcagttgttgctgggcaacatgggagtggccggcggcggcgtgaacgcgctgcgcggcgagtcaaacgtgcaaggctcgacggacttcgcccttctattccacatactgcccggctatctgaagttcccactcggcacacaagccacgctggcggacttcctgaaggccaccacgccgacgacggcggagcctcagagccttaactggtggagccacaccccgaagtacatggtcagcctgcttaaggcattctacggcgaatcagcgacgaaggaaaacgatttcggatacggctggctgccgaagggcgatgtgggagccaactactcgtggcttaacctgttcgaccagatgagcaagggcaaattctccggattcttcgcgtgggggatgaacccggcatgcagcagcgcgaacgccggaaaagtccgcaaagctctcggcgaactcgactggctggtgaacgtgaatctgttcccgaacgagacgggacagttctggaaaggcccggggatggacccgagcaagataaagaccgcggtgttcatgcttccctgcgcggcgtcggtggaaaaagaaggcagcatcagcaacagcggacgttgggcgcagtggcgctacaaagccgtcaatcctccgggagaagcgatgccggacgccgagattatcgacggcctcattcaccgcttgaaagagctatacaagacggaaggcggagcattcccggccccgatactcggactagcgtgggattacgaggaaaacggacacctaagctctcgcaagatagcccgcgaggttaacggctattacacgcaggacgtggccggagcggacggcgctgtgttaaaaaaggggacgcaggttacgaacttcgtcggcctcaaggacgacggctcgaccgcctgcggcaactggctgtacagcggaagttatcccgaagccggaaacatgatgatgcgccgggacaacaacgacgcgtcgggcatcgggctttactccaactggtcgtggtgctggccgttgaaccgccgcatcatatacaaccgcgcgtcggtagacctcgacggaaacccgcgccgccccgaactgcccgtcatcaagtgggacggagccaaatgggtcggagacatcgcggacaacgcggctcccccgatgtcggacaaagaaaaaggcaaactgccttttatcatgacatgggaaggagtaggcaagatattcggtcccggactggccgaaggcccgttcccggaacactacgaaccgctcgaatgcccggtcgagaacaacgctttcagcggacagagaatcaacccgaccgtcaagctgttcaacgaaaagggcgagggcgagggcaaggacgtttatttgacctgcgatccgcgctatccgttcgtttgctccacgtacagggttgtcgagcactggcagaccggactcatgacccgctggaacaagcagcttgtcgaactggctccgcagaacttcgtcgagatgagcaaagagctggctgccctcaagggaataaagaacggcgaaatggtcacaatcaagtcggcgcgcggccagatcgacgtcgtcgcgatggtcacatcgagattcaaacctttcacaatcaaaggccagaccgttcatcaggtaggaaccacatggcacttcggctggtgcgcgcctgaaaacggcggagacaccgcgaacctgctcacgcccaccgtgggcgacgctaacaccatgatccctgaatccaaggcgttcatggtgaatatagaaaggaaggggtgatcgggaatggcatacgcaaaactttttgactcttcgaaatgcatcgcctgccgcggttgccagaaagcctgcaagaactggaatcaggacgccgcggaaaagacgaacaaccgaggaacccaccagaacccgcccgacctttctcaccagacccgcaccgtggtcagattcaaggaacaggaaggcggagacctcggaatcatctggacgttcttcaaggactcctgccgccactgcatagagccggcctgcaagatgatcgccgacggcacggatgacaaagccgtcgtcatcaccgacacgggcgccgtcatatacaatgagcggacagctaaggtcgaagggatgaattgcggctacaacatcccgaaacaggaaaaagacggagcgccgtacgttaagtgcacgctctgtttcgaccggatcacgaacggcctgcagccggcgtgcgtcaccacttgcccgaccggagcgctcgaattcggcaagcgcgaggacattgttaaactcgccctccagcgcgtcgaagaggccaagaaacgctacccggacgctcatatttcgagcgattacaaggaagtcaactacattcaggtcttccactacaaggaagagatgttcgaaatgtacgcggacagggagaaacagcagaagatcaaaatggcttcccgccgcgatcttctcaatccgaagaaagcagccggaatgatctcgaagctgctgggctgacattttaagaagcacaagcgaaacgcaaggggcggctttcgggccgccccttttttattatatcaaaagcatccgaggcgaatggcggcaataaatgctgattgtcacaaatgcgtttgcgcgtatatacgaagaattgaatgaaggttcccattaactattttggtaaaaagcataatgcgcaaagaaaaaagtttgcgcatggcgcgcttggtagcgggtggaatcatttaataacatgtatagcctaatgacaaacgttgccaattgcggttttagctgtaggggcaattcatgaattgcccgctgattgggctgtcgcctttttcctttatcgcacatccgggcaacccggcgggtcgccacctacgggcggatgtcgggtatattattggcaacatcagaagaggcgcgcttcacattttgccgaaggggtcgtcccgccagtcggacatgaacgacaacagcttgtccatgtcgggagtctcgcctgtcatcacgtaatagcctgagcagcacacgcccatgaggagggccgtttggggatcggttccgagagcgagggcgagggagaaagccgcgttgaaatggtctccggctccggttgtgattacggggcgttttgtgtgtgggccgtcctgatggtaggttttgccgtcgacgacggtgacggcgaattcgacgggatgcaccacgacggagtagatgtcgagcgcgcgggagatttcctcgcaggcgcgggcggcggcgtccggcccggaagcgtcggcggagacgccgagcgcggacgctatctgcccagcctcgcgtccgttcagcccaagtatgactttatagcaacttgaaaacttcggaactatgctcaacatccttttaatgtcggacaactcccgtttctgggggtcggcaaggtcgatgaagaaaaagcggtcgccggctttggaaagtttcgggcagacttccgcgatgatattttcccagatgtcggacatgaacgggagcatgctccagttgacgagagcgagcaagtgggcctcttgcagcaatctgacaaaacgctcttttccgacatcctccagaatcctgtcccaagtgacgtctgatacgggggccatctttcccaccatgatttttccgtcgaggaactccaccgcgtccgtatggcaaggctctgcgatggatattacgtttgcggcgtctttcagggggcgaaagacaggatggatatccggcctgccgagcgttccgatataagtcgtcgagacaccgagagaggcgatggcgttcgccataatcgggccgttgccgccgatcttcactcgctgcggcacgtactctatgttgccgctcttgcccgcgtagctttttatcctttcggcgtagttggacatcagttcgagccgctcgtattcggagttgttcttgcgggtgtccaccacgtggactatctcgtctatgaatccgtccaagccgacgacgcagcgtctgtttccgggggatttcttttttgtggatatgttcttattgagccgcgaaacaagctctctttcggtttgttgtgacattttatctctccgcgcgcagtgtcgataaaatcggatatagtatataacggcgtagcggcgaagtgaaggaaacgccgtccgaaatagcgggggattagcgcatggaaggaaagatatacatcaaaggcggaacagtttttgacggggtcggcgggccgggcgtcaggagcgacgtctacatagaaggcgatacgataaaggctgtgggcgacgaggcgagcgccatggcccgcgcggatgatcccgcgctttcatccatcgacgccacaggcaagatggtgtgtccgggcttcattgatatgcacgcgcattcggatttcaagatagccgtgaacggctcaatggaggcgaagctgaggcagggggttacgacagcggttgtgggctcgtgcggtttttccggagcgccgatgaacgacaggctgaggagggatttcaggggatacctctccggcatgtttggaacagagtgtcagtttgaatgggattccaccgccgggtatatcgaacatatcaaaaggatcggaatcggagcgaatgtgtttctgcagaccgggttcggcaatttgaggcagatgacgatggggcgttcgccgttaaaagcgaacgcggggcagatagaagcaatgaagtcgttgctggataagtcgcttgacgaaggcgcgagagggttttccgccgggctggcgtatccgatgcagatgttttcgtcgagagaagaagtgaaggctctctgcgggacggcggcgaaacgcggcgcgctgttcagcgttcatgtgagaaacgagatagacaagcttgaggaagcgaaccgggaggcaatcgggatagcgatggaaacaggagtgtctctgcagatatcgcatcacaaggcaatcctgagccgaaactggggcaagccgcgcaaaacgatgaagatgatggaggaggcgcgcgcgcgcggcgtggacgtcgaggcggatgtctatccgttcacggcgttttccaacatactcgccacgacgatgctgctgaacgagccggggatggaggaaaaggtgattttcctcgaactgaaaaaattgaagcagtacgaggggcgcacgctggcggatgttatgaaggacacgggcaagggcgctaaagccgccgcgctccatgtgcttctaaaagaaggtttcagcaacgccccggtcgcgggcgaattcatatccgaagacgacctgcggttcatcatgtcgcatcctcttagcagcataggatcggacggggtggagacggacgagggggcgaaggcgcatccccggctgttctccacgacggtcaggttcctgaagcattatgtcattggagagaagctgatgccgatgggagaggccgtaagaaaaatgacgtctatgcccgcaaggaaaatcggggctgcccgcaggggattgataaaggaaggttatcttgcggacatagtggtgttcgaccctgacgcgcttcgggataattccacgtatgaggaccccgtcagatatccgtgcgggttcgacgcggtgattgtaaacggcgaaattgccgttatgaaggatgagattacaagcgcgcgcgcaggaaccgtgctttgactggcagagtcagaaaaataatagttcttttatatactagataaaatatataaatatgttatattatacggattcgcgcggatgtccgacgggcagacgcgcttgtcaagtccgggtttttcttgcgaaaaatccgggttaggcgcgcaaccgaccggagagagttttgagggtaatcggcggcgatttgaagagatccaagctgttcggcccggaggatggagacgacagcataagagtcacatacgaccgagtcagggagagcatattcaacctgaccgggccgatggacggagcaaggtttctggacctgttcgccggagcggggagtgtgggaatagaggcgttaagccggggagcggagagagtggtgtttgtggatcactcgtcgaaagcgatacgactggtagagcgcaacgtcagtaaattcgggcttgagggcaaggttgaaattataaggatggacgcaagggaatacgtcgccggaggggcggcgaggggaattttcgatctgattttcctcgacccgccgtatgacggggggatgttcgaggcgacgatggaatcgccggggctggcggacatgctggcggacggcggcaggattgtcggacagcacggagcgaaaccggtttgcggggagttcggaagtctttcaatgcgggactccagaaggtacggctcaagctgggtgacggtctggaaaaacattaaggacatcgaaaaatgaacatggcggcgtatccgggaagtttcgacccgatgaccaacggtcacatggatatagtgcagcgatcggcctcggtgttcgacgagcttatcgtcgcgatttccaacaacccgtccaaaaaacatcttttctcgattcaggagaggatggaaatagcgaaggaactgacgaaggacatcgccaatgtgaaggtggagagtttcgacacgttgcttgtggattatgtgaaggcgtgcggagcgaaagcggttgtgcgcgggctgcgcgcggtcacggacttcgagatggagttccagatggcgctggtgaacaaaagactggctccgaacgttgagacggtgtttctggtgacgagcacggagcattctttcataagctcctcgataataaaggaagtggcgtctttcggcggggacgtgagttctcttgtgtcgccgatggtggacgcgaagctgaaggaaagatattcaaagaagtgagagcgggataaggcgactagggaaggcgggccgggattgaagaaagaaaaactggcaaggtttcagaagttgctggacacgctggaatcgcatctggacagcggttttttcctttcatttataggaaaaatcgttgtggacgaaaagaagatatacgcgacgctcaatgaaatgaggtcgatgaggatagagatggaggccgaggcggaagaggactcggcaagggcgacggcggagaaaatgtcttcgcctgagggggccggcaaaggggacgtcggggccggcgcggaaatgtatgccctccagacgcttgacaatctggagcaaacattgcacaaagttatgagcacggtgaaagaaggaagaaagtttttagagagaaaaatggagcgggaggtgaaagaagatggcgcttccgaaatataagaaatcgcgttcgagcacacgaagccagaaggcgcagtggaaaagaggcttgaagacgccgacgctgacggaatgtccgcagtgccacgaagtgaagatgacgcatcgcgcatgcgcgaaatgcggctactacaagggcaagactgttcttgtgaccaaagtcgagggataacggaggcaggacgataaatgtcagacatgatagatcgcctgaagaaagtgatcatggcggagcttggcgtgtcggaggacaggatagtgatggaggcgtcgttcagggacgacctcggagccgactcgcgcaagatattcgacttgataatggccgtcgaggacgagttcggcatagaagtgccggacgaggacgcggtaatgatagtcacggtgggagacgccgccgattatctgaaaaaacggcaggtgtgacccgttgaacctttcccccctcgaagttcgggacagagaaggattcccgaggccgctcgaggacttgctgggaatcatcggcgtggatttcaacgaccagtcgggtttgagggcggcgcttacgcatccgtcgtactggggttcgtgtgtgctgccggaacgcgagcggcttgaacgcagctacgagcggctcgaattccttggcgactccgttctagctctttccatctgcgaacgcctgttcaaatcttttccggaagacgatcagggcgcgatgagcaaggccaaggcgcacattgtcagcaaaggcgttttgctgaaagccgcgcgaagaatcgagcttggagatttcatccgggtcggcaagggcgtcgaggagtctgccggcagagaccacacggcgttcgtggtcgattgtttcgaggcgctgataggggccgtcttcatcgaccaaggattcgagagggcgcgcgatttcgtcatcgagcggatgtctgagttccttgaggaggcgggcggcgaggccgcgcgcgacttcaagacggaacttcaggaatacgctcagaaacgccacaagactctccctcgatatgttatgatatccgagaacggcccggaccaccgcaagatgttcaaagtggaggtcttcatcaacggggcctcgcacggaaccggcgaggggcgaagcaaaaaggaagcggagacggaggcggcgcgcgcggcgatactcggcatgagcgccgacggctcctgagacgataaaaaacaacaaggcccgcaatgtatctgaaatcggtgtcaatgttcggattcaagacgttcgcccgccgaacggtctttgagttccgcgagggcgtcactgcggtggtcggcccgaacggcagcggaaaaagcaatctggtggacgcgataacttgggcgctcggcgaacagagcatgcgctcgatccggggccgcaagctcgaagaagtcgtctatcacggcagcgccagccgcaagcccctcggcttcgccgaagtcgtcctcactttcgacaacgacgacggctattttccgctaccccaaagcgaaatctcgataacccgaaggtactttaaatccggcgagagcgagttcgccatcaacaacgagtcttgcaggctcaaggacattcaggagttgctgatcgacaccggactgtccaccacgaactattcgataatcaatcagggcgacgtcgagtacgtcatcgacttgtccccctcgcagcggcgggagatattcgacgaggctgccgggataaataaatacaaaatcgaaaaaaccaaaacgctgtcgaaaatcaaagacacgaacatcaacatctcccggctgaaagacattctgaccgagatctccgaatcgctggggcctttgaaagagcaggcggaaaaggcgaagcggtacgacgagatagtcgaggagatggaaaggctgaagctgggcgttttcgcgtccgagataaggcgtttgaagagccgcttggaacagctttccgtcgagggagagggccttaaggcaaagagggcggaagggctgaagaaagtcggcgagctgagacagtccagagagaatgtgggtgcgggcatagacgcggcgcgggcggaaatcgactcggctctgcgcgagttggcggacatcggctcgaaactggggcgcgcggaggaatccgcgaggctgctggcccgcgcggtggaagacgcggacagaagggccgccgccgctgacatcgaaaaagccgatatcgtaaagcaggagaaaaatctcgaaaaagacatattagaccttcgcgcgaaggccgagcagaaaaaacgcaggctcgatgaagccgccgccgaacttgaaaacgccacaaaacaatcctccgacgatctgaagctgaacaggaaagacctgacagagaagcgcgacgggcttctgccggaagccgaggatttgaagaagctggaggcgagccttgcgggcgagctggcggtggcgaaagacaggcttgcggggatggccgcgcgagtgaagtctctgacctccgcccgcgattccgcgcgggacaggctgtcggcggcgcgggaacgcggcaagtccgagagcgaaaaagtttcgcaatttgaaaaacaaatccgcgaaaaagaatcgcaggcggaaaagcttcgcgcgggcatcgaggaaacttccgccgcgcgggataaagcgcggtcggcgcttgatgcggtcgtcgcggagcgcaacgctttgtcggcgcgggtcgaagctatcgaacgcgtagcgggcctgatggccgtgagcgaaaaagggaaacaaaccgcccggctcgccgacgagattgagatcaaaaccgggttcgagcctgccgcgcgccgcgctttgaacgagcttttcaacgcttctatttcgacgtccgcggacatagggaaggcgctcgaagaggccgccgacggcggggccgcgaggctgattcttgactggttctcaggagccggggcggcggctgcggcggctctcaaaaagaaaaaatgggcgaaacggctcctgtcggacgcggtttcggtcaaatccgcagcgccgaacgagttgctgaatgtattatcaatgttcgcgattgtcgacaccgacgcggagatgaaagaggcgatttcggaactgccttcgggagccggggttgtgagggcggacggagcggcgtgttttatcaacgggacgctgttcacgggcgaagctctgccgaccagcgaggccgcaagagagcgcgtggccgagctaaagtccgaactcgaaaagaagaacgcggaagtcaaggcggcccgcgccgcgcgcgaagaggctgaaaagaaatacgcgtcgctgaggtcgtcgtccgaagcgtctggaaaagaatttaacaaactgaatatcgaactggccgcggcgcgcgagcgcgcggcggcggctgtggagcgcgtcgaaattctgacgaaagacctagaatcggcggaaaaagcgctggccgaatgcgcgtcaaccggaggcggctcagagtcggatgtcgccaagctcgaatcgaagttcaaggaagtttcagaaaagagaaagagcctcgaagccgagttgaagacggcgcagtcggggctggacgagatagcggacgcgttcaggaaacgggagatgcgcgaggttgatctgcgcgtcgagatgggggaactgaggcgggagatagaggcggcgggcgacgccgagaagtacaggcaggcggagttggagcgggtgcgaaggagaagcggggatatcgacgcggagaagtcgaagctgtcggcggacaggctccggacttccgaagagatgaaagcgggcgaggcgctggcgaaggagcttggggccgcgcgcgccgccgcggaatccgcgctcgcgcagaaacggaccgctctcaaaggcatggaagacgaaagcctgcggctgcgcggcgagatacacgctgttgaaacccgactggaagaactcaaagaagcgatgctggacagcgagatgaagtgcgcgcgcgctgaaacgcaactcgaagagatcagaaggcagttctcggaggagttcgacgatgtctccgaggagcgggcgcttgaggaaaccgcagacggcggcccggccggaaaaggacgctacctcgcgctgaaaaaagagctcgagacgcttcagccggtgaacatgctggctatcggcgaatacgaggagaagtccaacagattcgacctgctcagcgagcagataggggatcttgaagacgcgcgcgcgaccctgatggacatagtgaacgagtatgacgaccgcagccgagcgcagttcatggagacgttcgagcgggtgagggagaagtttcaggagacgttcgtcgagatgttcggcggcggcgaggcggagctgatgcttgtcggcgacggcgaccctctcgaatccggcgtggacgtttcagtgcagattcccggaaaaaggatgagggcgataacccttctgtccggcggcgaaaaagccctttgcgcgctggttctgattttctccatactcaaagtgaaacccagcccgttctacgtgctggacgaggttgacgccgggcttgacgaaagcaatattgtgcggttccgcgaaatgctgaaaaaacattcgaccaacagccagtttctggtcgtcacccacaacaaaggaacgctggtgggagccgatcaattgttcggcataacaatggacaaacaggaaggatactcgaagctccttacggtatccatggaataacaaccatgttcgacagattgaagaagggtctcaagaagaccagcgacagcttacggcataaaatatcagccgccatagggcgggccgtgaagatagacgacgagttctgcgagaggctggaggaagcgctgctgttgtcggacgttggcgcgtccaccgccgcgctgatcgtagatgaaatcaaaagcaaagcggtcgaaaaacgcccgccggacgcggaagcgctaaacgcgctcatcgtggacatactctccgagatactcgaatcgggcgctgcggcggagcctttggcccccgggctgaacgtcgtcatgatgatgggcgtgaacggctccgggaaaacgacgacgataggcaagctggcgatgcgctataaagccgaagggcgcaaggtgatgctggcggcctgcgacacgttccgggcggcggcttccgagcagcttgagatatgggccaagcggtcggacgtgccgataataaggcagagagagggcgcggatccctcggcggtcatgtacgacgcgatacaggccgcgcgcgcgcgcggcgccgacctgcttatagccgacaccgccggacgccttcacactcaatccaacctgatgcgcgaactccagaaaatccaccgcgtggcggtggaaaaagccggggtcgagaacttcagagcgtggctcgtcctcgattccaccatcggaagaaactcatacaatcaggttcagcagttcggacaggccgtcccgatagacgccctcgtgctgacgaagatggacggaacggcgcgcggcggggtcgtattctccatactcaaggaatggcgcatgccgattatgttcgtcggcgtcggggaaaagatggaagacctgctgccgttcaacgcctccgaattttcccgcgcgctgctcggcgacgcggttgacccggtctaaacctgaaaaactgtataaatccgaaaaactgtataatcctgataaaccgacacaagagactgtcgcttttggcgattggggaaaaaccctttgaaaagggttctttccccaacccccttttcccaaacttctcaattttgttttatgataactgatgcgcaataaaaaatataaccatcggatgtttctatcaaagaacagacgtctattattatcaacccaaagagcgacagaggaacctccccccattggttggacagaaaatgggggtttataaggtggggtttggtgtaggttttagtcttttgcctttgactttgcctgttcctgacgcacgcatcatgcgtgcgcgcgcgcgtgtacgtgtgctcacacgcgaggagttttcccaagtccccgcattcgattgttttgctttgccacctcctgtcgccgggcggtttttctctctgtaaaacgcccctccattcctctgtggcgcgttttcttttacgccgccacaatatcactcgccgcgctgtttcgcaagccctgcgggccaatttcgacgctccggtcaaagtacacctgggcgggcgtcgcgtagcccagcgcctggtgagggcgcacttcgttgtaccagcgcaaatatctcgaaatctcacgctccgcttcccatacgtcggcgtaatccttcaggtaaacctcctcgtatttcaccgaccgccacagccgctccacgaagatgttgtccatgtaccgcccgcgcccatccatgctgatggcgacgctcctgtccagcagtggctttgtgaacgcttcgctggtgaactgcgcgccctggtcgctgttgaatatctccggccatccgcgcgaaagcgcctcttccagcgcttccacgcaaaacgccgcgtctatgaaaatgctcagccgccacgagagcacgtaccggctgtaccagtccatgatcgccgccagatacgcaaccctgtgcgcatgcggatgtacgtgatgtccgtggcccacacctggtcgggacgctctattgccagccccgccagcaggtacggatacttgcgggccgcggcgtcgggaatgctggtgcgcggcttcggatacaccgccgcaagccccatcaccctcatcagccgctctatgcgcttgtgattcacctcgtgccccatgtttcgcagcagcttcgtgaccttcggcgaccccagactcggatgctccgtgtacagctcgtcaatcagcttcatcaggctcctgttgtactcgctttccccgcatggctcgtagtagtaactcgaccgcgccagtcccatcagtttgcattgccgccacaccggcagcgcctctctcgaagggtcgatcagccgccgtttctgctcagtcggcaagtccagatttttttttaagccagtccaattcgaccttctgctgcccgatctgccggtaaagctcccccacatgctcctcccggcctttgtcctctctggcccgcttgccgttgaatacacccggcaattcttccagcaccttcttcttccactgcccgatctggttcggatgcacctcgtaaatcttcgccagctcggcaaccgttttctgccccttcagcgcctcaagcgccaccttggccttgaacgctggggtgaatttcttcctcatcgctcatccctccaaaactggattctacaccaccacggtttccaccttaaacctctgtccagtttttggggggaagctcaagacgattgacaacaagaccgcccgatatggtatagtaacaccatgcgagaacagcaaaaataaaggaggcgtaaataggcggctgtaccgggatattctagcaattttagttgtttagcattgtggtggttcccggttttgctctgattcatctcggggtgactgatggaaatattgaaatgcaggaatagctttatcactacagacaccacatcaaggcaaaatgacaggctcatttattgacattttagatgtttgcgaataatgttaggtgaaatccttatttgtgaaggtgaaaaatggaagcatggtggggtgcattaagctcttttgaaaaggtattttgggctgttgctgttgtattctcggtgtttttcttgctccagctcatattcactttcgcagggggcgacgatatcgactccggagatgtagatccgggcagcgacacgcatagcgatttatttcttggtttttttaccatcagaaacatggtggcgtttttcctcggtttctcttggtttggtttggcctgcttggagaaaggcttgtcgaagtcgatcacggtaatcatcgccggtgtttgcggagttgtaaccgtagcgttggtgatgctgcttatgaaagggctttcttccatgaaaagcagcggaactctgtcgctgaaaaacgccgtcggaaaagaaggctctgtaacgatagcagtgcccgaaaacatgaatggcagaggaaaggtcaatattgttcttcagggaagactggtagagcttgatgcggcaacaaagggagataggctaaataaaggagaacagataaaagtaatagagacggtcggggatcaaaccttggtgattgaaaaaatcaaataatgtttcttgcggaggattattaaatgtacatgcttatcggtcttgttgtagtagcaattgtgcttttcgcgactttgctcgccgcgatgactaggtaccggcggtgtccgtcggaccagatcatggtcgtttatggcaaagtggcgaagggtcaaacgtcgaagtgcatacacggtggcgcagcgttcgtctggccgctttttcaggcttgcgaatatcttgacctcacgccgatgacaatcgacatcggtctgaaaaacgcgttgtcgaatcagaatatcagggtggatgtcccatcccgattcacaataggcatttccaccaacccatcggttatgacggtagccgcagaacgccttctcagcatgagcaaggagcaaattgaggaaaatgccaaagacattattttcgggcaacttcgcgctaccatagcaacgatgagtattgaagagatcaatgcgaaacgtgaaaagttcgaagaagaagtaatgaagaatgttgaatctgaacttgagaagctcggtctcaagctaatcaatgtaaacatcaccgacatctccgacgaatcgggatacatagaggcgttagggaaaaaagcggctgccgaggctataaacaaagccaaggtggaagtggcccagcaggaaagagacggcaaaaccggcgaagcgaacgcgcaacagcagatgcgcgttaatattgcaaacgccgaaaaagacggcctgaccggagaggcgaacgcgcaacagcagatgcgcgttaatattgcaaatgccgaaagggacggcaaaaccggcgaagcgaacgcgcaacagcagatgcgcgttaatattgcaaatgctgaaagggacggcaaaaccggcgaagcgaacgcgcaacagcagatgcgcgttaacgttgccactgccaatgccgaagccattaaaggcgagaacactgctaaagtagtcgaggccaactcgaacgctgacagacgagaagcggaagccgaagcagagagaaaggccgtcgccgcggaaaaaaccaaagccgccgaggccgccaccctagcctacatagccgagaaaaaagcggaggaagctagggctgatagagaaaaatccacccgcaaagccgatgtggttgtgccggctgagatagaaaaagaaaaattaatcatagaatcggaagcgataaaggaacaacaaacacttaaaggacagggtgaaggcgcggaaataagagagcggctgagcggagaagcggcaggcatccaagaaatcctaaagaagaaggccgagggcttcgcggagatggtaaaagccgcgaacggcgacgcggaaaaagccgccatgttgctcatagtggagcagttgccggaaatcgtaaaagcgcaggcagaagcgataagcaacattaaattcgacaagatcgtagtgtgggactgcggcggcggcggcaatggcggcggctcgacagcgtccaactggttaggcagtttcacgaaaatgctgcctgcgatgcacgatgtctgcgagatggctggagtcagccttcccgaatttcttggaaagatcaaagatcaggaaaagaaggaaggcgaaagcagcccggaaaaccaaccgaatcgaccgtaaagcatgaccaagactcgctcagaaatgggtgaatgaccattttgggtttttgccaatccatcgcgcatccattatgggcagaacgaaaagaactggtggctaataatggcgactggtcgtgttattacagaagtcatcgacgaagtagaaacgtattttagaatcaaaagagaaaatcgagcagattataattgtgaaggcgcatattagcaatgttgttcttattgttattattaacagcggttattatcgaagtggcatacaatgtaataaagaaaagacatcgcgcgtttaaaaatttagcatttgtaaatgttattgtggcatggttcgttatgatgctcacaagagatgtgtctgatgaagatctatcatttaagctttgcataaatccaattgctttgattgttttaattataaatctttttgtctttattaaatactatttagcgttggcgatcaagacaagaagaaaaaacattgcgtttaagcaaacatatcttgatgaacaagatgtaaacattgccataaaggttgttgcgtctataagctttattttattatgtttagccattgtctacatgatattaacaggaaacaatgggcggtgactttgagaaaaacggacacccgtcgcgaaatgcagcgctgcaagtccccgtttttcgctatgcgttcacaatatggttgggagcggcgctcggcgcaatgggtaaaatcaaatggcgcttcggctattgctcctatttttgtgattattgaacagtattgcgcaaatccggcttagtaatttgatgtgaagtcgatcatgaaatcgttggtgtcggcgaaccagcgggtgttgatgcgcgtgccgtagaggtcgtagtcgacgttgaagttcttggtggagaaatggttgtttttcagattgtaaatgaagtccgtgcggagtctgcattttttgttgacggtgtaatcgaggccggaagacaggctgctgatggttgcttcgcggatgtcataagtcgccgacagggcggaattccacttaagccctttggacttcgacacgtacaacataagctggcgtttgacggtggaggagccggtgtatctgctgtcagtgaaattatagcgggcctgaatcaacattccctgccggggtctgtggccgatgcgggcggaggcggacaggcgggcgctgggcctgccttcggtgtcgccgccaagcccggtggctgtgttccaatcaatgctggtcttttttgacagggcgattgaagggctgacggcggtgagggtggtgtaggccgccgtcacggcgtcggtataatcgaagttgtccatttttatgtgagagcttacggaatagccgacgccccgcgtgttgccattgacgaactttctgttgccgtcgaagctgacgagggcgttcatggatgattggccgtagtcgccgtctccagttctgcggcctgagaggtagccgtttattctggttttcttaatgccgcccgcggctccgagccggaatcctttcgccccggaaaggtcgtagtccatctgaagggtttgcgatctcatgccggcggcgtagcgcgacatggacatggtgtagcccctgtctccgccgaacaggttgcgcatgttgaactggccgcttgtctgggtgttcatgcggaacgactgtcgcaggtccgcggaatatgtgttcgagctgtccccgtggtagttcaaatcgacgaagcctttgaagtcgcgggcttccttgtagcgcacgttggcgccgactttccagtccgcgtttgagccgtagctgacgttccggatgcgccatttgccggtggtgtattttttgctggtgttggtccagaaagggagggacattactttgttgccttttacccacatggtggcgcgccacgcttcgtactggtcgccgggatagatgcgcatgcgggcggcggtcacggcgtttgcggtgagataaggctcttcgtagatgtagaacgcctgtcccatcagaggctcttgggccgtctcgttgagttcttcgccgaccagataaaaagtcctgacgccgctttgggtttgagtgaggatgcccgccgcgcgatccaagtcgaacttaagttggtcgcctgaaaatgaagcgccgtccatgcctgtgatctgagcttcgacgcgctggtcgagcaggtcgccggtttcttcaatgtccgtcaatatagggttggtggacggcgaagccgtgtcgcccggcagcgcggaagcggatttcttcatagtggaagcgacgatgccgccttctgcgtagaagatgtgcgatttcacgtccacccgtatcgagtcggcttgaaagcgaaggttgccgtgaagaagctcgacctgtccgtcgcagtaaatcacttttcggtctatgtcgaacattatgtagtttgcggtgattgtgtagtggaggttgagagcgcgcgcgggcacagcggcggacagagtcgcgagaacggccaatgccgttgccgccgcaataacaatttttcttttcagcaaatcagacactataagacaacctgccgcagttaaacatgcccgaaaacattccgggtacgccaatatagcgcgcggattcctccgcaaccgtattgtatcattattgaaaagcaatgtcagcgagggaaaaaataatatatggataatagatttttagtaatttgcggtgaaaccatttttttgcaaaaaacaggtttccccgcgccccttccgaaaaaaactcttggtcgccgattttgctgaacttcgttctttgcaaaatcggcttttttcttagatcgatgaaaaccagatgtatggcgatgttgatacaaacttaacataacagagattccagttttgagacgatgcgggaggcggcatggccgtcccagagttcggggactcggccctgtttccagtcgccgcgcagggcggcggcggcggcgcgggagattttttcggcgtcggagccgacgaggatgttcgttccgacgtcaacggtgacgggccgctcggtgttttcgcggattgtggcgcacgggacgcccagccaagtggtttcctcctgaatgccgccggaatcggtgaggacgatcttggcgttcatggtaagggagaggaattccagatatccgagaggttccatgatgaagatttttccggcgggaattgaagcgccgtcccacgctgcgaaatggtcgtccagcccgaatctgcggatgttgttgacagttcgtggatgcgccggaaaaaagaccggagctatggaggcggtggcctcaagggcggatatgatgcgggagaatgtcgccgggtcgtccacgttggagggtctgtgaagggtgagggcggcgtaatcgccggagaaatcgccgagagggcggaccgcctcgccgttcttcactcgccgcgcgttttccgccagagtgtctatcataacgttgccgacgaagaaaatgttgtcttccgcgacgccttcccgcaggaggttgtcgcgtccgctcggttcggtgacgaagaggtaagatgaaatcgagtcggtgaggacgcggttgatttcttcgggcattgagcggtcgaagctgcggagaccggcttccacatgggcgaccggtatcatgagttttgcggacacgagcgagcaggcgagggtcgagttgacgtcgccgaccactagaacgaggtcgggttttaattcgagcacggctttttcgaaggctaccatgacggcggcggtctgggccgcgtggctgccggagccgacctctaggaaaacgtcgggccgggggatgttcaactcgtcgaaaaaactctgagacatattgtggtcgtagtgctggccggtgtggacgaggatggggcgcagggaggggctttctgccattgcgcgcataatcggagccactttcacgaagttcggtctcgcccccgcgacgatgaagattttcttttttgtcgactgagtcatgatttcatccatgccggcctccgatttcaacgaggaaggctccgcttctgagcgttttcggcggctgccagtatttcatcggtaaacttcttgaaattaggacattttttccgcacggttttaggcgagagttttttaaacagattgacgccgtcaacggtctttttatagctgtaattttttttatatttcctaaaaagttccttgagaagttttgccggggggttatcgaagtcgactgtctccggatttccgcattcaactggcagtttgatcccgcgagggaatatatcgggatcgctgagcaaccatgcttccagctcatgaacggcgaaatgctggcggaatctaggtctgcattcttccggcaaagattctatgattctttttctcgcaaaatcgattttttcatcgacagtgtttccgcctttgcacttttcgggcaatccataaaggtcgagcaagccgaagatggcgattacttcgctattatcaagatgtaattgagattttttgccggcgcgttttaaataatcgccgcaacccgaaaaaacaataggttcgacgctgatcctgttgtccagcttggaatccagccattttttaagaaaatcaggaagtgttttgttttcggtatcgccttcgacgaaaagaagtattttcatggatcatccgccgatttctctatcgagccataatctgccgagggtgtattcctccagccatttggaaagggaatcgcggtcgagtcttttcgcagtggtcgcgccgtcttttttttccacgaccacgactgattccggcatgtcggagaaggcgcttaaaagttcgggagaatgagtggaaacaataagttgagttctgtttgacgcgtctttgataagctccgcgatgatgccgagcatagaagggtgcattccaagttcaggttcgtcgatacagattatcggcgggggttccggggagagaagaatcgcggaaagcatcaggaaaagaatcgttccgtcagacaggtcggcgggtgaaagctcgcgtttaagcgttttcgagcgccatttcatatagattctgccgttttcgagaggcgggaatgtcagttcttcaaagtcgtcgccgaaagccgcttcgagagtgttgttaaactgttctttgaactctttattgccggtgtaaagagtgtgaaggacggcaatgaggttatcgccgttcgattccaacaccttttccgacctcgcgacagtcgaatgtctagccgctgcttccgggccatgattcagatttcggtaaaatgaacagtcattaaaaaaattgatgaacctatatatttgtaattcagtataatttttccatccacttttgattgaatccatattaaaaaacatggattcgctatctttaaaaatatcgaacacagccgctggaatatcgctattaatttctttcgtgaaatattcttttccatctctgttaataatcgtgcctgtgtaattggataaatcatcatcattggcaatattctcgacatggagtttttctaattcaatgccatattcgcttgaggctctcaattgttcaagttttaaactataaacatatcgtcttttcactaaatcggatgcgttttcttccgggttttcgttgaaaccaaaacgatgagagcgtattgttgcctcaaaaccgatttcctttgcggttccattccaaagaatggggatcatgccgccgtgttttttcataatggcgtcgcggagtttgccggagacggcgtcggaaagaagttcaagggcgctgattatgttgcttttgccgctggagttggggccgatgaggatgtttataggcataaggtctaggttgagttttttcaaggacctgaaaccttcgactttgaaattattgataatcatgaacaaatctcccggagccggctaaaagcctgacaacttatatggaattttacatatttccggcggatagcgccatcggagcgaaaaaagagggcgcggggagaggcggacgggggttttaatttgatttgataatgagatataatatcagacttaaccgcgcgacgggaactgcgcgcgaggtattgatgttgagattgttgccgcgtcgccacgcggatttttaataggcgcgcggtcgcggcggaacataatgatgaaatcaaaagcaaggataattctcggagcgctggcggtttttgtgacggtcgtttccggggcgatgacgcgcgtcgccggggcggctccggctgtttcgtatatgtccgcgtcagaggtcaagcccggaatggaaggatacgggctgacggtgttcgaggggctggagatatcgaaattcccggtgaaagttaaaggagttatgccgggggccggggtcagcggggggccgctgatactgatagagttgaccgggccggagcgcgagaaatacggcggagtgtcaatggggatgagcggttccccgatatatatcggcgacaggcttgtcggcgcgctttcaatgacgtttccgatgacggaccaccatctgggaggagttacggatatcgcgtccatgctgaaggcggcggagtatgacgcgccgagggccgggacggtcgagttcgacgcgcctttcgagcatggcggaaaggtttttacgagaataagttatgaatccggcagggacgagatagaggggacattatttgcgagcgcggcggcggctccggcgatggttcgcggggtgacggcgcgaacgatgccttttgcaaagagaatattcgagggaacgggaatagaagtgacggacgcgggcggcgcatgggctggggcgaaaacgggacgcaccgtaatcggacccggctcggagataaaacccggcagttcggtggccgtgctgcttctgacgggagatatggaagtgtcagcggcgggaacggtgacgcacgtggacggcaagcaagccctgatgttcgggcatccgctgttcaggaagggcgatgtaaggtatctgctggcggacgcgccggtgctcgcggtggcgcgaggcactgacatgtcgttcaaagccgccgcgaccggggcgctgcgaggagagataactcaggaccgcggccccgctcttgtgggacggctggacagttttcctctgctgataccattcgacataaccgtcactgacggagatatcggcaagacggagaagtattcgttcaaggtggcgcgggacgaggatttgttgagcaatctggcggcgatggccgcgctgcaaagtctcgacaacaccatcgacaggctcggcaaaggaacctccagagtgtcgttttccataggatgctcggcctgcgaaaaaccggtcgaaagggaaaacatgttttacgacggggacgacatcgcggcgttgtctctggtggagttcgtgacggcgcttcaattgcttaaggacaacaaatacgcggacgcggaagcgcgcaagttgaacctgaacgtcgagatagattcgaggaactcttacgcgcttatagaaaaagtggagatagacggcggggacgaagagaagccggaagcggaagaaacgaagacgggcgaaaaagagcccgccgccgagccggaagctaaagccgaagaaaaagagccgaacgcggctggagaaaaggcaaacaaagaaaaggcaagtccgcccgtggtgaagcgcggacagaagctggggctgaaagtgggggtgcggccgtttaggagcgagacggtcgaggaaaaaatatggttgaaagtgccagccgacatagcgcccggacgcgcggtgataagcgttttctccggagccagagagcttccgtcggcggctccggaaatgttgctgataaaaatccaagtcgaggggcaggaaagacaagacgaaaaagaccctcatttccttcgcgaaagaaagaaggagaaaagtctggatgaagtgttgaaggagttttcgagtcgtccgatgaacaacgagcttgtggcgaacatcgagtcattagggttctccgggccggacgacgaagacgacgaagagtatgaagacgaagaccggaacaggggcggaagagcgggcaagctgacgggctgggctttggacggcgtggcgtcgataagagtggaggtggaggacgagctgccgaaggtttctccgaaaagaaacatcagaaaatccagaataaatactctcaagggagaaaaatgataaatggaaaagaagaaaaaggccgccgctaggcagaagagggcgcaggccccggatgtggcggttgttatggggagcgattccgaccttaaaagcatgacggcgtgttttgaaacgctggacagtttcggcgtgtcgtacgaggcgcatatcgcgtcggcgcaccgcacgcacgactatgtcaaaagaatagtgacgacgtttgacaacaatggcggaaaagtgatgatagcggcggcgggggcggcggcgcacctgccgggagtggtcgcggcgctcacgaacctgccggtgatcggggtgccgatggagtcgaagatgctggggctggactcgctgttgtcgatagctcagatgcccgccgggatgccggtggcgacggtggccgtgggcggatgcaagaacgcggctctgctggctgttcagatactggctctgggcaagccggagcttgcctcgcgctacagcaggttcagggcgcagcaggctgaggctgtaattaagaaatccgaacgcctgaggactttgggctacaggaactacttttcggagggcggttcgacgagatgatagacaggtacacatacgagccgatgcgctcgatctggtcggaagagaacaagttcaggaagtggctggacgtggagatagccgcgtgcgaggcgtggcacgcgaagggaaaaattcccgcgcgagcgctgtcgacgatcaaaaagaaggcggcgttcacaattcagcgcatagacgagatagagaaagagaccgatcacgacgtgatagcgtttctgacgaacgtggcggagaatgtcgggccggactcgagatttatacacgtggggatgacgtcgtcggacgtgctggacacggcgcaggcgctccgcatgcgcgagtctgcggacgctctcatctcggaggtcaaggaaatccgcgtcattttagagcgccgcgcgatagagcacaaattcaccgtcatggtgggccgcacgcacggcatacacgccgagccgatgactttcggaatgaagatgctgctgtggctggccgagatggggcgcaaccttgaaaggctcgaaagggcgcgcgagacgatatctgtcggcaagatttcaggcgcggtgggcacttactcgaacctgccccccgatgtcgaagaagacacctgccgaaggcttgggcttaaggccgcgcctatcgccacgcaggtgattcagagggacaggcacgccgagttcatgtcgactctggcggtggtcggcggcactatcgagaagattgccaccgaagttcgcgggcttcagcgaacggacattcgagaggcggaggagttcttcgcgaagggccagaaaggctcgtcggcgatgcctcacaagaggaacccgatcacagccgagcgtctggccgggcttgcccgcgtgttgcgcgccaacgcccacgccgccatggaaaacatggctctctggcacgagcgcgacatcacccattcgtctgtggaaagggtgataattccggatagttgcatactgcttcactatatgctggtcaggctgaaacgccttctggacaagctgttggtgtatccggacgcgatgcttgaaaacctcaacaagacgaggggattgatattctcgcagcgggtgatgctggcgctggtgggcaagggagcgacgagggagcaggcgtaccacatcgtgcagcgcaacgcgatgagggtgtgggcggagaaggcggagtttaagtcgctgttgtcggctgacgccgaagtggcggcgctgttgaaacccgccgagttggaggagtgttttgaagtggagtatttcataaggcacgtggacgaaatatacgagagatttttcccgaagaagaaagcgcgggcgcggaaggcgaaggaatagcccgcgcggggtaaagacatggggaaaggcgctttgataagagagacgccggggatgcgggtatatcagtctgacgcgtcccccgaccggttcgcggtcgagttcacgaacgacgcggtggaatgctgggcggaaaggtcgcccatgtttccgggcaaaggcgcgttgaacatgaagatcgccgccgcgctcttcaagaggcttgaagattgcggagtggcgacacatttcgcgcgcgagacgggcgagtccgagatggagaccgtcgcggcgcggataatcccggcccgcgtggcggtgcgcaacatggtttcagatgagttcgccgcccgcacgcgtctcgccgcaggctcgatactccctgtgaccataatcgaattcaacgtgaagatggacgcggtcaaggagtttcagccggggatgcgcgcgcgcgtctacacggaagtgacggacggcgacgtgaagacgatgagaacgagggcggctcaagtcaacaaggctctgcagccgtttctttacaagcgcgggatcgctctggcggattactatctcgaattcgggaaggactcgaacgactttttccgcgtgtgcggggcgctcacgccggatacttgctcgttctggagcagggacacgctggagaagctggacaaggacagatatctgcggccgctgagaggctctgagacggcggccggcagcgtgttgaaggcgctgacagcgtaagactgtcggccggacgatttttgaaataaccgccgaaggcggcgcgagacgcgcccggcggaagcgcagaatttgaggccatagaaaaatgtcgatgcaaagaccgcaaccgcaacagcagaaaccgcagccggtactgccttcgctcgaagagaacatagcgccgaaagaaaggctgaacgcgtacctgaggtatctggccgagcacaacgggtcggacgtccatttcaaagggaacagcccggtgttcttccgtctggacggaaggctccgccctgccgacccgcgctccgtccttcccccgcagattgtggacgtgatggcgaaatccatcatgaacgagaggcagttgcgcgagttcgtggagacgaacgagtgcgacatgtcatacagtctgccgggagtgtcgagattccgcgtaaacgtgttcaagcagagcgggcttaccggggcggtgctgagaacaatccctctaaaaatactgaccatcaaagaactggcgctgccggacactctggaagagctttcagaccgcccgaaggggctgatacttgtaaccggcccgacgggcagcggcaagtccacaactcttgcggcgatgatagaccacataaatcagactcggcgagagcacatcctgactatcgaggaccccattgaatttctgcacagggacaagaactgcagcgtctgccagagggaggtcgggcaggacaccaagtcgttcgaccgcgcgctgcgctcggcgctgcgcgaagacccggacgtgatactcgtcggcgagcttcgcactctggagacgatctcgatggctataacagcggcggaaaccgggcacctcgtgttcgccacactgcacacgacaggcgcggttcagaccataaacagggtcatcgacgtgttcccgccgcaccagcagcagcagataagaatgcagctttcggtgactctgcaaagcgtggtgtctcagacgcttgtgcccgcggcgacggggaaaggccgcgtcgtcgcgcatgaaataatggtcatcaactcggccatatcgagtcttattcgagagaacaaggtcttcatgattcatcaggcgattcaggccggcaaggagcaggggatgcacacgctggaccagcacttggccgaactgatgaaacgacggctcgtcaagttcgaagacgcggtggcgaaatgccagaacgtccctgaattctccaaactagtgggcagaggataacagcagatgcatataagagagcttctggacgtaatgctccagttcgacgcgtccgaccttcacatgaaagtcggcaaccatccgatgttgaggatagacgggaaaatcgcgcttcagacgaatctggcgaaactcacgccccagacgatggacgagctgataaacagcatgctcgacgaggagcacgcgaaggaatacagggagacgtgggagtccgacttcgcgtacgactatccgggcaaggcgaggttccgcgtcaacgtgttccatcagagagggacgaaggccgccgtgctgcgagtcatccctacaaaagttcggtcgatagaggacttgagcctgccgccggtggtgaagaagttctgcgagcgcccgcgcgggcttatcctagtgacaggacccacagggagcggcaagtccaccactctagcggcaatgatagaccacataaacgcgacccgcgaagaacatataataacgatcgaggatccgatagagttcgtccaccagaacaagaagagcctcgtcaatcagcgcgaagtcggacgggacacagggtcgttctcggcggcgttgaagagcgcgctcagacaggacccggacgtggtgcttatcggcgaaatgagagatcttgagaccatttccaccgcgatcaccaccgctgagacggggcaccttgtgctcggcacgctacacacgacgggcgcggcccagacggtcgaccgcatcatcgacgtttttcctcccgaacagcagtcgcagataaggatgcaggtgtcgcagaacatcgaggggataatctcgcagactctggtccgcagggcggcagggcgcgggcgcgtcgcagcattcgagataatggttcccacaggggcgctgcgcaacctcatccgcgacggaaaaacctaccaactccccgcttccattcaaacgggaaagaacatcggcatgctctctctcgaacaagccctttatgagttgatgaagaaaaacatcatcaccaaagaggacgcgatgaacaagtctatggacagggactatctgttggagctgatgacgggcatacagaaacagccgcagagaagaacaacctgaacacggcaggcaagggcggcggaacgcccgcgccgcgccggagcgcgaactcgatggacaacccgcaacgcgtcacagtcgtcatcccgaactggaacggagagaaatatatcggcgaatgtcttggcgcgctcgcgagccagactctgggcgggcagcgagttattgtgatagacaacgcgtcgcgggacggctcccgcgaaataataaaaaacaatcatcccgacgtggaattaatcgaatcgagcgccaatgagggatttgcccgcgcggtgaacaaaggcatccgcgcggcggacaccgagttcgtggcgctgctgaacaacgacgcggttccagacccggactggctcgaaaaagcggtcgcggcgctggattctaatcacggcttcgattcggtcgcgtgcaagatagttttttacgacgaccctaaaacaatcgactcggcgggggatgagtacgcgccgtggggagccgtctccaaccgggggcgcggacagagagacgggggggattacaaccttccggcgcgggtgttcgggccatgcgcggccgcggcgctctacaggaaatcgctgttcgacgagatagggctgttcgacgagaatttcttcgcgtattacgaggacacggatttgaaccttcgggcggctcttgcgggccgcaagtgtttctacgcgcccggcgcgaaagttagacatcgctattcggcaagcacgagcggcaaggcgcggaagctgggcgtcgaggaagtgtatatacatctgaccggcgtggccgtgaaggggttgccgcttggagctgccgcatttttgagggccgccatttttcacggagcgattcttttctttttcgttcttgctcgtctgcgcaaacgcaacaggctgccttcggttccgctcataaaattcatgtccgccatgttggcgcagcggagcgcgacggcgggagcggcgagggtgacagccgtagagttgaggcgtttattccgggcggagctgttgacggcggacacggtagcgcgcggagacggcgatgtttgacattgattttttgttattctaatatgacgctgggagaaaataatgactctggcgataattgttcttttcgcactgctgttggctagcgcgctcttttcggcgtccgagacggctctggtgacgatgagcaggcaccggctcaaggccctcaaagaggagcaccccgcgcgagcgggagcgatcgacaactggttgaccaaaccaaacaacatgctcacttcgattttaataggtcttaacggcgtaaacctgctggccgcgataatgaccgaaaacataaccgaagaactgctggggcacactgattggccttcatgggtcggtcccgccataagtttcggggtggcgtcgtttgtgataatcgctttctgcgaaatacttccgaagatggtcggatataacagttcggaccgcgtggtcataaaaatgatcaagccgatttcgacgtttcacgctattgtgtcgccgataggcaaagtgttcgtgatgatagccaatctgacgctcaggatatttaccgggaagtcaggcccggcggaaggcccgttcatcacccagtcggagattctgggaattgtggacgatgccggagagcagggcatcatagacaaaactgaaagagaaatgatacgcagcgtggtcgaattcggcgaaacgcaggtgagggaagtgatgacgccgaggccggacatgcggatggctccggcggacactacggtggaccgcatggcggttctgatggaagagcacaagcattcccgcattccgatttacgaaggcggggaggacaacgtcatcggcgtggtcaactcaaggactctgttgcgcgctctgaaagacggacgcgactcggacccagtgaaagattacgtccacaaggcttatttcgtgccggaatccaagatggtggatgatctccttcatgattttcagaagaagcggacgcatctggcgatagtcatcgacgaatacggatgcacggcgggactagtgacgattgaagacctccttgaggaaatcgtcggggagatatgggacgagtacgacaccgaagagcctctttacagatgggtggactcggacactttgcgcgtggacgctaggatcgacatcgcggaactgaacgaaattctcgacgcggagttcaacgacgacgaagagttcgaaacgctaggcggattgatttttcatacgatgggcaaagttcccaaacaggaagagacagtcgatatcgaaggttacgagatgaaagtggaacggatggtcgggcggaggatagcgtcggtgattatcaaaagatcgtcttatccggggccgcaatccgagaacggcgagaaatgagactcgccgctccgcgaagtcgcggaatagactaatcaacaaaggtgaacgcgaatggaaatggcggtagggcttgctctgttcggagtgtttctggctttcgcggcgctgatgtatctggggaaactgcccgcgctgatagcgttgccgctgatggccgcgacgctgtacatcgtgggcggagctttctaccacggcctttcattcagctatccgggatcgaacgccgtcgttctggcgcgggaatttttcagagttgtgatagaagagggaatgccgaggctgtggccggtggttattacagtcgtgctcggcgcggcgctcgccgaactgctcaagtcgagcggagcaaccacgacgatcatcagatgggcgtccgaactgggcggcgacaacaagatcgtgtcgtgcgtgctgctgaccggcgtgacggcgctgttattctcgtcattggtgggcctcggagcggtcattatggtggcgtctataatgctgccgatcctcatgagcatcggcgtgactcccgcagtcgcaggctctctgttcctgttcggaatgagcctcggcggagcgttgaacccggtcaactggaagttttacactgagataatgacggcaagctcgacagtgagcgcgatcgacgctcagaatcagttgataggttttattctgcctttcatgatcccgttcgcgctggtggtcctcggttttatcattttgcacggacgtcggggtcacacatccttctgggcggttccgccgggaggaggcgcggcggcggcaggggacgcggggcgggccgggattctggcggttctcacgccgcttattcctctctctctcgttctgggattcaacattgccagccggttgagaggcggcgcaggatacgcgttcccgataaacacggcgctgcttgcgggaatgctgtactgcctgatcgtgtccggccgcggcccgaacggcaggattcagaggttgacgaaagcggtgttcgacgggataacgggcgtcgctcccgtggtggcgctaatcatagggataggcatggtgatacgcgttgtgtgggacccggcggtcggcgcatacatggagcctgtgatgaggcggatagcgccgagcgcgccggttctctacgtgattgttttcaccgcgctcgcgccgttggctttgtaccgggggcctttgaacgtgtggggcatgggaatagggatagcggcgataatgatttccaccggcgcgctgccgccgatggcggtagtcgcggcgttctactcggtggggatgattcagggcgtgagcgacccgaccaacacgcacaatgtctggatcgcgggttttctgggagaggacgttcaggtcttcacccggaaaacgctggcatggacatgggggctggccgtggcgggccttgccatttcggcgtttatgttcctgagatagcgcgcgatattttaggccgcgcgcgggacggaagccggaaagaatataataagaatatgcctgaaaagaagcccacatacgaagagttggagaagcaggtcgcggagttgcgcgcgcggctggaatcgtcccccgataactcttcatatccgcctccgacaagtctgtcggggcgaatcgactcggcagctttcagagaaatcgctgaaaacatccccgttctgatgattgaaatagacatgcagggaaaagtcgcatacgcaaacaccgccgttctggagatgtacggttacacgagggccgatttggggaaacacgtgaccgagttcgtgccggttgcggatgtgaaaatggagattgacacgctcgccagagggatggcggggaaacaggacataatcgtttcaagaatcaagacggcctctggagaaatcaggcatgtgatcaacaattcgttcccgatatatgaaaacggagagcagtccggaatcaccgtgttcgggatagacattactagacaaaaagaggcggtggaggcgctcagggagagcgaggacagatacaaagcgctgttcgagcagtctctggacgctgtgtacgtatcgacgcgggaaggcattgtgctggaagccaatcaggcggcgctttcgctgctcggctatgagagagaagaaatagtaaatagaaatgtgttgaagacatacgtggacgaaagagatcgcgagccgcttcagactgcgcttgagacccgcggctccgtcaggaattacgacgtcaaactcaggcacaagagcggacgcgagatagactgcaaaataactgcgaccgcgcgccgtgggccggacggctcggtcgttggatatcagggcgtcataagagatatgacggaacagataaagatggaaaacgccctgagggagagagaggagtatttcaggctcatagtagaaaccatgtacgacggcataacggtgttagacgaaaagggagccatgacgtatgcgaacaaccgcgcgttggaaatgctcgggcgcgaacgcggcggagtcgttggaaagtcgataacaaatttcctcgacgcgaataatttggccctatttaaaaaacaattctcaaggagaaagctcggcgagggcggaaaatacgagttgacgttcacccggtctgacggctcgcctctgcattcgctcgtgtctgccaaccctcttttcgacgctgtgggagggttttcaggcagtttcgcggtcatcactgacataacggagagaaggaaggcagaggaacaactgctcagccatcaagaaaggcttgaggaaacagtgaaggaacgcacggcggagttcagcgaagttattgaagagttgaggaaggaaatctcgaaccggcggcgcatggaggaagatctgagggattcgagggatcgccttgagaccactctgaaggcgatgccggatatattattcgaagtgaatcttgaagggcgaatagtcggctaccatgcttcgagatcagacaggctctacgcgccgcccgaggcttttatcggaaaaaaaccaacagacgtgctgcctccggaagccgcggaagcgctaaacaaggcggtcaacaaaacattcgagacgggcgagaaatccgccgcgacgtattctctgccatatgcggacggggagatgtatttcgaggcaatacactcgctgaaaggcgatttgaattcgccgaacaggacggtcatatcggtcgtgcgcgatattacacagcgccgacgcgccgaacaatcgctcagggagtccgaactgaggtatagacttactatggactcgatggccgacgcgattcatgtcgtcgacagaaatttcaacatcgttcttttcaacaaaactatgaaggaatggaacgcgcaaagcggtttgccgacggacatcgcgggccggaacgttttcgatgttttttcttttctcgatgactccgtccgggaggaatacaaatcggttttcaccagcggcaacatgatgctttccgaagagatcaacgaaatcgacggggaaacgataataacggagacccgcaagataccgatattcgaaaaagacgccgtcgccagagttgtgacggtgatgagagacgtgacgacgcgaaggcgggcggaagaggcgttgcgctacaacttcgacttccagagcgtcgttatggatatatcggcgagtttcgtgggcgtcggggcggagaatatagattcggccgtgaatgacgcgctcacaaggctcggggaattcctgcaggtcgatcgcagctatctgttccgtcttaccgacgacggattgttcgtcgataacacgcatgaatggtgcgcggagggaatcagctccgagattgagaacagcaaaaatattccgttggaaacgctcaaatggctgatgcccaagttcatcaggggagaaaccatagctatagacgatgtgtccgcgattcctgaaaacgctgaagttgaaaaaagcattttcaacgcgcaaaacatcaagtcgctgattatgttccccctgtattccaacgaaaagctttccggattcatggggcttgattcggtgaagaccagaagaagatggaagagggaccacagcgcgttgctgtcggtggtggcggagatattcgccaacgcgcttatgaggcatcaagcggaaaccgcgctcaaacggagcgaacaaaggttggacgccatcataagcaacacgccgaacgtggcggtcgagggatacgatgtcgagggccgggttatttactggaacaacgcggcggaatcggttttcggatggtccgccgaggagatgatagggagaactctggaaggagcgactctcgactctgcggcaaccgaggcttttcacattctgcttaaggagatgaatgaaagcaaccttccttccggcccgtccgaatggatttgcaacaagaaagacggctccagcgtcgtagtgtattctatgatatttccgatagacgtaggggacggaaacaaagagttcatctgtatggatgtggacataaccgggatgaaagaggcggaagaggcgctcagggagagcgaggagagataccggactctggcggaagccgccgaagacttcattttcatagtcgatcgagacgacatcgtgagatacaccaatagtttcgccgcgcgtcaacttggcatgactccggaacagacgataggggttacaagagcggagttgttcggctcgccggacgccgacaggcagaaaaagagcctcgacagggtttttgaatccggagaatcgttctacatagaaaccgtcacgcagtttcccgaccgggagttctggctgggttcgaggcttgttcccatcaaatcccccgacggtcgggtgtcctccgtgctgggcatatcgcgcgatataaccgacaggaagaggatagagcaggaaaagattaacttcctcagttcaatatctcacgagctgaggacgccgctgtcgctgatactcggatatagcgagatgttgctcaaggaggatctgccgcacgccgccaaaaagaaaatcaaaaccatcaacgaaagaggccggcagcagctcaagctggtcgaagagcttatcacgctggacgcattcgagagcggaacgacgacctacgatatggccgagatcaacatatacaacttcctcgaggcgcggctgaacgaaacgcgccttatgatagagagcatcgtccggcgcaggttccgaacgtcggaatactccttcaagaaggaggtgtccgaatcgctgaaaggcgtcatcgtcaaatgcgacgatggcagaattcggcagacgctggacaacctaatagaaaacgcggtgaagtattcgacgccggagaggctgcagttcgccgtgtcggcgacccgcgaggacggtttcgtggagataagcgtttcggaccgagggatcggaatcgcgtccgctgacctgaagaacattttcaagcctttcttccaagtcaggaaaggctcgcatcctgtttcggacggagtgggaaagggtctaagcattgtcaaggagttcattgaggcgcacggaggacggataaaagtcgaatcggttcccggagaaggctcgacgttctcgttcactattccgattctaaagactgtggagcatgtggaatcgcgcagggtgaacaggattctggttgtggacgatgacggcgacctgttggacttggtgaagacgatgctgctttccgaaggattcgacgttgcggtggcgtcgaatgaaacagagttgttcgaggagatggcggcttttgatccgcaacttgtgatgttggacgtgcagttgccggggctaagcggcgcggaactgtgcggaaagattaagagcggcccggctccggctcccatggtgttcctgttcagcgcgatgccgcgcgcccggatcgaggctctcgctcgcgagatcggagcggacggcgcggtttcgaaacccatcaacatagactcattcattgaaaccctagaaaaactcaatcagtgacgcgccgcgcccggacgtcatcgtttgacacataaatatcgaactcctacactatttggcatgattgcgattgtggactacggaatgggcaatttgaggagtgtgcagaaggcgttcgagcgggtgggggcggacgcgcgcgtgaccacctccgcaaaggacgtccgggacgctgcgggagtggttcttccgggcgtcggcgcgttcgcggcggccatgaaaaacttggaatcgcaggggcttgcggggctaatcgtctctgaaatcaaatccggcaagccgttcttggggatatgcctcggactgcagatgcttttcgactacagcgaagaaggagagcgcatccccggcctcggcgtttttccgggcaaggcgactcgcttcagaggagacctcaaaatcccgcacatgggttggaaccagctcgagttcaggaacagagggccggtcgctgatggaatacccgacggctcgttcttctatttcgtgcactcgtttctcgtcgagccggaggacccggcgctggcgatgaccgtcacggattacggcggcgagttcgtttcgtcgataacgcgcgacaatgtgaccgcagtgcagttccaccctgagaaaagccagaggatggggatgaagctgcttgagaatttcgggaggatggcgaagggatgaatttatatccggcgatagatttgatggacggcaaatgcgtgcggctgacgcagggcaagagggagctttgcacggtgtattcggagaggccggagcaaatggctataaggtgggcgcgggaggggacgaagtggctgcatgtgattgatctcgacgccgcgctcgaccagaaatgtttttccaatttggacgccgcaaaggccatattcgaggcgtcgccgggaatcaggacgcaggtgggcggcggcgtccgttcggctgctgacgtccggcgctggctggacgagggcgcttcccgcgtcatagtcggcacgtccgttctcgaatcgcgggattttgccaaggggcttttctccgagttcggcgccgcggtcgcggtgtccatcgactcgaagggcggcaaagtcgctctccggggctggacggacgaatctgaaatagtaactatagaggcgtgcctcaggatgcgagacgacggcgctaaactaatcatacttacagatatcgtgcgggacgggatgctgacggagccgaatttcgacatgatgtcgcaggcggcggacgctctggaaatcccggtggtgtgcgccggcggggtgtcccgcgtggagcatgtcgagcggctcgccgctcttgaaaaaccgaaccttgacggagcggtgatcgggcgcgcgctgtacaccggcgacttcgatctcaaggccgccgtcgaaagatttccgcagtaggcggcgcggagggcgttttgcttgccaaaaggataataccctgcttggacgttgacagcgggcgcgtcgtcaaaggcgtcaacttcgtgaaccttgtggacgccggagaccctgtcgagcaggcaaaaaaatacgaggaagccgaagccgacgaactggtgtttctggacatcaccgcttcttcggacaagcgccacataatgctcgatgtggtcagacgggtggcggagacggtattcatcccgttcaccgtcgggggcggcattactaacgtcgccaccatccggcaactgctgagcgcgggcgcggacaaggtgtcgctcaacactgcggctgtcctgaatcccagtctgataaacgagtcatccgaaattttcggagcgcagtgcatagtggtcgcgatcgacgcgaagcgagtgggcgacggctgggtggtctacacgcacggaggcagaaaaccgaccgaaatagacgcggtgggctgggcggtcgaggcggaacggcgcggcgcgggcgaaatcctgctcacaagcatgaacagggacggcacgaaaatcggttatgacaacgagttgaatctcgccatctccaccgcggtgagaatccctgtgatagcgtcaggcggagcgggcgagctttctcacctctacgacgcgatacatgacggcaggacagacgcggtattggtcgcttctctgttccactacgggattttcaccataaggcaggcaaaggaatatctgcgggacaggggaatcgcgatgaggctgtgacctcattgcgccaagagagaaggtttcgacatggatttgaaattcgatgaaaaagggcttatcccggctatcgttcaggatgaaaaaagcggggacgtccttatgttggcgtacatgaacgaggagtccgtgcggcggacgatcgagacgggcacgacgtggttctggagccgctcgcgcagcgagttctggaacaagggggcgacctcgggcaattttcaaaaagtgaaaaaggtgatgtacgactgcgactccgacgcgcttctggtcattgtcgagcagagcggcgagggggcctgccacacaggagcatggtcctgctttttcagggagttgaaaggctgatcttcatggcggagacaggccctcccaaatttttcattaaaacattcggttgccagatgaacatggacgactcggcgtcgctcgcgcggatgctgcgctcgatgggcatggcggaggcggcgacgcccgaagatgcctcgctggttcacgtcaacacgtgcagcgtgcggcgcaaagccgaggagaaggctctgagcttcataggcgtgttgcgcaatcgcaaaaagactggcggcgcgcccgtcgtcgtcggcgtgggaggatgctccgccgaactggccgacatccgcgcggaaattcgcgacgtggactacgtcgtcggggcgggcaggccgcaggactacgcggacatcatccgggaggctgtggccgagaactttcccggcttggcggcgggagcggctctgtttgcccccggcccggcgtccgctttccagacggtggtgcgcggctgctcgaatttctgctcgtactgcgtggttccatacgcgcgcggcgcggaatccagcctgactccggctcaagttcgagcggaagccgcgataaaggcggaggaaggcgcgcgggaaatcattcttctaggccagaacgtgctcgcttacgggctggacttatcgccgaaaagatcccttctcgacgccatagccgccgtccacgatctgccgggggtaacaaggataaggtttgtaacgtcgcacccgaaatgggtgacggaggagtttctgcgcgggctgtcggcgctgccgaaagcgtgcggccatttccacgcgccgttccaaagcggcgacgacgagattctcaggaggatgaggcgcggatacgacgcggcgtattatctcgaaacaatagaaatgataagaaactactcgccgggctgcggcatatcggcggacgcgatagtagggtatcccggagagacggaagagcaattcgagcggacgcttgagctggcgtcgcgcgcgcgggtggatcagttgtacgcgttcaaatattcgccgcgtccggggaccgccgccgccgggcaggccgacgacgcgccgctcgacgccaagaagtcgcggcttgcgcggctgttggatttgcaggagaatatatcgagggaaatcaacgaaagccttgtaggcggaatcgcggaaacgatggtcttcgagtctctgggcggagagcggcggcgggggcggacgcgggagaacaggatagtggatttcactgtgcgcgaaggcgttaaggccgagccgggagatgagttgcttgcccgcatcacgggagcgtctccgcacgccctgaagggagaggccgtatgaacgccactcctatgtatcagcagtacgccgccatcaaggagcgccacagggacgccattttgatgtaccggctgggcgatttctacgagatgttcggcgaggacgcgaaaaccgccgccgccgaactggaaatagtgctgaccgcgcgcgagttcggcaagggcgtcaaactgcccatgtgcggcgtgccccatcacgccgccgacggttacgtggcaaaactcatccagcgcggacacaaggtcgccatcgcggaccagacagaggacgcggtcgccggtaaactcgtcaaccgggaagtcgtcagggttgtcacccccggaacgtatctcgatctggacaggctggactcatcgcgaaacaactacatactttcggtggcggacgccggcgacaggttcgggctggggatactcgacgtttcgaccggggagttcaaggcgggcgagatatcgaggtcggcggacgattcgtctctggtcagggagatcgagcggctgtcgcccggcgaatgcgtcgtggcgatgcgcgattccggggcggacgccgccggtagaatatcggcccgttttcccgacgtgaaagtcaccgagcttgacctgatgttcgacgcgccgtaccaccgggacaggctgtgcgcgcatttcggagtgaagacgctgctcggattcggcatagaggagttccccgctgcgataatggccgccgggcagcttctggactatgtcagggacaacctgcgcgccgaccccaagcacgtgatgtccgtttcgctctaccggccccgcgacgggatgtatctggacgcggcgacgcggcgcaacctcgaactgacggaaaccatgcgcgagaaggaaaagaaggggagccttctgtgggcgcttgacaggactctcacgccgatgggaaagaggctgatacgcaactggctcgaacagcctctcaacgacccggcggagataaacctgaggctggacgccgtcggcgagcttctggaaaacaggacggcgcgggagggcgcaagggaaagcctttccgaggtaagggatatcgagaggctttgcagccgggtcgccaccatgctaatcacgcccaaggagacgctggcagtgcgcgactcactagcggcgctgcccgcgctcgcggccctcgcctccgctttcaagtgcgacatgctggagtccctgcgcgccgacatggacacgctggaagacgcgcgagccgaccttgccgccgccgtttctgacgacgctccgaggtccgcccgcgagggcggcatcatccgcgacggcttcgatgcccgcgtggacgaactgcgcgcgctgaaaaaaggcggacggaaatggattgccgacctcgaagaaaaagaacgaagggaaacaggcgtcaaatccctcaaaatcggctacaacaaagtgttcggttattatatcgaagtgacgaaggccaatctggcaaacgtccctgatagatacatacgcaaacagaccacatccaacgcggagcggttctacacagaggaactgaaagaaaaagagttcgcgatactcggagcggaaagcaggctcgaagagcttgaatatcagttgttctgcgggataagggacaatctggcggggcacatcggaaggatgctgaagacgtcgcgggcggtggcggcgctggacgcgttgcagtcgctggcgcaggcggcggaggaaaacaggtactgccgcccgcaggtcagcgcgtcggaaacgataaagatagaagaaggccggcacccgtcgctggacctgacgatgcccgcgcgcacattcatccccaacgacaccctgctcaattgctcgaagagccagatacatatcatcaccgggccgaacatgtcgggaaaatcgacttacatgaggcaggtggcgctgataacgctgatggcgcagatgggcagcttcgtgccgtgccgcgcggcggagataggcgtggtggacaggatattcactagggtcggagctgtcgacgatatcacccttggcctcagcacgttcatggtggagatggtagagacggcgacgattctgactaacgcgacaaagaaaagcctcgtgctgctcgacgaggtcggcagaggcacgagcgccgcagacggcattagcatcgcatgggccgtctccgaatacatacacgagaggattggcgcgagaactctattcgcaacacatttcaaccatctgacgcgcatggccgacctgttcgagaggatagagaacttccacgtttccgcagttgagcggggcagggagattctgttcacgcacaaggtgcgccccggcggcacggataggagtttcggagtcgaggtggcaagactggcgggcatacccgcctcggtcatacgccgcgcgtcggaaattctggtttctcaggaagcggagtcggacatcgaagtccctgaagcccggacggcgcaactcgcgcttattcccgaccagcctccgagccgcatcgaggaaatgctccgcgcggcggaccccgaagagctgactccgcgcaaggcgctcgatctcgtgttcaggatgaaagatattatagaggaaaacgacaggtcgcggtgaaaacgcggcggctgccgggaggcgcgcgatgagcggaatacccgctgttttcatagacagggacggcactctgagcgaggagatcggctatgtgaaccatgtcagccggttcaagctgctcgaaaagtcggcttcggcgataaaaaagctgaacgaagcaggagcgcccgctgttctggtcaccaatcaggcgggcgtcgcgcgcggctatttccctgaaagactcatagcggatgtccacgcgcgcatgaacgagctgctggccgtgggcggcgcaaagctggacgggatttactattgtccccatcatccgaccgccggagagccgccttacaggatggactgcgactgcaggaaacctaagacgggactgattgacagggcggcggcggaaatgggactggacgttgcccgttcgtacatgattggcgacaagctcagcgatgtggcgctggcgaagcgcgcgggctgcgccgcaggcatactcgtcctgacgggatacggcagaggcgactgggagttcaacagggagcgcgaaggcgtcgaacccgacttcattgcagaagacctgtcagaggccgtcgactggctattgaaagacctcgcatcgcgagcttgaccctcgttttttttcgatagaggcaatttccacccacataataaggaaactgtataaagggcgctttgcggcgcggtgtgcgcgcgcgcccggaaaacaggaataagattttatgaaccttgcggacaatctaaaaaatagcgcggagcggtttcccgaccggcccgcggtcgttttttacgacagagtgataaggtacgagcagctttacgcggacgcgctgaggtttgcgggcgcgctcggcgagatgggcatgtcgcgcggggacaggatggcgatagcgattccgaacgttccggaataccctgtggctctttacggggccttcgcggccggggtggaggtcgtcactatcaacccgctgtattccgcccgcgagattgaatatatgctgaaagatagcgcggcgaaactggcgataatgcatccgatgttcgagccgcccgtcagggaggccgccgcgaacgccggaacgaagttgctttacagcgattctatgggcgacccggccaagcgcgacatgaagaaggcgatatcagaggcggtccccgcgccggcgcccgcggacctagatccgaaccacacggctgctatcatctacaccaacgcatggaggggatatcccctcggagcctgcctaactcatctaggactgatgaccaacgcccgttcgagcgtcgcgacggcggcggcgcatgaagacgacgcttttctcaccgtcattcccctgttccacgcgttcgcctgcaccacatgtctgcatctgccttttctcgcgggcgccaagaccgttctgcatgagatgttttcagaggatcgcgtgatggcggaccttaaaaaagagaagataagcgtttttccgaacgtgccgacgataaacaaaaggctgcttgataaattcggctcggcggggagcgacctatcgttcgtgagggcgatagttcccggaggcgctcctctgacagacgatctatacgaagggcttgtggagagactcaacgcaaatgtatatcaggggtacgggataactgaatgcgggccggtgacttcggtgaacccgatgcggggcagggagtttgtgaaagccggctcagtaggcccgccgattgaaggcataactgtgaaagtcgtcgatgagaacggcgaggcgctcccgacgggcgatacgggcgagctttgcgtccggggcggcaacgtcatgcgcgaatatctcgaaaaacccgaagacacggcgatgtttcttaaggacggttggttgttctccggcgacctagcccgcatagacgaagacggatatatatacataaccggccataagaaaaggcttgtgcttgtcggcgggttcaacgtctatccgcaggaggtggaagcgctgctcggcgcgcatccggcggtggaaagctgccgcgtcttcggcgtcccggacgattccctcggagagagagttatggcggaagcgaaacttcgctccggagcctcagctgaaccggctgaactgaggaaatttctccgctctgcgcttgctccctataaagtcccccgccgggttgatatcatagaatagttccagcgcggattggtgataaatgcggtccagcagcgtgaaagcggattgcgcggattctcaatctttagcctttagttctgttttcatttgctctttgaactcgaaaccgctgaaatgaactgtgtttgacagtgttttgggcgcgggtgtatacttttattgatatagatacattatgaggcaaattcgcacgcgttctcggacgggcaaattgtttgactccagtcgaaatggggaataccatagttagccgaagcgcttttttattgcgcgcctgaaacagaataatattcagggagaaaaaatgcgaaacaagcgacgccgggaaaaaggattcaccttggcggaaattcttgttgttttgtgcataatgctgatattgatgggcgccatgacgccttcgtattaccagtatcaggcgtcaacgagagtgagaaacgccataagagcgactcttgttcttaagacggctatcaacgatgccgccaactcgtgcaagggatttcccgtgagatccttgatcggcacggacaacgcttccctgatggaattccttcccatcgtcgatttgactgagtgcggaaggacggacgacatcaacgaaacggcaatgaaggtttttccgacggacgcggattgttcgcacacggccgtcgcccagacggtgatgccgtcgcatccgtactcggcggatttcacgccttccgggctttgcgcttcggtgtgcgacaggtccgacagcgaatgtctgggccaaaaaggattcagttttcaggggacatttattcgggacgacaacgctgcggaacagaggttcgagctttgttcccccgaatattcaggagtttccggacctgattactccggcaactacaaacccggctggaactacgctttgctctccaatctgaatcctcttgataaacccgtcggcgtcgtatgctccgtcgctctcggatacaaaagatccgtactcataatcgtcaacaccagcggatataatacggccacaagtatgcaagttgcggaaggctcgggcatttttgatatcgaaggcgatgatcttgacgagccgtgcccgtgcggtccgtactgcgaggaactgtttgaggctgctggggacgggcagagcgggtgctgttcgccttgcattgccgcggacggaacaaagtatgacggcatagggtacaagttctaatcccccatttttttttcacggacacgactgaagatgcgaggaacgtcttagcgcgacgatttatcccggattcggcgataagaaatacggcttcataaatttcgctgataccatgtaccggggggtctgaaaaaacgtaaggttctgtcataacttcggttccgaatactttcatttgggggttgtggactttcggaagtcggggaatttggttgcgcgggtgaaagtattcgatgggtttggaagaaaatattttttttgtgttgtggcggcgggggccgtccttttttttgtggagcgtcaggccgggcgcgggagccttctggcggcgcgggccggatcggggccgttaggtttcggaaacgaaagtaaaaagggcgggcgcttcgcggcccgatggatgagatcgcggcgcgggttgtcaccggggagcgggctggcggcggtggtcgggccggatcggggctgaaggtttcggggatgaaagcaaagcggggtgtcgccggggagcgggctggcggcgg

SEQ ID NO: 517 - DNA, 116459 bp, Artificial Sequence; identical to SEQ ID NO: 516
  Synthetic Oligonucleotide

SEQ ID NO: 518 - DNA, 110064 bp, Artificial Sequence
  Synthetic Oligonucleotide
ccggagacgcggccctcgcgcagctctcgaccattgaggtgcgccctgtctggggggacgacgacctcgaagccaactgcatcctctgtgaccgggaggcgccgcacacccggcagacgcacacgctgctcctcaaggacaagcagcggcgactaccgaggggccaccacgcaagcaagatcagacaggccgaactcgcctggaagcgagcgaccgggcaggcctggagcatggaacgcattctccgcacagagatgcgtgacaagcagccgccgacgagcgccaaggacctgagtgaggtgctcggcgtcagccacctcaccgtcgtcaactgggcgcggcggctcggcctcccgatacagagccgcaccgactggcgcgaatggggggccagcggcgagcgcgatgctctctaagctcgtgcgcacctacacagacgcgccggtctgcggacgggcagctagtcgccggaggccctattcgccaggccgaggccaactggcgcaaactgacgggcaccaaggaatgcatcgaggccatcctgtggagggaattggtggagcgcaccccgctgagttccgcggtggcattggcgctcaaactgggcgttgctcgggagacggtggtggaatgggccaagaggatcggcgtgccggtagcaaggatgaccgggatgcccgtcgatcagttatgccctggacccactaaggcgaggccaccggagaggtccgcccattcacggcaatagcctcttggcaagccggcaacccatgcggtcttcggcgtcccgaacggcctccctctaggccgactccacgaacggctgaaggtcaagaggcagcgcgtcgggcgaggcgacggggaaggccttcaccgcctcgacgacgcaaggggccaccttcgtcgtcgtcctggcgacaaccgaggcgatgtgccccggaccgaatacgctctccaggggcccgtccacgaccaggatagtgacaagtgccggagcggcctgcgatgccgcggccctggcctcggagagttgccgagacaaccccctatgatccgacgcacgctcgcgttcgccgcctgcacctggcggacttgagcggcggcggtctctgcctcgcgcttgtacgcccggttggcggctggcattgggtcacctcaaccgcagaggcctagttggcgtccagtttgacacgagaacctcgctaggccactatgacccgcaggagcaaaagcgacgcaagaaacggcttcttctggctctctggtggggcgtctcgttcgctgtggcgtcggccagtccccggtcgggcggccagcgacgaccgcggcgctccctaggctcgtgcgcacctgaacggacgcgagggtctgcggacgggcagctagtgtgccgaggccctccgtggcgggacgagaccttccccgcagggccctcccgcccggctccagggggaggccggttgagccagctcggtgaccgcgcggaactacgtgcacgcggcggctgcgaaacaccaaacgcccacggccttctacctcgggatcagcgcgcctgcgccggaggggcagtgagcagcgggcccgcgcgggcgggccaccgacggcctacagaggcctccgaggcctcgggataggtaggaggtgcgggccgaggcccagacgccctcctggggcttgcatgggagacgggagtggcggcgtggcgctgacttgcaccgatggttcacccccacgtgcgtggggagcacggcgactgccactgctccagcatgggcagcaccggttcacccccacgtgcgtggggagcgccagaccaggatcgtcacggggacaatgggcgccggttcacccccacgtgcgtggggagcgcaactggtcgcggacccggcgaaggcccgtgtccggttcacccccacgtgcgtggggagcacgaacaggtcctggcgggtcatggctggggtccggttcacccccacgtgcgtggggagcacacggccgccggccagcgcaaggccgattgcgccggttcacccccacgtgcgtggggagcactcgtcgcccccgcgcggatggaggtcgcccagcggttcacccccacgtgcgtggggagcacggcgcgagaactcccgcgcgagctgggccggccggttcacccccacgtgcgtggggagcacggcttccagccgtgtttgaccgcttccgccaccggttcacccccacgtgcgtggggagcacacggccgccggccagcgcaaggccgattgcgccggttcacccccacgtgcgtggggagcacgtcatccccgccgcggcgccctggctcgatagcggttcacccccacgtgcgtggggagcactgcacgaccgaggagccgaccgaggacctgatcggttcacccccacgtgcgtggggagcactccgacgccacgggggcgaccgaggccagcgccggttcacccccacgtgcgtggggagcacttcgggcggctgagggcgatctcgtgggcccacggttcacccccacgtgcgtggggagcacacattcccatcctggtcaacgaccgcctcacccggttcacccccacgtgcgtggggagcacttcaggttcccgcgatcatcgcggccgcccgccggttcacccccacgtgcgtggggagcaccgcctaagatcatctgctgctgcggggaactgcggttcacccccacgtgcgtggggagcacgccacgcggtagttgcggtagcgatgactgcccggttcacccccacgtgcgtggggagcaccctgccgggagaggccgaggggacagacgatacggttcacccccacgtgcgtggggagcactggccgggagcgtacggggccacacggatcgacggttcacccccacgtgcgtggggagcacatcgtgagcgactggcagatgaacctatcggccggttcacccccacgtgcgtggggagcacgttcaagtggcctcccacaaccgtaggagcgacggttcacccccacgtgcgtggggagcacgttgccatccaacagagaatcaaggagttgcacggttcacccccacgtgcgtggggagcacgctcatccattgcagcacggcaccgataacgtcggttcacccccacgtgcgtggggagcacgaggcatggccatagcgaccggcgacgacggccggttcacccccacgtgcgtggggagcacaatgccccaccagagcgccagaacaggtcccttcggttcacccccacgtgcgtggggagcacattactggcgttgatgggtcggcggtagcgaccggttcacccccacgtgcgtggggagcacggctgcggcggagagttcgtcctctccgtcgccggttcacccccacgtgcgtggggagcactcaaggtgcccttcgtccgccggaacttcttcggttcacccccacgtgcgtggggagcactcgtgccattcgccgcgcccgaaagaaggagtcggttcacccccacgtgcgtggggagcactcggagaggattgccctcgcgaggtagtcagccggttcacccccacgtgcgtggggagcacatcgaggatacctgaaacgggcaggcgcagtccggttcacccccacgtgcgtggggagcacccgatgctcggtctcgacgagcagccgaagtacggttcacccccacgtgcgtggggagcaccgatgctgtcagggctgcgatgaggcagatgacggttcacccccacgtgcgtggggagcacgagttcccctatgtcgcgaccgccgatgcacacggttcacccccacgtgcgtggggagcactctaaaccccgtgtgcaaggccggagggcctccggttcacccccacgtgcgtggggagcactgctttgcggccttgaaatcgtaatcccacaccggttcacccccacgtgcgtggggagcacactcgcatccgggtagtagatacaggtgcggtcggttcacccccacgtgcgtggggagcacccctcccgcgtagaccacatcatgcgggtccccggttcacccccacgtgcgtggggagcacgggaggatcgggtgcagctcgtgcttgatcgtcggttcacccccacgtgcgtggggagcactatttcgctcgtagacgcaaataccgagcctgcggttcacccccacgtgcgtggggagcacatcagcgccttgagcagcttgttgcgcgcctgcggttcacccccacgtgcgtggggagcacgagggaggtcccagtaacggcgggagaggtatgggttcacccccacgtgcgtggggagcacccgtcgcgcttcgccttcctggccctcggcttcggttcacccccacgtgcgtggggagcacggtgatcttccgtgccaggatggactcgctgacggttcacccccacgtgcgtggggagcacatgttcctctcccggacctcgcgggccgtctccggttcacccccacgtgcgtggggagcacaaccctcgggggcctcatacccgattcgtcgtcggttcacccccacgtgcgtggggagcacatgtaggcgactccttacggcgtagtagcactcggttcacccccacgtgcgtggggagcacacctacaaactgtatgatgcggatgggaccgacacgggcctcttcggttcacccccacgtgcgtggggagcacgcgacggccagggacacggcctcccgcgtcttcggttcacccccacgtgcgtggggagcaccaccgagtccccgtctcgcatagacctcaccccggttcacccccacgtgcgtggggagcacgtccgagcatcgacttcctcctgcgcgccttgcggttcacccccacgtgcgtggggagcacgaaactggcgcccagaacgaccaagtgcctgacggttcacccccacgtgcgtggggagcacccgcacgtcgtgccttcggaccaacacgttcccggttcacccccacgtgcgtggggagcacctggtgtatgacgatgtggtcgcgatgggggtcggttcacccccacgtgcgtggggagcacttcctcgtccccgaccaagcgatccaggatgccggttcacccccacgtgcgtggggagcacaccacgattcgccgagaagctagacaaggcggcggttgccgccggacgactccgacgcggttccgctcacgccgtcgccttcacgccctctcttcccgtagtgctcgcgatgcgtcttgctctccttcgggcagcggatcagcgtcagcccctcgaagtccaccggctcacgcgaagtgtcgccgaacgaccggacggcgaacccctgctcgttctgtgcgccgtagaccagcaaggcaccccgcgacttgcccgagttcaccactcgctcccacaggcgatcacgcacccgcgccgacagccggccgacgaacactcccgcccgtggctcgatcagccaccgactcagcaagccgcgcagtgccggtttggcgtcctctacgatcagaaccaccattcacattcccccttgccccaaggcaggcggctcccagagtcccgccggccgggcctcgtcgtcgtcgtactgctgcagctcttcctctgtcgtgctgtcctccagcaactcgcgcagatcggggatgatccggtcgatcagcttcgccgagcggaacgcatcccgcatggcgcgccggacctcccgctccagttcggacggactcgactgcgtgacgcggaaggccacgggcaggctcaggtcggtcttgtacaggtccgccacgtcgtacacgaacgatagctgcttgcccgtgtggatgaagcccagcgcggcgcagtagcctgccgaaaggatagccgcatggcagataccgtagaggcacgagttcgcagcggacaccgcccggttgatcgggtccgctcgcgtccaggtgccgcggtcatacgaccgcgcggcccacgccacgccggtctcctcactcagacgccgatacgtctccctcacgcggaacccctccatgccccgtagctgctggagagtcacgtcggccggcgggatctctgcgaagcgccgggcgtacatgcggcggacgacgcgcatgtgggccgccgggtcgctccactggttcacctggtgcagcagacgccgtgcgctgcgcgtcccgccgaggccgtgggcgtagaagcggaccatctcctcgccgcaccagacgaccaggcagttcatctccgcgagaaggtcgatggccgcatgggtgacgctactgcccggcccgagcatcagacaccggatcgcggccacgggcagctccgtcacccccttctcatcccacaagccgaggctgctctcccaacggtccacccgcgcgtgctcggcgtagacgtagctgaggctgtcatcgaaacgcggcacaagctgcaggctctccatccctcaccctcccctcgcgcctcaccccgccggcgcaactgagagcagaccgaaaccgaaggccttcgccgagccgatgcccgattccagaagcgccttgagcgctgctgtgttccccacgcgaaacgacccctcgaacagcaccgaccaccactgcattcgtcggggaccctgtggctcgtgctcgccttgccaaccgtaagcccaactgggagcgaaggtctcaatgcagatcggcgaagccccagtgtccacaagtttgctcgtcagccagtcggcatgggcctcgagtcccggctcgacgcgcaggcgcttgccgttgtcgtgagctctgcgcgtcgggttggcccgcagtcggaagcgcacaaggtcgccaaggcgcacgcggcagcactgatccgggcgactagggcaagagagggtcagtgtctcgccatcaagaccgaaggagacctccctggattgcggcggcgcggcgagcaggaaccccgcgtcgccgatgaggcgcccgccatcatccttcgcgtctttcgtcaggccgaaggcgtcgtcccagttgggctggctggcggactggacgaggacgaccggccggcgcccgcctcgctccgtgttggccgggtagtctatgcggaacaggaagcccccgttcccgcctcgcgtctggtgcacgtcgccgccgccggagtcagcggacgggaacgccatgcacagacgctggtgcacccggtagaggttccgcagccagcggcggcagatgtcccagtccgctcggtcggggtcttcgcccacgttgatgagcaggtgtgagtggtacacggctcagacctcctctccctccagcagctcccgccggacccgttcgggcgcaccccgcagggcgcgacgccggccctccacgctgcggaaccggatgatctcgtcgcgcttcccgatgatcgcctcgcgccagcgcgggtcctccgggtcgatgcgatccaggcccatgcccaagccatactcgatcatcgtcaccgcgtcgtggcagagtcggcacagcgagcgaaggtcctccggctcctcacctccaccggcccgacggtaggtgacgtgctggacggtcgtcgccggggacttgcagaacacacaaagcccctggtcacacctgaggcgcttcccgcgtgcgcacctgtactgctcgttccggtagttcgcgcgggggcgtggcggaggcggcgtgtgttgctgggtcggatcgccggcctcgacggtcacgcagccacggaccacgagacggggttcgtgcaccggcggatcgaaggagacgggccggtcgtaccagacctcagcgtcgggtggggcggtcggcttagcctcggacggccgccattcgatgacacaggcgaacggcttccctggatgctcgcgcttgctgtaccgcgacggccagggcacagccgcaagcgccgccagcaggtcggagtgctgcccttgtcgggcgaacaccggcacgctcggcgggcaggacttgcgccccaggaagacgggccacttcgggttccgcagggcgtccgccacgcgctccaccagcccggcatcgccctgcaacgccacgagaaaactcgcgtcgcacaggtactcgcggcgagagacgagggtctcgatggggtcgtgcttgccgccgcccgtccgcttgataccattcccgtcggccttcagaatgccgaccttcgccccgaccgtgtggtagtcccaccagcgcgtgccgggccggtcgatgcgcacgcccatgaccaagtcgttgagggtgcgcagtttgcaccgcgccgcctgccggttcagtcccatggcacagcagatcaggccaaggacacccgacttggtgggggcctccatcgtgcggcggatgacgaacttcgagttgtcgccccacgcctgcaacggcccctccaggcgcaggaaggtggtgttgggcgcatcgctcatggtcaggcctcctctgttggggccttggcggcgtccttgacctccgaccactcgaacccgaccgcctgcaacacggcttcgaccaagccctccggcctcccggcctccccgccgagcacgtcaaagcaccggtccgtcaccagcatggcagttgtcttcttcccaccctcctcccgctcccagtactggagagggaaccgccacagcttcgggctgtaccagagcagcgtcgagtcgaggccgtaggttctgccaatcgcgtgcacgtggtccgccagacacgcaacactgcggccctcgatgctcttctcatccggcgcgtcgtcgtccggcttcccgatccgttcgaccggctcggcgaacgcgttggcgtagctggtgggcgtcctcgtcttcctgatctcgacgaggatgccgcaagcgtcgcagtgggaggcgaagctgttctgtttgccgctaggggtcgtcagcgccgcggcgcgcaggaagtgaccgagggcgcaggcggcgagcttctcagcgttcggcttggcttctctcgtccacgccgcatgggccttggggtcctccttggggtccggctgcggcccggcgaggttggagacgagctgctcccagtccaggcagaagtacttgtagaagcaggcggagttgtactgcgtctcgcccaggtgccctgcctgcggccctctccccaggtcgtctacagcggtgaagtagtccacctcgttcacgactgcatgggtggagatcgcgtgcgcaacctgcatggcggcctcgacgtcctcgaaggcgtcggaggtcgtcatgcgcccgaatagcgcaatgtccactgcgtcagagagaccgggtatcttgagggccgcgtagaagtcctccatcttcttgggtctgtctggggcactgtccttgagctgtcccctctcgcccttgctgggagccttggccagggccttgaggcggtccgggtcagagagacggagttccgcgagacgctgagcgactagggcggcgtgggcgtcccccggctgatcgtcctccatgggaggttcgggctcagcctcctctccttcacgggccttgagcaggtcggccatccggcacttcgcgacgacccaactcgccttcacgatcctgttctgctccttctcgtcgagcaccgacacgtcagggtgctggcgcaccatctccttgaagccgacttcagggtgtaggaagtactcatactgctccttgcgctgctcgcggagttcagccagcttggcaacgaagaacctggcgtgtcctgggccgaggtggatcagctgtggggttcgcggcctgccgtccgtgtcgcgcgcaccccgcttcgccttctcctccttctcgctgctctgcgcgatccgctgcgcggcaagcacgatgcgccgatgctcctccggggggaccggcgagtcgagcaacgcctgcccgaccaaccacgggaagaacttggtcctcgtgccgatgtgcccggccatccccgtcgcgaacaacccagcctgtcggttgtggatgtcgtcgggattgccggggctgcggatgctgcgcttcaggcactggctggagatgcgggcgcgggtgacgccgccgaaaaggcaagtcttcggagcgcccaggtcatcacggttcaggttcgacggactgtggttctggatcatgtgcatctcgatcagcatggtcagctcctcccttcgggtggctcggcagcgttcaagtagtcctcggcccagatatcgcggatgtcgcgcttgcggcggtgctcgccgccgcggtcccagatggagagatcgtcgagcaactgcgcccagtcaaggccggtgcatgtcctcctctcgacggcatccgccacgacggacagcgcccagtgcaagtgcggctccagggcaggcaagggcgagcacaggagcgcgtcgaaccgcgctcggaagcggcgctgagcattctcctcgcgtggcttacgttcacacgtgcccaggacctgcgccagggcccgtgccgccccgtctcgccgaacatggggcactgggaacgccccgtagagcctagctaccagccagcttgtctcgcgtcggggcgcttgcgggttcctctcgcgcagcggccaccacagaccagtgaacaggtcgaagcccggaagcgtctcgtcgaggggctgccccgcgagccgccgcagccgcgagcgctcgccttccttcaggtcttccagcttgccgatgaactcctcagtcgactcatgctcggcctcccttgcttcgtcggcgtcggggctttcgggcgctggggacagcgtcttcagcgcgtcgcccagcgccgcgcgggcgcggcggagcgcctcctgacggcgaaggggcgagccgggggtggccgcctcgactgccgctctgacaacaggcagcaactggcctaccagtcggtggccgataccggcctcctccttcgtcgtcgcgctcctcagccagtgatcgaactgctcgcgcaggagtgcttcgagcgatgcagactgggcgtccagggccgccatgcggttcgggtgttggcgcttggggttgggcgtgctctggcggagaacgtctcgcagctggcccatcgcaccggccagccgctggagagtctccgccgcgtcctgcgcgacaccggggggaaccgggggcgccgagagggcagcggcgtcctggtagagggccttgttcgctgccggcccggcgcaggtcacggcggccatctgcgccggtgcgcacgcagcagccttgcgttgcagcacacccaggtagggcctccgccatgaccgtgcgaggacggacgctggttgtgcggggccggggaagctaacggggtcggcgcccggcggcttgctcctggtggccggccggtgaacgctcaggaggtgggggtcagcgggccacggccccttcccgaacggccgcttccagccagggagcagggcgatccggcggacaagccgatctttgtcgccgcaagctgagcagatgcccgccgtctgatcgtcccgcggcctctcaagccaagcgcgacgtggctgccacgtgaatgcccgctgcggcccgatggtgtccttgtccgttggttcctcggggtcttcccaccaaggggcgtcacttgcggctacgacggatggcagcggccagttcgccgccaagtcggcaaggagcgagccgcccgaggcgatggcatacacgggccttgctccattgaggccagagggcttctgctggtgcgtcccgtgagcacttgcgggagcgaaggcggagagccgcaccaagcccactgcgcagcaggccgggcacagcgcgtctcgggcatcgcgagtgtgacgaaagtgggccactgtcgttccgctgggtagttcctgcaagagatcggtagcggggcggaacccgccgccctcatcatctgcgctcttgcccttcttggccttctccttctgctcgacctcggcccatgccgtctggtcctggaagaacccggtgtcctcgccaagcaagtcgaacccggtcctgactccatccaacctggcgagccagtcccctggtatcccctcggcgtcctcgggttcgcgccgctcctcctcgctccgttccggcttgcaccactggagcaccgcgagcaagaagcgcaagatggccacgttgtccatggggttcgacgcggcgatctggcggatactccccgcctccgtcagcgccgccctgatccccacgcgacatggctgcccgttggtccttagaacgggaacccactcctccacgagcaagttgtaggtcccggatacctggttcatggcttgctcacctcggcatgttcgggttacgccagccacctgtggccgcactgcgctggtgggggaactgcttatgtcgcgtgaccgcgaggtgccggcatggaacttggtggggatcgcgcctctgccaaggcgagaggcgtggcgggatctcgcccttgggagccgggcaacgccttgcccaggtcatgcagcccagcgagacacgccagccatgccctggcgcagtcctcatcgctgccgaaggcctgcgcgaagtgcgctctcagccctgcagcgagagccgcgtcccacaactccagggccacgtgcgcagcatccaacaggtgacacgccagcggatggacggtgccgttcttctcggaccgcttcgcccacaggcagaggaccgccgccgacagcatacttatcccctcccctcccctgcccctcgcgggtgcagaggcctccagccagccgctcgggcggtactgcacagacacgactccgcactatcgccgcacttccgacgcaccgaggaaggcagttcgcacgtgcggcggtcggttcctccattgcgggcatgtcctgcaggagggcggcgaccacggctggaaagctagggtgtgggtaccgtgggtcggttgccgggagaggttgggatggcgcgacccaagaccatcaccgaggccgccgacctcacccgccaacgtgcgaacgcagacccggtgcggcacgtgcgcgccgccggccgtagctggctgaccgtcgactcacccggcacgcgcggccgacgcgaagacgcgcagtgcgtcgggctgatcgaggtggcgcgaagcccacacccagccttggccgcccggccgctcgaccacccgatggtacaggcgatggccctacacctagtgtcgggggacacttcggcatgagacgcactcagggtgagcggagcaaggcacaagcgctgcagcacgatccgtgggagcaggtctgggcctcactctcgtcggcgggagaggagacggtggacctacccttccggagggccaagccgggcacgtccctctaccacctcagccttgagggcatcctgaacatggtcacccagccaggcgagcgcaaggagaagcggggccgggagaccttgagagtgcgtcgccttcaccgagggggtgacgccgtgaacctgtgtatccccgagcacacgacgccggagaccgcggaggaggccgcgcaagcggtccgggtgctacagaagatcgcggcgcagtacgcggacgccaagaggaagggaagcaggaagagaaaaggcctctggctgacgcccgaggaggtggaggtgtggaatggcctccttcgccaacaacccgtcctccagttcaactgctacaaccccgaaacccatgagcgcgaggcgtatcctggacgcgagaaccaagtggccggaggcggatggccccgcagcgactctctgttccactcgacgctctacctggcggcccagttcctcgcggaggtggtctacgaacactgcaacgagcgtgtggcaaggtgcttggctcccctccacccggccgataccaagagtaggaagatctgcggacgcctgtttgtgacgacgactcaaggcgggctgggccaaacgtgcagcgacacgtgccgccagagggtcaaagaccgcaagcgcgcagtaagggacgaggccacgagaaccgcgcggaaggaggggtttgaggagctgcgccagctcaggcgcgcggagagccagaaggcaaaggggtgagcgccactcactcacggctttgggcgcggaacccgtgagtacccgattggcccgcggatgttgtgccccgcgtggagtagtgctatcctcgctgtgaaggaacgcgcggggaggccctcggcaacaggctatcgccggcctcgcctccgaaggcctccccgcgcagccgaaacggcgatggcaagcaccccgacgtcgagacaggtcccctcagaggtccgactcccctgggtcgagggctgcgaggagtttctccggctcagccctcgcctcgcgccgagcacgaaggtaagctacgcctccgacctccgcctgttcgggaccttcctcgccgacgaatgcggggtcaccgaacccggcgccgtgacctccgttcatgtgagggcgttcatcgcgtcgcggtccgagtgggcggccaccaccacacgccggcgactcgacgccatttcctcgctcttcaactacttgctagagcttcccgaccccacggtcgtaaggaaccccgtgacgaagggcatccgcccgaggaagcctcggacggtgggcaaggctgtcccggaggcggaggaggtggtagctcttcgtcgcgcaacgcgcggaccgttggaggccgccgttttcgcggtgttagcgggcatggggctacggaggggcgaggccgtgaacctgtccgccaagcccttcgtacaacgcagccccgaggttgtggtgaccggcaagggcggccacagccgaggggtgcctgtgagcgagtctgtccgcgatgcggttgacgcttacctccccgaacgccccgcggtggactcgccgaggctgttcgtcacccgccggggcgtgccgatgaccgcaaaggtgatcgaccggatgttccggcgatggtgcagacgggctggcctcggcgaccggggttacacgttgcactcgctgaggcacagtttcgggacccgcctcagcaccgagggcgtagacctcccaaccatccaggcgctgatggggcacgggtccatcgctaccaccggcatctacctacacagcaacgcggagcgcaaacggcgggcggtcaacctcctctccgggaacggccagcgggtgccgggcgacggcacggcggaggtcgtgcattgtgacctgcaagtagacgccagtcgtgttcaagctgctatggccgagaatgcgctggaccgaggccaagtcacacccgccctgcaagagcaaggtcgcggcagtgtggcgcaggctgtgtaggacgacgccgggccggtcgatcccggcgcggcgcaacgccttccgcagtaggcccatgagtgcccggcgtccgagcgggcgtcgatcactcgacagaaagaggaagtcatggtcgcagcccggacgcaggtcaagccagtcgcgcaacgccgacaggggccgctcgcccaaggggacgaggcgggtcttgtcccccttaccgtgctcgatgcggagcgtgccctcgcccaagtccacgtcgggcaggcggagcgcaaggagttcggcgcgacgaagacccgtgaacaagagcacgctcagcgcggcccggtcgcggaaggccctgtagatggacggctgccgctcagccgcctgcagaagggcctgggcctccggggcggagagggcgactggcagcgacctcgcgcgcttcgggatcgacaccctgacgaacggatcgcggtcggtgtacccgttgtctccgaggaaccgccagaaggaccgaagggacgcgaggcgccgacagatgctggtcacgctgagacctcgccgccggagccacgcaacatactgccggatggtctgccggtcgatggcctcccccacgggttcgcggtccgtctcggtgaggcacagaaggaactgccggaagtcggaggcgtaggcggtgacagtctgggggctgcggttggcctccaagtccaggtacgccaggaactcctcgtgggcaggtgcaagctccatgttgcggcactcccttcgggatgtgccgctccctgcccggacgggcaagttacagagccgtcggtcgtgccggtggactgcgaaaagggggcctgtaattctgcaactaggcccggttactgcccagggggtgttggggaccccgaaaacgggcttgtaaccagtggagagtgggcctataagccgaattctgtgtcccgcagcagcgggatggcggccatttgtctgagccccgcgcgtgcgggacccggccccgccgaagcggggtcctgcgctctacccggtggcgcggcgggccaccgcgatgccaccctatttgagcttgctccgggcggggtttacccagccggcccgtcaccgagccgctggtgcgctcttaccgcaccatttcacccttaccgggctccgcaatggccggcgcgtcgggatgttgcggcctaacgccgcctgcgtccgcgcctaagctcatgtcagcggcccggcggtgtgtttctgtggcactttccgtagggtcacccctcctggccgttagccagcgccctgccctgtggagttcggactttcctctcccgtcctccgcttgcgcggggttcgagagcggccgcccggcccactctccaaggtgagtatacccactgataggcgggtgagtcaaagggcattccggggcggcgtgctgcgcgagtcccggagtgactcgcctacgcgacggtcccgcgcgccgcccactcgcatccccggagcagcccttgctggaaaccctcgctctcaaaggcgcgcatgtccgggttgccgggccagacgtggccgaggaccatgtggaagatgcgcccctcgccgtaccgggtggtcaccatgaccggctcgtcgttccccgtgccgccggtcgcgggatcggagtacgcggtcgccagcacgtggtagggcactccgtgcatgtggaccagccggtgatagagctcatcccactggcggaagtcagcgaggccctgggtgatcgggtgctcgcggtcgcggatggtcaccgggaactcgtggaagctgccgtggccagcgccttcgcgccacatcaggcccaccatcttctcgtactccacccagcccgggaaggcgttgtcggcagcgtgcatgaccaccaggtcggtgccggtgcggacggcggcttcgaagttggccttggcgggctcggtccactccgggccgttgtagtcgccgaaaagaaactcgtactcgctaagggccttggcatccgccagagccgaggaggggtcctcggtgagggtgacggcaaaccgaccgctcgccgcgaggaggtcgcggcagaagggcgcggacatcgtccagtcgtgattgttggcgccggtgagaaggagcgttctgatcgtcggcatggcgtgcctcgtctgggtgaggttcagcaactcgacccggcgttcgacggggagggcgaagggacctccggcgaggtgtttcacgtgaaacagagaaggggacgatgcgcgcctgccgcagacgacgcggcaggcgggacagtgcccaacgaccgctgactaccttgtgtggagtcaggtgacagatgagcgggttctctgtcggatggctggtgatgctgctcatgcagactggagctcacgcgatggaggacaccgacatccctctcgacgcaccgaacgatgcggtcatggcgagtgtggtggaggtgcaagaggcccacgcctgggcgctggccgcgttcaccggttcggagcctgcgggcgcgccggtccacattccgctccaggtgcgcaggcaagaccacaatgtgctgcggttccgggaatcgtgcatggagaccccgatcaagatcgggcagcaggggttcccgcgcgggctcggtacccatgcgaacagcgagatcgcggtgaccctcccgccgggcgccaaggccttcaaggcctgggtcggcatcgacaccaactacgacacccagggcgtgcgcgggagtgtggagttctgcgtcgaggtggatggcaaggaggtcctccggacgcctacgctccgaggcggtcaggagccggtgccggtgagcgtggaggttcccaacggttcccgagagctggtcctcaaggtcggtacgacggccgacggcccggcctacgaccagtcggactgggccgacgcgcaactcgtgatgcaggacgacagcgtccgctacctggacgagaaccagcccgatcccctgctctcaccggcgagccctccgttctcgttcacctatgggggcaagccgtctgccgagctactcgttacgtggaagcgaacggttacctcccgggacctgcccgaccgggtcgagtacgacatcgcatgggcggacgagaacaccgggctgcacgtgacagccaccgtcggctgcttcaagcgttacccggccgtcgactgggtgctgcactttgagaaccgcggtgccggcgatacgcccatgctcgcggatgttcaggccctcgatgtccaggtccgcacaggcaactcaaagcgcgcggcagtgctccatgggctgacgggcgatgtgtgcggcgagcaatcgtttgtcccgttcgacacccccctcgacgtcgccaagagcatccatttggcgccaggtggcgggcggccgtcgaacggcgccttcccgttctgcaacctgcagtaccacgacggagggctcatcgtgggcattggctggtccgggcagtgggcggagtcgctcgaccgctcgggcgcgggcccgacgcgcctgcgcgccggcatggagctgacgcatctcctgctgcacccgggcgagcgcatccgcagcccccgcattctgctcatgccctggaagggtgaccgacaggtggcccacaaccgcctgcgtcggctgcttctcttcagctatgtgccgaagctgaacgggcgcccggcgcggctgccggtggtctcccagtgcttcgaccggtacagctggacgcgatcggagtgggcgaccgaggccgggcagatcgccgccgcgcggttcgcgaaggaggccggcttcgatgcgcactggctcgacgccgcgtggttcgagggcggcttcccgaacggcgtcgggaactggtacccgaaggccaaggagttcccgaacggcctgaagccggtcggcgaggcctgccacaagctggggctgaagttcgtgctgtggtacgagccggagcgcgtcgccgccggttcgcagatcgcgcgcgagcacccggagttcgtgttcgggggcgagcagggggggttgttcaagctcagcgatccggcggcccggcgatggctgaccgatcttctgtcccggcagatcgaggagttcgggatcgacatctaccggaacgacttcaacatcgaccctctctccttctggcgcgcgaacgacgcgcccgaccgccaggggatgatcgagattcgctacgtcgagggccactacgagatgtgggacgagctccgggcgaagcacccggggctgctgatcgacaactgcgccagcggcgggcggcggatcgacctggagaccgtctcacgctcggtgccgctctggcggagtgacacgagctgctctcccggccaccccgactggaaccaggggcagaccgcggggcttagccagtacatccctctgcatacggcgtgcggctggacgcccgagccgtacgacttccgcagttccgcgaccggcggggccatcgcgcagtgggactacctgaaccccgagttccccatggagctcgcgaaggcgacgatcgcagaggtgaaggccgaccaggcctactggtatggcgacttctacccgttgacaagctgcacgacgaccccggaccactgggccgcctaccagttccaccgcgccgacctcgacgccggcctcgtgctggccttccgccgggcccagagcaactacccggcgctgtccgttagcctgcgggggctgaaggccgaacagacgtactcggtcgagtccatcgacgacgcgcggaagacgacgaccaagaagatggccggccgccagctgatgaacgagtgggagctgcggctgccgaagaaggggagcagcgtggtggtacggtacgggcgagcggagggccgttgacgtcgccgtctcattcggtcaagccgggcctcgcggcccggcttgaccgaatcgaacggcatggcaaacggcgtcacgggtgcgcgcgttcgcggatctcgtccgccgtgagggcgcggttgtagatgcgcacctcgtccagcaccccgctgaacgccgcggccgcgttgcccggcccgtagctgccgaggcagatcatggcgccggaggggatgatcgcgccgccgcgttccagagatgccttctcctccccgttgaggtagagacgcatggtgcggttgtcgtaggtcgcggccacgtgggtccactggcccagcggcgccttgtcggggcaggcgaggaggtggctccactccttctgggggacctgccagacgagcttgccgtcaaccaggcccaaccggtagccggtgttcgcggcgccgatcgtgttgaccatccagtggtcggactggtccgccacatcggtcttgaaccacaggtccacggtgatgccgttgcgcgagaagaagaagtcgttcggcatgcagctcaccgagccgccctggcagagaaaccccttccccttgacgccctgcgtggacacgaagccgctcttcatcgcggtgaagccgcagcttgaggaatcctgcgcaaaggtgtcgtcgtcctcctcgaacgcccaccacgcgacaaggttgtcggtgatcttccgctcccggcccggaccctcgcccaggatctccttctgcttcagatagacgtgctcgggcggctcgaggccgacgtcctccggcgtgatatctacgtgcggccccgtcttctcgcagaagacgtcccggatggcatccacaaagctgaacccaaaccccgaagtcggctcaaggtaatgcccttcgccgaactcgtcccagttgtcgaacacgacgacgcgcttgtcgagcccgttgccgggcgtcgcatcgacgaccctcctcgcttccacacacgccgcacggaaggcctcggcctgggcgccggccacataggagctggtgttcttctcgtgccaggggcgcgggtcccagcccatcatgacatcgacgatgtccggcagagcgccgatccgcttcttgcccagccacgcctccttcatcgcatcgagccaggggccgtagggcgtggtcgcgatgccctcgacatcgcgcccgggttccgccttcaccggcccgccgatgccgtaggccgagctggcgtcccatccttcggccgccatctgccggagaaggtgctcgtcggcgcctccgacgcagccgatgatgtacagcccgtcgaagccctcctgcttgcaggcttcgcgcatctcatcgaggaccttccgcgtcgcctcggacccgcccagctccggcgagactcgccccggctgccagacgaagagcaccggcttgttgtcgatcctcacgtacgaagggtgcttgaagtagctcctgatccagtagggcagcaggttctgcatcatgtcctcccgcgacttcacgccgagagcgcacccgttctcccacattatgcagaacttgaagcggtcgaggtaccgggccttgagcatcccgtcgtggatggcatgcccgagggactggtggatctccgggctgaagtccgcgcggtaccagcagtagatgaacccctggatgccgtgctcgagcgcgtacttgatgtgccagtcggcgacctcgggggtgccctcgtcgtaccagccgatggccggcctccgctccggccacggctcgatcttgccccacccgtaatgcgtgcccaccttccagagcgggcagtagtgcaccagcgtcaggtacggcgtcttcgccggcacgggcggcggcacatagtcggccttgggcagattctgcgagggccggaggtccacgtggagcgtggccctcgcctcggggcagccgtcagcggagatggccacatgggcggtcccggtggcaggagcatccgcccggaggcgccactcgaaccgcgccgtgccgtcgtgctcaaggctcgggatggcctgcgcggtcgggccgacgacccgcgcgagcctggcgggatcgagctgggcgcacacgttcctcgcgtccgcgcctaggttcctcacgatggcgatgatcttctcctcccggcccgcccgcacgatggcgcggccgggtgcaaggttcctgacgtagaggaacggccgcccctccggccgctcggagacccagaggcttcgcacggccacatcgtgcggtccgttctccgggaacgccagtcccagaacgcggagcatgccgctccacgccggcagcgggctcaggtccacgatgctcgcccgtccgccaccccacaccgtgaacggcacaacaccctggccccggtcggtcaggaagacgagagtgccgctcttggctgtggtgctctcaagctccagcgacacgcaaccacgctggttgacgtcgatggcaaggcccgggttgacgatcagcgccgccggggtcgggaagcccgccttcaccgcgctgtccgcgaccgacactgtggccccgaggtccgcccgccagccggtccagccggcctcgcggccgaaggacgcctgccgcagacgctccgcgtccgggatggctcggctggcctccgcgagtcgctcccgctgcgccaagcccgggttcgagatcgtcagctcgtcaaggcggcccttcatgccgccaatgcgcaacgggtcctccgtcggcaccggcgcccccgaccgcggtgtcgacgacttctgtccatcaaccgtgaggctgagcgtggtgcccgtccactgcgcgaccaagtggtgccaccgaccggcctcaggcaccggccccgataccctcggctcccaaccgttcaggtacacgaagaaggagaaccgcccgccctcgcgcccgtcgtcgacgcgaagctggtactccttctccctgtagacgatctgctcccacccctcgggcttctggtcgaagtacacccagcaatcgaccatgagcccgggcgaaagctgcagctcgggggcactcgccacctcaaccggcttccattccgccgcgagcgcctgccccttcctgccctcgacgaacttcgggccctccgcctttccatgcctcccggcgccggacgcgtcgttcaggctgccgtcgaagggccagtagcccatgacctcacctccggcgaagcatgtgccactcgccaccaagcataggcacgcggtgagtccagggatgacgacctgcatagttggcctccgcgcggcgttcgttactgggcctcccagcgagcgccaacagcgttcagaactcctggagcagctcaagtagctcacggtcgagctgatgcccgtggcagtgctcgtaggctacgtcttgcctacctgaatcaaggatcccaaacgacccgcggaagttccacagggcgtacccaatcccatggcctgtgaggatctcgagcacgtcgcggaaccagggcaggaagacgtcgtgcggcgtgcggttgaaggcgccgccctcgccgcagtgcacgccgactccctgccgggccaggtcggcccagcgggcgtagtgcgcttcgagggcgtgccggtcgaacggcttgtcgccgtgcagggcgccgggccaggtcggcacggggaacctctcgccgccggcccaactggcccggtagtggctcacgcccatcgggacgtacgcgcggcagctctggacgatgccgaggtcggccagctcggggcaggggtcgttcccccaggagaccccgtccgcgatgatgagccggtacgggtccacctcgcggatggcgcccacggcagtccgcaccacctgctcatggtctccgcgggtcatcttctcgtcggagggcgattcgggctcgttcaccaggttgaagctgaggtgctccgaggagatgccctggtagcgtcgggcgaagtacgtccagtgcaggcagaaggcatccagagcggcctggtctcgccacaggctgaacggctctctgcgttcggcgttcaccgagaagcccggagcgcggtggaagctcaggcacacgtggacgccgtacttccggccccactcgatggcctgatcgacgcgggcgaacgaaggctcgtggatgtggaatgggtcatcgccttcgatccacagcgtgtagcacatcggcaggcgaacgaagtcgaacccccagtcggcgatccagcggaagtcatcctcgcggaacggttcccggctcttcgtcgtgaacatctccaggaggttgaagccacgccaacgaggcaggacggtctgcgcaggcatggagcattgggcctttccggtgcggtcgcactggtgggataccagggctgtttcgaggacaggagggccaggaccttgcgaggggaatacgaggacggcagtgggcagggatcagggatcaagggtcagaagccagaagccacaagccagaggccagaagaacggcacggctcgcggcactgcccacttgaaggagcggcctgtgacaacctatgcactttgtcttgcctgcctcgtcgtgctcgtggtagcggcggcggctcagccggcgtcgggccttccccgccccgagcatcctcgccccgacttccagcgcgccgactggctcaacctgaacggcgagtggcagtttgaggtcgatgggaagggcgatggcgagcagcgtgggctgaccacgggacacgacctggcgcagaggatcatcgtgcccttcccgccggaatcgaagctctccggcatcgccaacacggactacatgatccacacgtggtaccgccggcagttcaccgtgccccccgcgatgcgcagcgagcgcctgctgctccatttcggggcggtggactggcatgcgcgagtgtgggtcaacggcaagctcgccggcgagcatcgcggtggccactcgcccttcgcgctggaggtgaccgacctcatcgccgatgacgagaacgaggtcgtcgtccactgctatgacaagaccgactctggtctgcaggcgaccggcaagcagagcttcggccgcagcgagggttgcgtctacacgcggacgacgggcatctggcagacggtgtggctggaatccgtcggcgacacctacctccgtgagttcgtgctgacgccggatcttgacggcggcaaggtgctcttccagggctggctcgatggcccgagcaagggtgtcaccgtctgcctccgcgcgacagcggacggcaagccaatgggcgaggatgccttcccgggtgcgtggcgcgtggcatcgggcgcggtcaagctgaaacaggtcaccccctggtggcccggcaagccgttcctctacgatctcactgtcgaggtcgtgcgagagggtaaggtcgtcgatgccgtccactcctacttcgggatgcggaagatcacgatcgagggcaaccgcttcctgatcaacgacaagcccatcttccagcggctcgtcctcgaccagggcttctaccccgacggcatctacaccgcccccaccgatgacgcgctcaagcacgacatcgagctttcgatggcggccggcttcaacggcgcgcgcttgcaccagaaggtcttcgagccccgcctcctctactgggcggacaagctcggctacgtggtgtggggtgagtacccgagctggggcctgaacttcggcaatgccgaggcggccggcttcgcactcgaggagtggcgcacggtcctccgccgggaccgcaaccacccctcggtcatcggttggtgcccgctcaacgagaccggtggcggagaggtcacggcggcgttccaggctgctctggcagcgacgcagacgatggaccccacgcggcccttcatcgacacgagcggctatgttcacctctaccccgacaccgacgtctacgactgccacgactacgaccagaaccccacctccttcgcggcgcggttcgccaacttcgcgctcaccggcactgacccttggaacaacaacctcgccgacccgcggagcgcgtaccgcggacagccgttcttcgtcagcgagtacggcggcatccatctgaagaccgaccgcgatgtcggtcagggctggggctacggcgagacggacctgaaggggtacctggaacgctgcaagggcctcaccgatgtgctgctcgacaacccgaacatgtgcggcttctgctatacccagctcaccgacatcgaacaggagcagaacggcatctacttctacgaccggcagcagaagtacgaccccgctctggtgaaggcgatcaacgctcgccccgcggcctacgagacccagccgccacgcatcctgcacatcacctggtcgacggtcgttcccacctcgaaggaggcgccgcaggactggcgctacacgacaaccgagcccgggcaggactggctcaagcccaacttcgatgacagcaagtggcaggtcggcaagggtggtttcggcaccgagggcacgccgggggcggtcgtcggcacgacctggcagggcgagggcagcatctggatccgccggacgttccggctcgacaaggtcgacttccgcttcgccgcgctgagcatccatcacgacgaggatgccgaggtgtacatcaacggccagaaggttgccgccctgtcggcctataccacggactacgtcaactgcgagtgcactgaggcgctgcggaaggccctgcgcgcgggcgagaacacgctcgccgtccactgccggcagaccctcggtgggcagttcatcgatgtggggatgcgggtgggcgaggagagagggcaggaccggtagcagcgtaacgccctgctcttctcgccccctgcgagcgcgccggcgccgtcggaccggtcacccctgcgatggctgctgcgcgcgaggccccaggaggcgctcctccagttcggccagccgcgccttcaggccggccagctcatcctgcagggcggggaggtcatcagcgctggtccctggcccctgggccgtggcctcctgcgtgggccgcgatgcggccgccatccctggggtaggccatcggcctgtcatgaggaactgcgcgcacggccctggccctccggccctgggagcgaactccccccgcatccagccgggcaggccggtcaagtggaacatgttgcgtcgtctcatgtcttcgtctcctctccgtgctccgtgcatgtgtgtctctcgttgtggcctggacaccgttcctcgcccagctccgcgcaggccgtgcccccttgggcacagcggttgtcgccgggtgtgatagtgcctgctgcgaggcgggcgagcgcctcaatggcgtcaccctcgacgcccgtcaccacgccgatccccgcgtcggcgcagcgctgggctgccttgtagcctactccgcccgccaccacgcactccacgccgtgagccctcagcagggccggcgtgccgcacgtctgtgtgttgggcctctcgacccgcctcggctccaccacttgcccgtctgcaacatccgcgatgaggtagccctcgcaatgccccaggtgccaggccacgtccgttccgtccacggcaaccgcgactcgcattccctgcctccttactagatgctatttgcatataccacctcgacgaaacgcctcgcaggggcgagcacctcccctacagctccttgcacgcccccgcgaaacgaaccatctcctgaccccggcgttcgaggacggtcgcccaatcccggaggtgctcgcggccgaccggggtgatctcatagactcgacggtcagggccgcccggaccgggctcccagtgagaggtgacgcagcccgcctgctccagcgtgtgcaggactcggtacaccgcaccaacatcgatctccgagtcggtcaacgcgacctcggggagctgctgaagcagctcgtacccgtaggcagtgttctggcggcccaacaggaagaggatcgcgggctcgaccagccgcgacagcttccccagcgaacaggagcaggggccgaactgctggccatgtcgtctgcagtgaccgcgcggcgccatcgttcgcaccatctatatgcttatagcatataccacactctcgtgagcctgtcaagccctgctgttgcgcggcgggcgctcccccgtaactccctgcttgctcccaagcagctccacatctgtcagcgacactcagggagctatatgtgtttagcagatagagggggtaaccggcaatgagacacgaatcgggattcaccctgatcgagctcttggtggtgatcgccatcatcgcgatcctggcagcgatcttgttcccggtcttcgcacgggcgcgagagaaggccagggagacctcctgcagcagccagctgaggcagctggggctgggcctgcacgtgtacgcgcaggactatgacgagcagttccccttcgacagctacatgggcaacccgcatccgatgctgtgtaacgggctgtggccctacgtccgcaaccgcaatctgttctactgcccaagcgccaaggcgctggaggcgggggcccaaagcacgcagtaccaggggccaccggactccgtcatcgactccgacgcaaactgggccgcctaccgaatcacctacaagtactactcatggaccttgctcgatccctgggcgaagagcatgacctcccggctgctctccgagagcagtgacggcgactcctggctcatgagcgactggttccggaagaagtgccccgtatggccccatcagcggagcaaggcagccgggattctagtgcagtacctggacgggcatgtggagttcatcgccggggagccgatcaacagcttcaagtgagaggtgcgtcatgcgcaacaggcccaagacggcatgggccgtagtcgtctcgctgcttctcctcgccgtcctggtcgggtgtcgcggcgagccggccaaggagggcggcgggccggccgctccgcggccggtgaagatcctggcctacgtcaatgtcagcagcggctgccaagagccgaccatagagctcctcaagagctttaaggcggagtaccccggtcgggttgacttggggatcgtcgacttcggcgaccaaggcgaggggagcaagcagtggaaggggagcgggtacgattgcatggtcatcgaagtcgacggatcgccgctcgtgaagttcgagaccggcggcaggacgaagacggtggcgctgcgtcagccggtcggcttttggtggacccacgacgacctcaaggccgccgtcgctgcggccatcgagggggaactgcagagcggcacggaggaagaggcgatcgccgggcagccgccgcgaaagatcaaaacgaggatcgtcaccgagcaggtcaagcgggatgggaagaccttcgcccgggttctcatcaacgagcgatcggcgatgctgatccgggcctcctcgggggaccagtcgccgaatgagcgcgccgaggcagcggggcaagtgctgaggaagtggctgaggcagccggtcaaaccgaatgagatcgaccgcaagcaggtggcgggaggctgggcggtcagggtgagcgggaaggtggtcgcggtcgcaacgctcaccggcgcgaaggcagccggcgggacaccggaccaactggccaagaagtggctggttggcatccggcagggcatcgccatcgctgctcgccctgaaggcaccagagacgcggccgagaaggcgcctgctcccgatgagggctgcgaggtaggcgggtgaccgggctgagcggccgccgcgtgccggcgcgggtcgaagagcgaaggcgggcaccctttccgggacgcccgccttcgtctctgcggggaggaactgccctcaggccacggggaatagctcgatacaggaggagtcaccatgaccaagccgcgatccccgacccgccagcctacggcggacccgttcgtgctcaggcggttgtatgaacccctgcgcgtggtcgatgtctgcgatgccctcgatggcatcggctacttcggcatcggcctcgtgtcgccggagattcgcccgctctggctgggcatgaagttctggggcgtggccttcaccatccggtgcgtgccggcgaaccgaccgatgtggccgcttacgacgacggaggacatcgtcaacgcccacgggctctggttcagggaggtcgggaacgtcgacttcgggggcatgataggccccgggcatgtgctcgtgaccgacaccggcggggcgggcgaggtaggcttctggggctcgtgcaacagcctgggtgtagtggccgatggcgccgtcggcatcgtcaccgacgggtatgcccgcgacacagcggagctggcccttcagcgcacgccgatctgcgcccgcgcccgtggacgcactatcatccccggccgcattgaggtggtggaggtcgagacgcgcatcggctgcggaggcgttcaggtccggccgggggacatggtcggctgcgatgacgacggcgtggtggtggtgccgctggaggtcgcgcaggaggtcgccgttcacgcccgcgcggtactgctcgcggacatgcacgctcgccgcgggctgtacgagcgtctcggcatgaagtccgatccgacggtggactacgaggcagtggaggagtactaccgacggctggagtgatcgccgagacgcccgaggcgaacttgaccgggtgcgaccaaatggggcaggtctagcgggcacaccgactcctggcatgttcgttgcacgggctgtggcactgctcgggcgtgcgccgcgggcgctccggcccatggccgcccgacctccacgacaggtgtgttctcatgtacggtgaggcacgaacggtcctctgcccgcactgcggggcggagaaccagaagtcggagatcgtcacgatctgccatcggtgcttcaagccgctggcgagccagccgcctgaggtggccgccgcccggcaagcgccgccgcccccggtccgtcctgtcccgttacctccggagccccgccttccggctccggttccccctccgccgccgccggcggccccgccacccgcgccgcccgcatttgagcccgcgcagacttacgcgccggcccccggggagactgttacggctcggccagcgcccccgcgggaggcgccctggttccgtccgcgttggcggatctgggggaggctccccggcgagcggaactgggtgggcatcatcgcgggcggcatcttgctcgtggtgatggtggcccgggccggcgggccagttgtcgcggtgatcgcgatcgcgtgtctggtggtgggaggtgtgttcgccgcgcgggcacacctggcggccatcagctatgaggtcacctgggacccgacgccgacctccgtggacctggggcagacgttgacctggggggtgaccattcgggccaagcgccccgtgaccctcggtactgcgcggaccaggctgtggtgcgaggagagagcggtccacggcagtgggaagagccagtcggtccaccgcaacacgctgcttgagcagtcccaggtcttcccgggccaagccctggcgcccggccaggctgtggtcctccgcgggtcgctgcccgtgcccccaacgagcctgccatcgtaccgcggtgcctacaacaccatccagtggacggtctcgatgggggtgccggtgcccggcatctgtccggatatcaagaagaaggcccggctctgggtcgtgccggtgatcgagggggcgccggccgagactcgaccggagtggtcgcccgcatctcgggccgaggccgaccgggcgcccgccgaggcgagcgcagccacgtccgggccgttgtgcgcgacacttcagaccggcgactcggaccggcaggggatgcccgtcgtgccggtgggctcgaccgcgcagctcaacgtgtcgctgcagaccgagcaggagatccgttgccggggagtgagatgccaggtcggctaccgcatcttcggccgcggtaacgaggagcggaagtgggtgtccgaggagcggctcatccacgaggggccactcttggccggcgcgccgatcacgtaccccctcacggtgacggtgccggccgaggggccggtgagcttcagcgggcaactggtgaactgcgaatggcgcctgcgggtgcgggtggacatacccctctggcctgacaagcgacttgacttgccgtttgtggtcgcacccagaccccgggtttgaggcgtgagccagcacccccacaaggggaacgaggggtcctacctcggcgggccaagggggaggagtagcgagaatgtgctgccctcgctgaccttcgacgtgacctccagccgtcccccgcagtcggccagcattcgcttgaccagggacagaccgaggccggtcccgacgatgttcttccgctctggggtgagcacccggaagaactcctcgccgagtcggggcagcgcctcgggcgggatgccgattcccgtgtcggagacatcgatccgcagccgatcgccgtcgcgccgggccgagaccatggttcgaccgccgggacggttgtacttgatcgcgttgttcacaaggttcgcgaccatgcgcgtaaggtcgtcgcagtcggcatggaccggcgggcagtcggggggcacgtcgacctcgaggctcacctcggcgcccttggccatcgagcggctggcctcggcaacctcggcgacgatctcgcccaccaatagcggctcaaccttccgcgcgggaagcgcatcggcgcgggagagttcgagcaggtcgagcacgagctggatcatgctcgccacacgcccccgcgagcgctcgagaagctcccgcctcttctccggtgtgagttcctgttcaccgagaaccaggttgaggaagccctggatggccgccagcggcgccttcagctcgtgcgccaccttcgacatgaactgcagcttcgcccgttcgagccgcatcagctcggtcacgtcgcgcagtaccgtcgccgtgcccagagcctcgccctcgctggcctcgatcgggacggcgcgcgccatgtagatgcggtcccccgtccggaactccgttgtcgacgccgcttcgtccgcttgcgggtcggcagccaccgcgcgaaccatgttcaggaggcgtggatctcggaccacctggtcgagcagccgcggctcgcggaggccatcggcgagccccagggcctcgcaggcggccgggttgcagaggaccacctgtccctcggcgttggcgatgatcaccccgtcggcgaggctcttcacgatcgtgcgcaggcggctcttctccgtgtcgagctcaagcagtcgtcgcccggcttcctggcgcagccgctgccagcggagggcgcgctcgacacgggtcgtcagctccagggggacgaacggcttggggaggtagtcgaaggcgccgcgcttcaccgcctcgatggccgtgtccaggctggcgtgggcggtgatgacaatcggtaccacatcgatctcggactcagcgatccgggcgaggacctccatcccgctcaggttgggcatcacgaggtcgatgagcgcgacatcgaagttgcggctggtcaactgccggatcgcctcgtcgccggtcgccgccagcttcacccgggcgcccagcctggccagcgcgcgctggcaggcgagtcggatgccgagctcgtcatcgacgaccaggatatcggcgtcgagctgcgtcgcacccatcagggggcctcaccggccggctcgaccacgggcacgccctccgcctgctcctgccgagtgcccgcgagcaggcgccggatcgtgtttgccagctccgcgaccggggccggcttgctgaaccacgcatccgccttcatccactccaggactctcttggggttccggttgaactcgaagcccgtctgatcgaccaccgaggtcagcatgacgatcggcgctcgacggaagcgcggatcgcggcgcaaggctcgggcaagtcgcgccccggagtccgtccgctccatcatcaggtccagcacgaaggcatcggggatctcgcgaccgctcacctctagggcttcatcgcttcgctcggcggtgatcacatcaaaccccatccccgccagcatcaggcgatgctgctcgaggaagtcggggtcgtcgtccacgacgagcaccttggcgctctccgcacgagagggcgcgagatcgagcggaatactgagcgtgaccgtcgtccccgcgccgaggcggctcgcgatgcggatgtcgccgccgtgggcgtgcatgatcccgtgcgcgacggccagccccaggccggcgccgcggcgggtgtccttggttgtcacgaagggctggaagacgcgcgggagaagctccggctcgattccgcggccggtatcgcgcacgatgacctcggcgtgggtctcgtcggcgcgacgtgtctcaatggcgaccttccccggtccgtcgatggcctcgatcgcgttggtcaggacgttcactacgacctgcgcgagctgggccgggtcggcgacgatcggcggcaagtcggcctccaagcgcttctccagctcgacctcggtgaaggccagcttcggctcgatgtccgccaccgcccgctccacgacgtcggagacccctgtctgttcccactgcggctcatgctgccgggcgaacccctgcaggctggacatgacctcgcggcagtgaagcgcctcggcgatgatcgtcgccacatcctcccgccgcgcgtcatcgtcaggcatcgtatcgcgcaggagctgggcgaaaaccacgatgttgcccagggggttgctgatctcgtgggcgatgtcggccgccagtcggcccatgtcggcgagctgctgggcccgcatggccagctcgcgggctcgttcgatctcgtccttgctccggctgagtctctggacgttgatctggagctggtcgatgaggtacggcaggcacatctccggctcggcgagaccctggtgaaccgcaatggccttctcccgacacgtcgggtaaccgcaggcgccgcagttcagctcgtcttcggggccgagcttgttggtgagtgacaggatgtcgcgcagctcggtcgccgtgggcaggctgaccttcagcgcatgggcgacgaactcgcgggagaggtcgatgtcggcgacctccgccagcgcgtcctccattgcgcgtgcgccgggatgcgattccagccaccggacatgcgcggtgaccagcgccttgcgggtgaagggactgagaacgccgctgaaggccgggccggcgatgcagcctttgcagagaagcgcatcgaggaagcgggcggggaacccccctgcctgcagctcccgcaacgcgttcaggcacgtgttggggccttcgatcacggtgatcgcatcgtccaacaggtcggcctggatggcggcggccttgagcaggcccccgcccagggggaaggcggcgccgaagtggggcagtggtgcgtcggcggttgaggactccagcgtgcgcaggtcgatcccgcgctggttgagcaggtcgcccagctcgcggaaggtcaacgccgcgtcgacggcatcggcgaccgccgggtcgcggacctccatcttcttcgccacacacggcccgatgaagacgacgttcgcgccggggaggtacctctgcttgaccgcccgcccgagcgcgaccatcggggagacgatgggcgcgaggttgggcacgagctccggcatgtacttctcaacgtagctcaccaacgcggggcagggagtgctgataaccggtcggtccggcgcggcccccaggagcttcgcatactcgcgggcgaccatctccgcaccgaaaccgacctccatcacgtgggcgaagcccaaggcgcggcaggcggccacgaccttcccggccgggacttcggcgtacgcggcggggtagctgggcgcgaggagggcgacggtggggctaggttcggcgaggaggctctcgacctgggggatcgcgggctggacctgcttggcgttctgggcgcacgccctgaggcagttcccgcagccgacacaccgctcctcaatgacgcaggcctgcccgccctgcacgcggatcgccttggcgggacagctccgcacgcagttgtagcatcgccggcacctcgcggcgatggtggtgacgacccctttgggctgcccgtcacgatccggcaaagccgtgcctcgtcagtccggggttccaacaggcgtacacaagcgatatgccgttcctgggaccgcgagcatcctgctcgcattggcggagtgaccacgtctgcgagcaggatgctcgcggtcccgggaacggcagcccccatcgctgccatcctatctagtcacagcatctggccccggagacctgctcgcatcggcggcgtgaccacgtctgcgggcaggatgctcgcggtcccaggaacggcagcccccaccgctgccatcctacctagttacagcatctggccccggagacctgcttcggcttccttcatgtactcgaaggtgacgctccgcacgctctccggcagttgggccagctcgccctgaatgagtcgctcgccgaccgtctgcgtctcgggcgaggcatagtccatcaggtactccctgagcccgaggagaacgttcgccgcgcagcggtcctggacgcgcgtctcggagtccgtccggtcgggcccgcccacccgtcggcgctgcgcgaagcacgccgtgcagaagttgggcacgaagcccacctcgcacatgcgatggacgacctcctccaacgcccggggccgcccgatggtgagctgtccgcccccctccagttgcccgtccgccgtgtagacgcccgggtagctgagggaccccacactgacctgtgacaccccgagcccgtagagctcccgccgcacctccgaagaagccggcgtgcacatcacaatgcccgtgtaggggacggccagccgggtcactgcgacgacgaacgtgaagtcctcggagctgacccgtcgctcgggcccctgcgagggcggcgctcctgccgccgacagcatgcgagcgtaggtgatcgtgtgtgggggccggccgtacgtctccgtaaggtaccgcgcgtgcccgagcagcgccacgatgtcgaaccggaggctgtgcgagccgagcagcaggccgaggccgacgttgtcgagcccggccccaaacgcgcggtcatggccggtgatccgccaggcgtagtcggccttcatcccgtccgggtgcagggccgcataggcgcccggatggtaggtctcctggaagacgtggtacgtcccgatgggcgcgtccctcagctcctggatgtcgacgacgcgcaggggatcgaggttgacgtcgacccgctggatctgccttatgcccgaccgcacgccgtacgccgcccacaccatgtctcgcacgtactgcaccccgctccggtcgtcgccgaacacgagcagcacgtgccggtggccctcgtcgagcaagcccgcggtctcccgctggaggtctcgcggcgtagccgcccgccgcgtcagccgggcgttggagcggcgaagcgggcagtagaggcagtcctgcacgcagcgattggtcgggcagatgggcgcgtggagccgaactcgcttgccccagagcttccggtgcacctgacgcgccgccgccttgatctcctcgcgcagtgccgggtcgtccacctggaccaagacggctgccccggcgggcgagagcccctccagcgtcagcgcctggtgcaccacgtcccgcactgccgacccatccgcagccctcccggccgccagcgcgtcctcgatctcggccgggttgcagatgcgcagagccatcgtgtccatggcctcacgagaccagtctaccctcgtcgctgccatcttcaccactccacctcgaggattctgttcctgggaccgctacggcgagtcgccacgatcagaacggggcggacgggcttccgcccgtccgccccgggcccatgcctagcctccctccaccgggacctggacgggcttcctcgttcgttcggtgtacttggtgtgcagcaggtggtgtgacttctcgcccaatggctcgcccaggaacttctcgtagatccgcttgatcgacgggttctcgtgcgaccgacggatcgggagatcgacatccgcctggtagatcgccgaggcgcgcttcttgcggatgtccggtgaggttgggatcggctgcccgccaccaccgaggcacccaccagggcaggccatgatctcgacgaagtgccagtcgcccgcgccggcggcgatcttgtcgagcacctgggccgcgttcccgagcccgtgggccacggcggccttcaccggcaggtcgccgacctgaatcgtcgcctcgcgcacgccctccatcccgcgcacggccgcgatgtccacgttctccagcttctcgcccgtgatgacctcgtacgcggtgcggagagccgcctccatcacgccgccggtagcgccgaagatgaccgcggcgccggtcgactcgcccagcgggtcgtcgtagtcgctctcgggcaggttggcgaagtcgatgcccttctccttgatcatcttcgccagctcgcgggtggtaagcacgtagtccacgtcctggtagcccgagtcgttcatctcggggcgcgcagcctcgaacttcttggccacgcagggcatgatcgagacgacgcgcatcttggccgggtcgaggccgacctcctgggcgaagtacgtcttcgccaccgccccgaacatctgctgcggcgacttgcagcttgagaggttcggcaggagctgcgggtagaagtgttcgatgtacttgatccagccggggctgcaggaggtgagctgcgggaggaccccgccggtcttcacccgatggatcagctcgaacccttcctccatgatggtgaggtcggcggtgaagtcggtatcgaacacgtagtcgaggccgaggagccgcagggcggtggtgagcttgcccgtgacgatctcccccggcggcatgccgagcgcctcgcccaggccgatgcgcacggccggcgccgtctggaccacggtgacgatctctgggtcctccagcgccgcccagacggccggaatgtgcgtcttctcggtgagcgcgcccgtcgggcagcggttgatgcactgaccgcagttgacgcagagcgcgtggccgagcggcgtgtcgaaggccgcgcccacgatgctcccgtacccgcgccccttgatccgcaggccggacacgccctggatcagctcgcaggtctggaggcagcggcggcagaggatgcacttgtcgggatcgcggacgaccgagaggctggagtcgtcgatcgggtgcccgggcggctccgccttcacgcggacctcgcggatgcccagctcgtccgccagcgattgcagctcgcagttctggttgcgggcgcaggaggtgcactcggagggatggtccgagagcaacagctcgacgaccgtcttccgcgccttcctgacctggggcgagtgcgtctgaactgccatgccctcgcgcaccgggaaggagcaggccggctggagcacacgctccccctggatttcgaccagacacacccggcacgcgcccatgggcggcaggtcaggatggtggcagagcgtggggatgcgaatgcccgcgctcttcgcggcttcgaggacggtcattcccgggctcgcctgcacttcctgaccgttgatcgaaatggtgaactgtgacattcgtctcgtctcctcctgtgcagtcaggttcgggtagccgtcctacgcctcttcctcgaccatgacatagtcgcagtgcaggcagcgcgttgcctcgcggcacgcgacgggcagcgtgaagccgagctcgacctccgagaacccgctgcgccggtaggcatccgagatcgtcgccacctcggccgcgggcttctcctcgtccgccgtctcctcgagctgcgccatgaccgcttcggtcacccgcgtccttttccgctgcttcggcgccggaagcggctcgccggagagggtgctgtggatggcccgcgccgcgcgatggccgtcggcgatggcgtcgaccacggtcatcgctcccggaatcgcgtcgccgccggcgaacacgttcggcatggccgtggcgagggtgatcgggtcgacgcggatctttccattgtccgtgtcgacagagacacaggaggtgtcgatcctctggccgatggccgcgatcacggtgtccacgtccagggtgaagtcggcgccctcgacgggcaccggtcggcggcgtccgctgcggtcccactcgcccagctcaatcggctgacagaccatccgggcggtgcgaccgtcctggacgacgatctccttcggcgcggccaggaagtggaactgcacgccctcgtgccgggcctcctgaatctccgccttgtgcgccggcatctcatcctcggtgcggcggtagacgaggtgaacctcctcggcgcccgtgcgcagcgccgaccgcgcggagtcgatagccgtgtcgccgccgccgatgacggccaccttccggccgatctcgggctgcttgttcagcgcgacatcgcgcaggaactggacggcatccagcacgcccttcgcgtcggcgcccgggcagtcaagcggcatcccgacgtggcagccgatggcgaggaagaaggcctcgtagccctgcttctcgagatcggtcagcgtcacgtcgctcccgaaggccacaccggtcctcagctcgatgccgaggtcgagcaggtcctggatctcccgctgcagcacgtcgccgggcaggcggtagtccgggatgccaagggccatcatcccgccagggatctgccgcttctcgaagaccgtgacatcgtagcccctccgcaccaagtcgtaggcgcaggtgaggccggccgggccggcaccgatgaccgcgaccttccggtggcgctggggctcaagggacggcatccaggtcgtggtccgcaggtcggccaccgcgcgcttcagcagccggatcgacacggggtcgtcgagctggccgcggcggcactgcagctcgcagtacgccgtgcagacgcgcccgcagactgaggggaaggggttcgtgtcgcggatgatggcgtacgcgtcgtcgatgcgcccctcggcgatcgcgctgacgtacgccggcacatccacacccgccgggcacgcgtgctcgcacggggccttcatgatgtcggcgcaggtgcccgcgcggcagtgcttgtcgcggatgtgctcgtcatactcgtcgcggaagtaacggattgtgctgagcacggggttgggcgccgtctggccgaggccgcacagcgccgtgttcgcgacctcggtgcccaggtcgatcagcagctcgacgtcgccctcccggccctcgccccggcagatgcgctcgagaatctcgagcatccgcttcgtgccgatgcggcagggggggcacttcccgcacgattcgtcctggacgaactccaggaagaagcgggccaggtccaccatgcaggtggtgtcgtccatgacgatcaggccgccggagcccatgatggagcccagggccttcaggttctcgtagtcgatggggacgttgagcgtctcggcggggaggcagccgccggacgggccgccgctctgggccgccttgaacttgcgcccgccgcggatcccgccgccgatgtcgaagatgaccgtgccgagcggggtccccatcggcacctcgaccagacccgtattgctcacgtgccccgcaagcgcgaagaccttcgtgcccttgctcttctcggtgccgaaggaagcgtaccactccgggccgttgagaacgatgggcgcgatgttggcgtaggtctcgacgttgttgagcagcgtgggcgagtcccacagcccgctctgggccgggaagggcggacgcggatgcggctcgccgcgcttccccatgaccgaggccatgagcgcggtctcctcgccgcagacgaacgccccggcgcccatgcgcagctcgataccgaagctgtagttcgagccgaagatgccctccccaagcagcccgtagttgcgcgcctgggccaaggccaccgacaggcgctcgatggccagcgggtactcggcccgcacgtagatgtagcccttcctggcgccgatcgcgtagccggcaatggtcatcgcctcgatgacgctgtgcgggtcgccctcgagcacgctgcggtccatgaacgcgccggggtcgccctcgtcggcgttgcacacgacgaacttgcggtcacctttggccttggcggtgaactcccacttcaggccggtcgggaagcccgctcccccacgcccgcgcaggccggagcgcttgacgatgtcgacgacctcctccggcgtcatctcggtgagcaccctcgccagcggctcgtagccgtcgcgggcaatgtactcctcgacgttgccgggatcgatctccccgcagttccgcaggacgatcttcttctgcagcgcgaagaaggggatcttctccatggtcagggccggctcggcgccctccggcggcacgtacatcagcttctcgaccgggcggcccttcagaaggtgctccttgacaatctcgactccgtccccgggcttcagcttctggtagaacacgccctcggggtacacgacgcacaccggaccgaggtcgcacgaccccatgcagccggtgcgcacgatcttgatctcgctttccaggccgctgtcttcgatggcctgttccatcgcttccgcgacggcctggcagccggaggacacgcaccccgcccccgcgcagacaagtacatgtgatcggaaggtaggcatgagaaggtctctctccctttcctgacagccgcgcgcgggcgctactcgtatctcccgaggatgtcgccgaccttggtcggcttgacgcgctcgtagatgtcgtcgtccacgaccatcacgggcgacaggccgcacgctccgacgcagcgcaccacatcgaggctgaatcgcatatcgtcgctcgttccgcccacagtgcagtcgcagcgcttggagacctgctcgaggacgcgcttgccgcctcgcacatagcacgcggtgccctggcagaccttgatcttgtgccggccgcgcggaaccgtggtgaagaagctgtagaaggtgacgaccccctcgatcacccccgccgggacgtcgagcttctcggcgatgtactcctgcacgccttgtggaagaaacccgatctcctcctgcaccgcgtggaggatctcgatcagggagtccgtttcggcgcccttctggtcgatgatccagtcgatcttggagtagacctcttcacacacacatgcctcagccatggttcaactggcctccgatccggtcatgatggcgtactcggacaccacctggccgttgacgatctggtcggccacgatgcgccgcatggcctgaggggtcacccgaccgtaggtgaccgccggcagcccggccgtctgcactacgaccacgggctccctatcgcagaggcccttgcagccggtctgcgatacggccacgtcggtgaggtcacgcagcgcgagctcgtccagcaacgcggacatgacctcgcgggccccggcagcgatgccgcaggtgcccatggcaacgacaacacgcgcgcggccctggctgtcgcgtacagccaacgccgccttggcgcgctcacggagagcctgcagttcctctcgggtcttcaccctctcgatgctcccttctggtcgtctcacggtcgcggtaaggggggcttcagccgcgatcccctctgtcggctagccgcggctgaagtcgctcctcccatggcagccggcgttcatgccttgctcccaacgtcccgaatgtggtcgttgacgaactgggccagccaacacagcacccgcggatcggtcagcggcacctcgcccagttccctctggagttccacggtgtcgagtccgaacgtcgccccgttggcctggtggcggtacctgaacgatgtatggtccgactcgcaggccagcgcctgggtgacggcgcccatgtcgcccaacggtgggcggtcaacgtgagtcagttggagcttcccgtgcaccaccgtcccttctcccggcctcgactcgatctgcaggtcgcccccgcaccgctcgcaggtagccctgagcagcggcagcccgaggccgacccggcgggtagtgcgggtcgagtagaaggcgtccgctgccttcgccagcgtacccgggtccatgcccttgccgttgtcctcgagcaggaactcgagcgtgtcggccttggcgtcttccgtcacagtcaaagcgatcgcggtcgcccccgcctcgaccgcgttccgcgccgcatccagcaggtgaagtgcgatctcccgcatgggtctcagtcaccgaagctcgtcatctcgcgcgccaggcgctggccccactcgcgcaccccaaccggcgcctccgccaggtctgccgagatccaggtgtaggccgcgccgatctcgtcgaggtagtgcgcgtccgacccggccacgagcggccgctccgccagctcgggccagcgcaccctcgcctccgcccgcgtcatgtgccgcgacacctcgaacgcgtccactcgcagagccgggggcacgaaaccgagcaggggcagaagcccgttcacggtgcgatcgatatgtgcaggaatgctcatcccgccgtgcgccgccgtcatcccggcgatctcctcgaggctgaggtcggtggccgcggcgagaagcctctcgtcggtgcccagcacctccccccactcgtcgagcaggaactgctcgccgaacagatcggggcggttgcggagcggcggcagatgggcagcgaccagcgcatccaggtccatgccggccctcgcgtcatcgaacagcgccagcatgtgcacgccctcggcgctctcgatctccaaccccacgaacacgcgcacctcgaacgcctgcgccgcctcggcaaccgcccaaccgttctgggcggtcgagtgatccacgactcccagcacccggattccgcgctgctccgcggtcagcaggatctccgccggcttcatctcgtcgccgccgcagggcgagagcgcggtgtgcacgtgcaggtctgcgggaacccggtccgccattcatctgcctcgcgggggaacgttccagactcgttctcccagttaccgcaccccgatctcccacagcttccccgccaccgtgtaggccgtctccgccgaggcaaagacaaggatcccctcctcctccgcccgtgccaccgtgtcgtcggcgggctcgaaccccccggcgatcacgatcgccgacagtcccgcgagggccgccaccgcgatgatgttcgagtgggtctggatggtcacccacacgttcccgcgcttcccgttcgccatgacgtagctgagcaggtcgctcacgacggcgcccgtgatcgcggagtcgatcgcctcgcccgccgcatacgccgagagaccaagctgtccggccgcctgggcgaccgtcaccggcgcttcatcaggcatcttgccgtcccccgcggtagaaggtcagcagcagtcgcacgccctcgccgaccgtgctctcgatcctcatctcgtcggcctgctccttgatgttggggaggcccatgccggccccgaatcccagggcgcgcgcctcctcggtggccgacgaccagcccggtgtcatcgcgagttggatgtcctcgatacccggcccccggtcggcgatgccaagcacgacccggcccgcgtgcacgtccagcgagagataccccgagcgcgcgtgcaggacgacgttcatctcggcctcgtagcaggcgacgctcacgcgtcggatcgtctccgcatcgactccgcagtcggacagcgcccgcttcaccgacgtggacgcgcgcccgcccaggaaataggcgcggcccagaatcgggaactcctcgtgtgccagcaccggatcgtccatcgcccactcgtgtggggcgctggcagcctcgctgccagcgccccaggtgctatacggaggcggcctttcggtacggccgcagccccgcttgcatcagcagcccgcaagcctcgtacgtcgagagcggcgtgcggagaacggggatgccctcctcccgggccgcctcgaccatgtcgctgccgacctgcttgccctcgatgaccaccacggccgcaaggtgcttgatggcggccgtacggatcgtctggtcggtggcgagaccggtcaggaggagggagccttcccgggcgaaggccagaacgtcgctcatgaggtcggcggcgaagcagccgcccactgcggccgcctcatcgcgcgctcgcacaaccagctcggccttcagcacttccatcgcccgggctagcgtcaccgcgcatccctcctgagggcactgcgattccgccagggacgccagtctgattgtacggcgagagggggaagtctccgtcacccgaaggggggaaatccatctcccccaaacgggggaggggggaaagggaaacggcaggagccagaggtcaggagtcagaagccagaagaacggcgttggcgcgaggcctttgccgttctcctggcttctggcttctgccgtctacttcttggggttcaccatccccgctgtggcgccggccgctccgtagtggcagcggtagcaccagccattgctcggggagatgccggggtaggtcgcgggcttcgagttgaggttgccgtggcagtcgccacagctcgcctggctcgcgctcttgccgtggttgctcgggccgatctcccacgtggccggatgctccccgccggtcggcgttgaggccagcttcgcggccgtgccgagcgtcagcgtgtccagcttcttgccggtcttcagcgactggatggcgtaggcgtacttggctggtatgagaaccgcgccggtggagtacgcgacgatcgctgtctgcgcctggcccctggagaacgtcaggatgcggaaggtgggcgaggccaaagtgccgatcactgattgccgcagtttctggcctacgaactgagtgaaggaggtggtcgcgttggtgatgcgcgttggcaccaggtcagcggccaggttgttcacgcggatgaagtagtcgccgttggccagcccggtcatgtcgaattgggccgagccgccggccatggtggcggtcttcactacggcgcccttctggaggaggtccgcactcgtgatcgacgtcgccttgactgtgcccgtcacattgtccagggtggtcgagagcgagagcgtcagggtggctacggccgagagagtgtcggttggggcggcggagacgccggccgagggctcggccgttggtgccaccatgggcaccgtgggggaatccatgctgccacagcctgtcaggttgggtagagcacagagcgcaaccagggcgaccaacgacaggacaacaatgcggctcgtcttcggggcgaccatgtagcaaccatccttccgtgtcaatggagtcatctgccgacaggggtaggacgcacacgcgcgccattcggttcccccgctgacgcgagcgctgggcgccaccagcggctccccggagcccgaagcccggagatccactctagcggtccgggcgcctgacaactcccgacttgaccgcgatgaccgcggcctgggtgcgatcggaggctcccagcttgaggatgacattctggacgtggctcttgatggtgctcggggcgacactcaggacttcggcaatctgctggttggtcaagccctcggtcatcagggcgagcacttccgtttcgcgggcggtgagcttgtttgcctccccggtgacggaggtccccgcgtccgtcgtctccgaggccagccgctggatgacctccgtgagccgggcaggattcacgaggttgtccccgttcacgaccgccacgatcgcggcgacgaggtcctccttcgacatgctcttcagcaggtagccggccgcgccgtgcgcgatggcctgcaccagccacgccggctcgtcgtaggcggtcagcatcaccaccggggtctccggcagctcgcgcttgatctcccgcagggcggccagcccgtccgtgccgggcattcgtatgtcgagcagcacgacgtccggcttcagtcgtcgcgtcagctccacggcctcggccccggtcgaggcctccccctccacgaccacccgcgagccggccagcatccgtcggataccctcgcgcacaacggcgtggtcgtctcccatcaccatccgaatcggctcgttgcctttgggaatcaccttggtgcctcgcagagagagtccgtgcgccggcgtcagtataccagaaggtgggccgaaggcaaaaccggggaacaatcgcttcccccggttgtccccgataccagatggcacgcgcccgctgtgcgtgacacgcgcgactggttcgacaggctcaccaccctgagcgacgtcgaagggtcgcgcgcgagtgctgtgggccatcggcgagtcgccgctgccacgggccaggggttctgggactggttcacatggcttccacccgccgcgtcttcgagcgcagacacctcgctctgctcgtgttgtcggacgcgggttcctgcgccctcgccatcctgacagcctatgctgtccgcgtctacacccctgagatcctccgaccgaccctcaagcacccgctcggcatgtacctctggacgctcccggcgattctgccgctttggctcgccacgttcgagagcctgggtctctaccgcgtcagccgtgccgcgccgcccttccacgaccttctcgacagcttccgcgccgtcaccctcgccaccctcatggtcgccgcggtctcgttcctcagccacatcgactactcgcgcggcatgctcatcctcttctggctctgcgcgctcgcctacgtctcactcgggcgcacggtcctcagcaaccaccgcgcgacggccctggcgaccggcccagcgcgggcgcgcacgctgattgtgggttgtggcgagctcggccgcctcgtcctgcgccgcacccgcgagcacccggagttcggccaccaggtcgttgggttcgtttccaccaactccgacccgccgaccatcgacgatgtccccgtcgtgggcaagctcgccgacctgcccaccttcgtccgcgacctcggcatcgacgaggtcatcgtcgcccatcccgacctcgagcccggccagctgctcgacgtggtctcccagtgcgagggcctgccggtggagttccacgtcatcgcgggcccgttcgccgtgctcacgggtcaggcgcagatcagcggcctcaccgacctgcccacgatctccctccgccagacccccttcggcctctggcagcaggccgtcaagcgcatcgccgatgtcgtggtcgcggctctgctgctgattctggcctcgccgctgaccctgatcgtgagcctcctcgtcaagcgccagacgggcgactcacccctcttccgccagaagcgcgtcggcctgggcgggcggctcttcacgctctacaagttccgctcgatgcggagcgacgccgagccctacgccgagagtccccagggcgaggatgacccgcgcatcacccccatcggccgttggctacgccgctacagtctggatgagctgccccagcttgtgaacgtcatcaagggcgacatgagcctcgtcggcccccggcccgagatgccgttcctcgtggagcggtacgagccctggcagcgccgccgcctcgagctgaagcccggcctcaccggcctctggcagatcctcggccgcaaagacctccccctccgcgacaacatcgaatacgacttctactacctcaccaaccggtcgctcctcctcgacctggtcatcgtgctgaagacaatcggggtggtcctgagggggaggggggcgtactgaagggcagggcgctctcgttccgctggcgggctctcgtgcgcgagccaggagcgctgcctcgcctcgctgccgcgtcctgaggtcccggcaacatggaggagcccagacgcaggccggcctccagatcgcaaacaagcccactggcagtgaccgacgcctggcgacgaaccaaggaggggagtgtccgtgaacctacaagacatgatgcaggccatggcggcgaagatgcgtgcggacttcgagcacctatcgagccagttccagcacaagggcgaacgcggaggctgccgcgaggagacggtcagcgagttcctccgccagcacctgccgcagcacctcgatgtggtcagcggggagctgtgcgccagggatggtcagtcctgccactgcgatctgatcgtgatcgaccgcatgaaagtgccccgccttggcattggggacacgagactagtgcctatcgagggcgcctacgccgtcgttgaagtcaagagcgacctcgatagctgcgagttcgggaagtgcttgcgcgactgcgacgcagtgaagggcttaccccgggatgcatacaccgaggtccggtctgacgcggagctcaggttcaacgtcgccgggcgggagctacggaacttccccctcctctatagcgtgttcgcgtatacggccatcaatccggctacgctcgcggaggcagccgccgagcactggaggagggcagagaccccgcggctcatcgactcggtgctctgcttggacaggtgggtgatgtgctgggggcgcactgaagaagacgtaacctgggtagaacccggatggggcccccggttccccgatctcgacctagttgaggcagagaagaacgccctgctgacgttctacctcctgcactacaagtggctgtctcaggcgacctgcgacccaatcgacatgctgcgatactcaggcgtaggctccttcggtccgaccaagtgcctgctgagagccgtccccgtctcggccccgtgcggcgaggggtagggccgcggcggcgctaggcgcttgcccttgcccaggtgccgtgtcgtcctacgctgtccccccgggtacgagtcacactcacgaaccggcggcagtccccggccgcaagaggcctcagtcaagcgggtagcccggttggcccctgatccagacaccgagttcgttgccacctatctggacggtgcgcctctccccgctctccgccttgacgaccagtgtgaaccagtcctcggaatcgaggtggcaagcctcgacgctctcaactaccgtgcccaccaccagcttgcggagatcgtcgagaaacccctcgtactcctcttcggtcatcatcttgcgcccccctggttgggtccacctttcgcgctgcggcgccgcaatcctgcccgcgccgtcgcgtaggtcggtcgctccgcgaccgacggcgccttgtcggtcgcggagcgaccgacctacgcggacagaagcgcctacgagtccggatcgcatccccgttccctcgccttcttgacgcgcgccccgagaatgggtaaggtcaccgaacggcggagcaccggcagcagggctgccagtgccacttcgtgtactggtggtcaacgacatgcgtgtgcttggcattcacaccgactcattccgatggttcgtcaccgagaaggcgctcgaacagccggaggcgactcccgaggagacgcgcacgatcgaggacgagtgcctcgtcttcttcgtcggggtcgagaaggccgacgccggccagtcgccggatgctctggcgaccgcgctcgccgagcacgtccgcgagcgcagcaggatgctcgccatccaccgcgtggtgctctacccgtatgttcacctggtctccgagcccggcccgccgggcaccgcgctcaacatcctccgcgccgcggagaagaagctccagggcggtgacctgaccgtcttccgctcccccttcggctggtacaagggcttcgacctcaaggccaagggccacccgctttccgagtggagcgcgcagctttccgccgatgccgtcaccgagggcaaggcgaaggcggagccggaggtcgctgtcgggaaggacaagttcgagcgctacctcctcgtcgacctcgccgggaagacgtacgacctcacccgcgaaagcctcgaccggtgcgaggtcctctcgcgccccgagccggtctaccagctcctgcggcacttcgtggccaacgagttcgggcgcggggagtcgggcggcgaggagccggcgcacatccagatgatgcgccaccatgagctgatcgactactgcgatgtctccgagaagggccactacaagtggtaccccaagggcgtgctgatgctgcggctgctcctggagtacgcccgccggctcgcgctcgaatggggcgcgcaggagatgcgcaacccgctcgtcatccgcggcgacaacaacgtcgtcggcgagctgatgggcgagttccacgagcgcgactacaaggtggacggcggccgcggcgtctgctacctccggtacgccagcgacccgctcggcttccccttcatgcagaaggtccgcttcagccttcaccaatcgccgctgaagctctacgaggaggcgagttgcttccgcaacgagcaggagggggaggtgagcggcctccgccgcgtgcgcaacttcctcatgaccgacatgcacgccgcctgcgcgaacgaggagcaggcgctggaggagttccgcgtcctcacgctgcgcttcggccggctcatgaacgatgtcatcgcgcacagccgatgggtcctgggctgggaggggacgaccgagttcttcgaccagcaccgcgactacctcatcggcctcggcgccgagatgcaggtgccggcgttcttcaagctcatgcccgagatgacccactactacgcgatgaagaacgagttccagagcatcacccgcgacctcgcgaacatccaggtctccacggttcagtgggacgtgaaggacggcccgcggttcaacatcggcttcgtcgattccgacggcaccttcaagccgtgcccggtcatcctccacgcctccagcttcggcagcatcgagcgcaccatgtgtacgctgcttgagaacatcgccgtggatcaggaccggggcacgccaccgatgttcccgctatggctctcgcccacgcaggtgcgcctggtgccggtcaaggagcactccctcgacctcgccaaccagttcgccgatgtcttcactgcgggccacgtccgcgccgacgtggacgaccggcaggagtcggtctcgcgcaaggtgagagacgccgaggtcgagtgggtgccttacaccatcgtggtcggccagcgggagacgctcgagggcaagctgcagattcgccgccgcgcggagggcgaccaggcggagctgaccgccgctgagctcatcgaccagatccacgccaaggtcggcgacactccctggctcccgctgccgatcccgcggcagctcagccgacggccgaggttctatgggtagcggacggaggacgggggcgaccagcttccggctgcggcaggtgttcgcagcccccatcctggaagaatcgcatggcagtgcggacgcgtctcccggagacccaatgcgtgacctccaaggggaggggagaccgatgcgacgggcagtagccttcctgggaggggcggtggtgttggtcgtgtgcgctgtgtccgtacaggggtgtgggggtgggggcggagcggtgacccacgacgggacgaacgtgcgccgagctctggtcggccctctggcgggccaggtcccgatctgccagacccccacgaccgagaagatcgccttccgaagcgaccggtcgcgcgacgagcagtggcacatctacctcatcgaacccgatgacagcggcctgacccgcagcatccacatcgacggctcgccgtcctggtgggggccgaggtcgaggtcaaggctcactggagcccgccgcctggggccgacggtgcctcctacccgtgcagccccatggcgccggcgaagcccctgcccagacggccgagcttgtggcgctgcgtccgcccccggagcggcagtggtgtgccggctacgtcaccgtggtggtcctcagacggtcgaactcggcccgagcgaggcagagcgtgcgggcggcccattccacaagcgcatctacgctgtggggtgaccactgccagcacgcggggtgttcccctgggtggtcccacccgcccatgcccaggtgcaggccggacagatcgtactcgagtagagcaggcacgcctgagggcggggcctcgccgtaggacgggcccccttctggcgggcactccaggcggacctcgacgacctccaggctagcctctgtgtcgaccgggatcgtggtctcccacactgtccgactgtcgaagtgccagtggggttgcggagctttggcggcgcgcaagtcggccgccacccacccggcgcggaagagaagacgtttcggacgccccgggttgccccagtagaagctccactggaccccatcaagggcgaacacccggcgtccagtccccagccagagctccgaccacccggcccaggcacattcctgcaggtcttccgcctgttccgggaacaacggcatgactggccatgtgcggcctgccctcaccagaggagcgaagtccggaatgtgggggttggtgagcccgaaggtgatcctctggtgctcccccgcgtgctgccagccagcgccctcgtgcacgcttgtgtgaaggccgagtagtccctcgacggccttgcagaggcgccggtgaagacctctgatgacgcccgcctctgcagtcagagccatcgggtgccccgttagacgtcggtcaacaccgcgactgccttcgcgggaaggccgtacgccaccagcgatggtccgttcaggtcagagaagtcggacatgtcgcccgcgtgtatccgtcggcccagcagttcgagctcctgcacaaaatcgctcgggaaccgaaggtcgtcggaaaggtccggcaggaaagcttcgtctacgaacttctttgtgagctcgaactgcccaccctgtactcgggggcagaagcaggataggatcgactcgaagaccgggctgtttaggatggcgaggtaggcccacggaagcctcgacgcgtggaaagtccggcgcccgcgccccctccagaaccaagcgaagccctggacaactgcgaacgcgccctcgcagtcgtacgcgaaactgccctgccgaccgaaggccttgctgaccagcttggggcatggcacgcgttgccattccctttcccgcgtaagccgccaccacttctgggggtcaactccgcggcgggccgctaggtacgcccgcgctggcaacaaccggtcacggtagtacgtggggacgtgaagcgggagatcatcctccgtggcaatctcgctggcaccgtaggggtagaaaacgaactccgtctgttcaatgcgtccgtcaatgattgtggagctaccagcggccgggcggaagagatggcgttcagactcgggaaggcggtcgtactcatgctgcgtgagtaggaacacccgcctcctcccggttctggctccctgccggaccccgaagaggtgccggacgcgggtgacgcccgcggccccaagctcggcgaccaggcggcgctgtcgttccggccatggcagccagcttgccgggcgggtgccgcttgccggggtctcgtacagctcccaagcaggcgtcacgtcgccatccccggtcggcagcggctgcctgagaccacgaagtgcagcgtcctctgacccttcccgggcgaccaggaaacgaaccggctcagttaccgcgccaccagccgcgggcctccgcaagaccacgaaactgggctcgaccacggacccgcggaagaagccataccccctgaaacgcccgaccaggcgcagggaggcctggtcaaggagagcctcccgccactttcgcccagccttgctctcaagcacagcagcagggagtaccgcccccagtgcggcccccggcctgagcgcctggactgcgcgccacacgaacgccatcgccttgtcagcgcggcccgtccgcagcgggccaagtacctcgaccaccccctcccggtcctggccgtgcagatcctcccacgaggcgaatggggggttcatcagtaccacatcaggtgcgccccagtcggccccgagcgcatcgcacttctcgatccgaaggctgacactcatgcctttgtcttcggcgtcgcgcttcgctcgcgtaaggcagaaccgagcgatagcgcaggacagcggcgaggtgtcgaacccgcgaaccgtcactgttccccgaaacgccctcgcctccagctcccgcagcgcttcctgcaggaaaaccccggacccgcaggccgggtccagaacgtccaccacggtccgggccgctatgggcggagtacatgagtcgaaggcctgctcgaccaacgcgcgggctagggctgtgcgtgtgaagcgcacgtcgcgaggcggtcggccgcgcggcctcgcgctgccacccagcccgggcaaggcacgatcctcgtcttggccaatgacgaggtgagcctcctggtacagctcaccagccgcatgccgcaagaggaggtccggctcgaggtgcaggtcaccgcctgggtcgggctgcaggaagtccgcgagtgtgggtcctatcatggagcccaggacgtcacggctgacgtccccgacctcggtcccctcgaggtcgcccgagtcgatctccttgagtgcgtcgcggaccgtacgcgcacggagccactccccttggccaacggcccccaacctcaccaactcggtcccaacgaggaaggcgttgaagatgcggatcgcgtccagagcctgatgcgacccaagggaggcccgcagtcgccggaacgccctcagcatgtggacgaccacgtccggcgcgtgcggttgtggggccgacgcaagatgtgcaagcagccgttcggcagcgttgcgggaacctgggagcgagacgcgctcaacccggctccacgaatcccacctccgcaggatcaactcgtcacgatcgagcaggaggacatggcgcaggttcgcggaccaggaccatgagcgcggctcgtcccccccatacgggcgatggtcgtcgtccattgagcacagcgcgaagctggacgaggggccgtcaaggaagactgcacaatcgcgacgcacgttctgtgtacgcctcgcggccccaaacaacggaacccgcaccaacccgacatccgacgcccaggccaacggctccccgcactggccgctacggatctccatgtcgagcatagggtctcacccttgcacaggtgcagatgatgggccgacgacgagggcgcccgcgggcggcctctgcgcaagcacagcctgcctcagccgccgtgcgctgctgatactacaggcaaggagtagcggagtcaaccgccggttcaagggcgaggctgctggcccacccaccaccctcgtcggggccgcctctcctacaccttaccgaaagtgccgttccacctccgacgcgtacctcctcccgaccgctccccggttctccgtcagccagtcgctcaggcgtgtaggggccgtagggggcccgctcgacacgagcaggtccgccatcagcccgagcacctcgtcccaggtgatgagcacgtcgcggaccagctggctgatgggaagcgacagccagtagaacagcctgggcgggaggtgcaccaacagcgggcggcggccgatggcggccgcgatgaggcgtaccagatcgctgtacgtgtaggcctcggggccgaccgcgtcgagcaccacgttcgcttgccggtggctgtgctcgacagcgaggtcggcgaggtcgtccacgtggatcggctgcaaccggtactcgcccgagcccgggatggcgaacacgggcaggcgccggagcgtccacgcgatgttgttgatcaggatgtcctcgcccccgaagagcaccgccggacgcaggatggcatagctgaggcccgagccgacgatctcgtcctcgacctggcccttcccccggaagtagccgaacggcgagtcgtgggaggggttggtgatgctgacatggacgatccggcgcacgcccgcctggacggcggcccggatcagtgtccgcgtgttctcaaccgccttctcgtacgtcatgccgccacgcgggaagcgaatccagtaggtgttgtagaggacctcgacgccgcgcaggctctccgtgagcttgtccgcctggtcgaagtggaacggtgcggcgcgcaccagctccccaaagggagtcggtcggtccgggtgaccggtcagcgtcaggacgcgttcgcccatcctgagcagccgctcagccatgcgccggccgctgtagcccgcgacaccggttaccgcgttcagccgtccactgggctcgcctgccattcctggccgctcccctctatccgtggcgccgtgcagcaggcacgagcacccgtgccgtgggtgccgccagatgctctaggcatctgagggtcccggcgtccatccgatttcctggttccagcgatccgccttctgcatgatcccccagatgcacggcgccttcgcgttcgtgtaacctaggcggtcctcgccgtaatgggcggccaacccgcgcttgaccgcggcatagtgcgcggcatcctcgtcgtgcgtgcgcagatagtcccgaaacagcagcgcgaactgctcccgccaactgcccgcccggcacacgtggatgtgtgtccgccgttcccccggcttctcgcggaagtagcgcttgctcaggtcggggttctccgcccgatggacgaaccccagttccatcagcgggctacggtatgcctcggtcgggtcgaacgcggcaaccgagatctggacgtcgatgatcggcttggcgtccaggccagggatcgaggtcgatccgatgtggtcaatgcggagagctgccgaaccgagtgtcctccggatggcctgtccgacctcggcgaagaggaacggccattgcgcgtcgtatggaacgatgacgatgccctctgccatcggtgaacaccgccgctgccgttggtgtcgagagcaggcgaccggcagccgccggggtcggccccccaccggttgcctgaggtcgacggtcagcgcttgccagtctcgaagtcccggcggacctcatccgcgctcagcgcccgctggtagatgcgcacctcgtcgatctgcgcccgggtctggaactccgggccgatgtcggagtactgcccgatccgcagctcgccgccccacagggtgaggtcgattgggccgatctcgaggctccccgtctcctgcccatccaggtaggaccggctgacccggccgtcgtaggtgcaagcaagatggtgccagcttccgagcggcggcggcggcctggtgtcgaggatcttctggacgggcaggtagaaacggacaccacctccgaagagctgcagccagtagcccggcccgtcccagtggccgaaggagaggaccaccgggatggcctcgatgcgctcgacgttcacccacagctcgaagctcagcggcccgctgacctgtagcagctcctggttggggtaagcgatccagccgccctcgcgcgtatcgagcacgccatcgtggatcgtcgccttgccgttcagcgtgccgacctggcctgtgtcagccgtggcgctgtcgaagctcgtctggaacaccggctcgtggggcagggggagcgccgccgccacgacctccgccgacggtgcgccgagcctcccggcacggtcgacggcgcgcacggtgaaccgacgccggttcgtgtccgccagcccgccgaccacgaactgagtccccttcacagccgcctcgccgctgacgcgcttctcgccggcggcatcggccatggacaccgcatagcccgcgaccggctcggcgagcggctgccacgtgagcgtaacccggccgaggcccggcgtcgctgcgatgcccggcggcgccgcgggcagcgggaagtcgccggcggtgagcgtcgcgctgcgcgccgcggcgctcctctgcccggcatcgtccaccgcgatgacagcgtactcgtagctcgcgctcggcttgatcgtgatgtcgtcgtacacgctccacggccactcggcgaggagcgtgtccttaccgggtgtgaaggccggcttaccggagcgatgcagttcgtatgttgcggccttgtctactggtgaccacgtgaccctcgcgtggaacgggccggcgatctccgccgccaccgagcgcggcgccgcgggcgcgttcgagggggcgagccgcgccgccatcccggtcccggtgtgcccggaggcatccgttgcccggcaggtcgcggccagctccgggcgaccggcgacttgcggttcgagcgggaaggtgacgaagtggtacgtggagtcgccgggcacgaccgcctcccccatccgcacctccgccctcaccgcatcgtactccgtcgccgagagcacggtcgcgcggagcacgcctccctcgccgccccacggcgcgagcgacacatctcggtggaggtatggcccatacacagccgggccgtggtaggggagcgcgctggccgtgtacgggtggaattcggcgttgaccggccagcaggcgccagtcttgctcgcgtcgccggcctcgacgtagtactcgattccgtcgggcccgacgaactcgggggggatctccgccgcgaacagcgaccgcccctgtggctgcatcagccgttgcttccacggaccggccggcctccggtagcacagcgccactcgggccaccggctgcccactcacgacgaccgcgcggatcgggtaggccacgccctctggcagcgcggacgggtggtgtctcgccgcaacctccagaaggaccgtggcctccggcggcacagcgctcttgcggtccaacaccccgcacgctctctcccacagcccgacgaaggcggcataggccttgatgttgatcgtcgccagattgccgaagtcgccctggctcgtgagtcgcagcttgtagttccgcatggcgaggccgagcgggctctccgtcatcttcgcgaccgcctcctcggccaggcgatgcgctgcgtcagcctcgccgcgctgccgggaggcctccgcgtcggccacgagctttgcgatcggcccgtccggggcgagttccagagcggcctcgtcgtagttgagcacccagtcgagggtgccgaccaggtagcgggcgcgatccgcgtagccctcgacgatgggcgctgggaagccgaagccgagcagtgtcgaccggatcccgcggagggcctgcaggttgtccggcttcggccgcctcgcatcggagaaccactcgaagcctccgcactccacctgccccggcccgccggtccagcgcgggccgagggcttcgagctgcatgagaatctgggccatctcctccgcgtgctgctcgccgaagcacttccgcgcgaaggtccggtagaagtcctcgtagctgaggtcggggttccaggcgaattgggcgcagtaggcggcgacctcctcgaccccgcgcgtctcccagtggatgccgagcagcccctgggagcccttcgcctgcgcatcgcggacgagcgcggtgaacggcttcacattgcactggggcccccactggtcgcgacgggtgccgccaccgtctgactggaaccacgggatcggccacttctcgcgctcgggcgacagctttccgtaagcctcgctcacgtggggctgggcggtggggtcgatgttgtcgagggcggagaagatgatgtccttcgggagcacctggtcgaggccgacgtagaagtcgctgaaccgcatccacgcatccccgccccagccgctcacgatcaccttgatgtccggccgcagccgcttcacgacgccatgcgcgaactgggcccaggccgccagccgggcggcttcgtgaatgcggttctcgttgccgaggtactcgaagacaggccgcatccgctgcacgatgaggtcgagcggcgtgtcggcggcattcgggttcgagcccccgcccaggccctccgactgccagaaccacacgtagtcgagcatcgggtaggtcgccagcatgtggcggatgcgggcttcctcctggcggcgctgttcggggtcggtcggatcgccgaccaactcaaaccccaggcagaccttcacgccccgccatttcgcgtactgcaacccctgcgcgagcacgcactgcgctcggatgatggcgtcgtcctggagggtgcgatgggggaagacggcgccctccggagagggctgcgccggttcggtcgccagagcgaccgaccgcgacccgaacacctcgtacgggaagtaccgccccgtgccgaagccgaagtcgtccgtcttcaggtgccgcagcgggccccacccgtacgtcatcgaggtggccgcgggtgcgcccatgcgccactgtccctggtaggggtacgcgcagaatggctcactgtcgtaggagtggaagccgacgaagttgtccttcatcttcgccatctggtcgaagaaaacctggtaatcctcgaggtcccacgtggtcggcgagttcaggaagttgtaccagggcagactgccgcggacccggaagacgggtgctcgggtctcgttgaggtcgccggggatcaggagcttctcgcaccgctcgggcaaagcatcgccaccgaggtagaaccccacaccgagcttctccaggagcgagtacgtcgcatattgcactccaataggagtgtacccgctgaccagcatccgcggtggggccgtgctgaccacgcgtaggatgtaggtctggtcgccatcggcctccggggatcgtgtttcacgtgaaacaccaaccacgacggccggaccggcgtctgccgaggacaagacgggcgatcgtctgccgcagatgagcctgaagtaccgcgacagctcccgcgccgcgaagacctccgtgtcggtggccttctcgccaaccaggatgtgggcgccggcgaggtcgacctccgccgccggcgacacggtcgccgccaggatcaactgaagggctagcatgatggtcctccgcgagagcataggctggttgcgcacgacgctgccaactgggaccgcgagcatccttgctcgcacgccattgacgtcgagaggatgcgagcaaggatccttgctcgcagggcgttgacgtcaacaacaggcgagcaaggatgctcgcggtcccaggagcacggcaacggccaccaacgcgaactaccacgtcagtccgtacaggttcccatcggtcgctgtggcgacgagcctcggttcgccatctcccccggcgacgcggagaggcgctgcgcccagatcgtacatcgctgcccactcaccggttcgagcgttgagcacgcagacgcggccctcgcgcgacgccgcgcacacgcggccctcggcgcccttcccgaccatgcacaggtcgacgaccggcgtccccaggtctcgtcgccacaggcaccggccatcccccttcagcgcgtacacgttgaaggacagcgagccgacgagggcttcctcggcgccatcgccatcgacatccgcgcaggtgaccgcggtgacctcgtcgccggtgttgaactcccagagcagcttgccgtcgctgctgatggcatggacgttggcgtcggctccgccgaagagcacctcgcgcttgccgtcgccgttgagatcaccgacggccacggcattggcggtcgggccggtgtgggtggagtactgccagcgcgccttgccgtcggcgcctacgaggtgccaccagtagtactccgttccacaggcgacctcatccacaccgtcgccatcgacgtcgcccgctgcgcctgcggtgctcccgtggacgctctcgtagtgccacagttcccggccgtcggcggcaagggcgtagtaccgccagctgtccgcgccgacgaccaccgccggcttcccgtcgccgaagtgcgcgccgagaacgacacgcacgtggggcgggcgcttgtagtagggcacgtcgaagtgccacagctcggtaccgtcgggacggagggccgtcacgcgtccacccatggagccggcgatcaccgccagcccctggtcgatgatgtgcgctgccgccaccgcgttgaccgcgcccccggtgtcgacggaccagcgctgcgtgccgtcccggccgaggagggtgacacttccgttgctgctgccggcgatgatctcctcagcgccgtcggcatcgacgtccgccacggccactgcctggaactggtgcacgggcacgccgctcgccagcgcagccttcgggtcggcctccaacccctcccggttgccccacacctcgagctcagcgaggtagatgcctgcggcgatggggggctcgggcgcgccggggtgatcgggcggctggggcagctcgacctgatcgcccacgcgcggcgcaatggtcagccgcagctccctgacctgccccttcagccctttgggagcataggtgtgcggcccataggtgggatcaccccagttcccgtgcgactcggtgtccgtcacctcgcccagcacccggacatcgttcgcgaacccgtcgttcgacccctcgacgcggaccgagcggacctggtacaccatgcgcttgctcgacgaggtcgcgtaccatgccttcacgttcacggcggagatgtcgtatggctgatcgagcttcacgcgcagcgttaccgtctgccccttgtcccacatcaccccgccgtcagtagtgaggagctgcccatccgtcaggcccgcgaggtcgttgtgctcctgctcgttcgggctgaacacgttgcgggccaagggctgcggatcgcaggtggtctcgagcttcgtgtcgaccgcctcgaaggcgccgcggtttccggtcagcaggtacgccggcagcttctcccggtagctgaacagcttcctcagagccggcaggccctcgggcaccggcgatcccggctgcccggcctgcggcgcctgagctgcctgctgcagcatgagccacacatagtcctgcaccacgttcgcctcggcaggcaagtcgatctgcgtctcgccggcgggcacgggtgtctcgccaagctcggggacggtcatcagggtcgggcgctcggcgcggatggtcgcccggtgggtggtcaggtcgatctcgatgtccaccggttcggttgcgctggccgtctgtccagcgtagctgagcgaacggaggccgaaggcggcgaggaactccggcgtggcgatgaacgcatccgcgcggatcgacgccccgaacagcgtggcttcggattcgggcgagcccacgccgatgagcacccgaatgccatcgaggtcggcgtagatggagccctctcccggcgaggaggccgcgacgctcggctccttctccccggtggcccgcagcacggtgaagagcgttcgcttctggccggcctccaggtcggcgtcgtaaacttgctgcaagacgcgcacgaccggttcgtcggcgtactggtagccggaccagttcgctccctgggcgcggtcatccgagagcagcgcccgcccggtcggcggagagatgatggccgcgtgccgcccggcctgcgtcacgagcactccattgggcgcgggcttcaccgtgccgatcgtctgccagatgggccggaagctgaatgaggccttctcgcgcgccaccatctcgtcggcgaccacgaaggctgtgcccttcagccagatgatgctccggtgccagtcggcgccggcgtagtccgacagcttggtcttcgagaagcccgcgtgcggcaactcgccggcccgctccagctcacaccagtcggggatggtctgcgactggccgtcgcggatgatcagcactccgttgtggtacttcggcagggacttgatgtagtcggcgtcagcgagccagatgcgcccatcctccgtccagcgcgagatcgactgcccatcgtagtgccgatgaccgccgttgctcagtccatcgaagagcagatactggtcctccgggtcgaacccgctccgcatgacgaccttgtcgaccgtcttctcaagtggaggcgccttctccccgcccaggctgcggtagtactcgggatcgacggggaaggcctgcacgccgagcaacctcgtgggcggctcgccctcgccggtcttcgcgtactcgcccagggccactcgccccggcacgccgatcttcttggcgatggcccactggtagcccgggtcgccgtagaaccaggccgctgcctgcagcaccggaagctcggaccaccagccggtgaaggcgcccgtgtcgccgtaggtcacctggtagccaaggttgtccatgcccaggatcgcgtagtcggcgccctttcgcgcgtttccgttctcgaagtaggtgaggtcgggccttgccagcgcataccggaccaggtggtcgagcgtcagccattggtagccgttgcagtcctcgtggggcttccacgccttggcctgtacctggaagcacgcgtccgcgatctcgagccactgctgcgcctcggcggagttgtagtacctggagaagtactcccccgcgaagagcagaccgagtgccgcgtgggtggcgtggttgtggcggacgtggtcgttccccagcacctcgatggcgtggttgacgcactccccggaggtgaactcgaagaggatcttcgcgaccgcgagccggtcatcgtctgtcaccgcgggcgactcctcgatcgcgtcccacgcgggcacgagccggtagagggtgaagtccgcgtccatgccccacgggccgccgaacgtgtcgggctctgagtcgtggaactccttccaccggcgcatgacggcgacgaaggccttcgcgtagtcgtcgcgaccggtgagggcatactgctcgccgatgcctgccgcgtggctgccgagccccgtgtgggagcccgactgcaacagctcctcggaccggtcgcgcatctgcttgaggtaggcttcgcccagctcctgctggaaggtgtagccccagcgggccgtcgcttcggggccaaggtgcaccttcaccatcgggggcacgaccagctcgggatgcgggacgaaggtgccgatgagcgcctccacacccgccgccgctcccgctgcgtccgtggcgccgatcaccagcacgttcttccccgtagcccacggatcgtgcacggtgcgcagctcgtacccgccctccccggggaagacgccgtcggcgaagcaccgcatgtgcgagtagagcgggaggattgcgcggttgttgtggacgttgccgaggaggatcacgttgctcgccgacatctcggcgatggcggcccggaggtcctgccgcgctgcggcgtcggtgcgcacttcgagcgtcgcgcccgaggcagcgcgcacaccgtcgacgagcttctgcaccgcggcgtcgtaggcggggtcctcgggacggacgaccaacgccagaggtctgccgtcttccgcgagcttcgtcagcgggtagaggggcttcggcgtcttcacctcgtcgaacctccggaaccgctcggggacgatggcgaggtcgtccaggaagaggtcgtactcggcattgtcctggccggtgccgatgatgaactcgagcctggtcaccgggcgcccttcggccgtcaccatgctcggctcccacccgagaccgttcatgctgatccccggttggagcccaaaggagtgcgtcaggttcgtcccgagaatgccgctccagctcagccaactcaccacgcactggccgtccttatcgtatgccctcacatacagggctctcgtggcctcggggagcgaggtccacgcgctgaaggtgagcatccggccggtcaggtcgacctcgggcacgggcacctcgatggcgaggtagcggttgttgcggccatctcccgtcctgcccgacagcctcaccgacgcctggccctcgctgacatgggctgggtcctggttgagcgagagggcaatgttcccagtgctctggccccagccggtggtgaggccctcggtgctctcgaagccgaagcgccagacggcttgatcctgggcggaggtcccggggagggcgaaggccgcgagaagagagcaggcagtcaggtatcggtgcggcctcatgtcgtcctcccttgtcgtcagcggacaacacggctaccacaggatcggcatgaccgcccgcgcggtcaccagcgggttcacgatctgcgagatgcgcacgtcgccgacgagactgatcagcatccgcgcctcagccgcgctcatccgcatccggtcagcaaccacgtctaccatctcgccgagcgcctccccgatgcactcttcgaaggtcggggcggaggcgatgagcgtcaggcgaccatccaccacgatgtatggattcggcgtcgggagaggctgccgctcgatgtcaagccgcagcagcacctccgccggaatctcaagcccctggccggcgacctcgccatcgccctggcaagcgtgcacgtcgcccaggccgacgagcgcgcccgcgacctgagcccgcaggaacagctgcgccccgggcttcacgtcgaccgtgtccatgttcccgccgtgcgtgccggggaaggtcgtcttcaccggtgcttccgccggcgccacgccgatcacgccgatcatgggccggatggggagcctcacctcctcgctgaacagggcaaagccgttggcgagcccgatgaaccggtactggccctccgagctgacgaagccccgctcggccggctcgatggacgcgatcgtgacacgcacgacatcccccggttgcgccttgcggagggcgatgggaccggtcgtcgggttggccagccctggcgtgatgtcctcgcgtcgcttccccggcgccatctcgccgccgaagcagtcccaggtctcgaccaggacccactcaccctcatccacctcgcacaccggcgccaggtccggggagaattccgtgaaggtgtgatcgcgggacacgcggttcatggggcgccctcctggcatgcgcacgggttctctctgtcgccccggtgttcctctcaggccaggcaggaggcagctcgctgaccggcgaaggcctcggcggcgaacgcagaaggtggaggtgttgaccgtgtactcgcacatactcgtgccgctcgacacgtcggaactcgccgagcaggccctgccccatgccgaggccctcgcccgctgcttccaggccgagctccacctgctgactgtcgtccacacgccgcacgacgacctgtcagagggtgagccggacgaccagttcgacccgcgcacgctcgaggctcaggagtacctccagggcctggccgggcggctgagcgaggatggtgtgccgacgagcgtgaccgtccgccagggcgacgtggcggaggagatcatcgcccaagccgccgaggacccctgcgacctgattgtcatgtgcacccatggccgctcggggctgggccgatgggtctacggcagcatcgccgaccggctgctccggtactcgcccctgccgacgttgctggtgagggcgtcgaaggcctgaggcccgtgaggtgatgaccgatggagattcccgcgcgcttcatccgctattgtccgacgcaccgaggcgtggccagcgatgacggctggctcgagatcgacatccgggcactggacctggacggcgtgacgaagctctacgtgaacctctccgacgtcgccaagatccggggtaagcgcgacgaggcggccaagctgctggatgcctgggacgcagcgttccagaagaaggacgacgcggggaaggagcccgccgaatgagcctgctcgggatcgacatcggcagcgcgggcaccaaggccgtcgcctttacccccgacggccgacagctcgcctccgcctaccgcgagtatcaggaaatctacccgggcccgaacatgatcgagctcgagccgccgctcgtatggaacgcggtgcaggaggtcgtccgcgaggtcgccgccgccacggccgccgacccgattgagaccctctgcgtctccgccatcggcgaggcctttacggcgtgcacgaaggacggcggcttcgtcgccaacaccatcacctcgatggacaaccgctcggtcgccgaagcggagagctggcgggagaccctgggcaccgaggaggtcttccgcatcaccggcatgccgctccactccagcttcacgctcaacaagatcatgtggctcaagcggcaccgcccggaggtccacgagcgcacctggaagtacctcctctggccggacatcgtgatgctgaagctggggattgcgccgcgtctggactacaccctcgccgggcgcacgatggccttcgacatcgtgaacaagcggtggtcggacgtgatgctgagtcacgccggcatctcgcccggcatgttcgcggagccgattcagtcgggagaggtcgtgggggagatccccgcctccgcggccaccgacctcggcctgccgctcggggtgctcgtccttgccgggggccatgaccagcagatgaacgcccttggggcgggcatcgtgcgccagggcctggcggtcgacggcatgggcacgaccgagtgcatcagcgtggccttcgacgagccggtgctcaccccggagatgctggagtacaactactgctgctatccgcatgtgaagcgcgacatgtacgccgccatcgccttcacctactccgccggcagcgtgctccgctggttccgcgaccagttcggcgcggtcgaggcggccgaggccgctcgcacggggcgcgatgtgtacgaggtgctcctggagggcctgcccgacggcccgaccggcacctacctcatcccctacttcgtcggcaccggaacgccctacctcgatccgctcgccaagggcgccctcctcgggctgaccctgagctgcgaccggaagacaatcaccaaggcgatcctggaggggatgtgctacgagctgaacctgaacgtcacgtcgctcgcgcgggccggcgtgggcatcgactgcctccgcgccaccgggggcggctcgaagagccctgtgtggctacaggtcaaggccgacgtgaccgggaagcgcatcgtgaccctcaatgtgaccgagaccggctgcctcgcgggggccatcctcggcgcggtcgcgaaggggtactacgcctccatcgacgaggcctgcgctgccctcgtccaggagcgctcctccttcgacccgcaagagccgaaccacacgaagtaccaggagcactacgaggtctacagggagatctggccggcgattagcggagtgatgcaccggctctcatgacggccgtccgggctgctggagctgagagggagcacgcgggcaatgaacgtgcgcctacacccgcacgctcgtgagcgggcggaggaacgcggcgcgacggtagaggaagtcatcgccacggtcgaaggcggtgagcagttccccgccaagctcgggcgcgtgggctttcggcgcaacttcgtcttcggcggtcggtggcgcgaccgcgagtatggtacgaaacagatcgagacctacgccgtcgaagaggctggctggttggtgatcaccgtcattgtgcggtacttctgagagggggaggctgcccatgaagctaacgtacgacccgcgttacaacatcgcctacctgcgactacgagagaaggctgccgacgtcgagaccctccatatcagcgagtccctaaacgtggatatcggcccggatggcacggtctacggcatcgagctcctcaacgccaatgagcagttgctggacgccgacgagccggccctcgaggtggtcaacgaggctcgtcagcagcgtcgcatgatcccgctggactgaggcaacggcggcagttccaggcggatcgccacgcccgacatcgccgagaccggttgcctcgtggccgccatcctcagcgcggtcgccaaaggccgctagtcatccctcgacgaggcctgcgctgccctcgtccaggagcgctcctccttcgacccgcaagagccgaaccactcgaagtaccaggagcactacgaggtgtataggggaatctggccggcgatcagggaagtgatgcggaggacgcggcaggaggttggcgacctggagtcgaatccaggatgacggactggcgccgccccaacgcgtcgggcctccaaacggcgcggacaagccgggccgcccgggtcgcgcgcgcgacccgagagaggcggtaccggagggagccattgccatgagcgaggaccgcctgaccatcgtggtggccggcagagacggccccgtagccgtcgcgtccttcctgtcggtggttcgtgacgcgctcggcatcctgcaggatgttgacgcgagcatctcgggtcaggcaggcgtcacgcttgactggcgcatcgtcgacgccagcatgggcagccctctgagtctgacgattgaggctggggccgcttcggagcccagcattgcgcctcaggtgatcctcgcgtgcattgatgggctccgcgcgctggacgcgggtggcggtcaggctccgcgctacttccgagagggatccctgaggggtgccaagagcctcgtcgccactctcaataacgacgttgagaggatcagcctgatcgccccgtggggcgaccaggtctccccttcgcaacatgtggcagccaatgtggaccagctcctgccgaaggcgcacgaggagctcggcagcttcaccgggcggctagaaacgctgtccaagcacggcaggccctacttcgccatctgggacgacctgagaggacaacggatcgagtgcgtgatcccgcccgagaagctgggggaagcgcacgacgccttcgaccacagggtcgccgtgtttggcaatgtgcgctactccggcgctgacaggcctgtgagcatcaaggtgcagcagattcggcccctcaaggaccagagcgaactgccgcaggcgggggatctagagggcatcaacataaccgatggcgtcgacccgacggagtacgtgcggaggctgcgcgatgccggatgacggactcgtctactgggacagcgacgtgttcatccacaggctcgagggcacgcccgacaagatcgacatcctgaggcacatcactgaccgcgcggagcagggggagttgaggatcgcgacgtcggccttcgcgctgtgcgaggtggcgaagctcgagggtcttccgctacctgacgagcaggaacggatgattgtggagttcttcgataatccgtacatcgtggtggtgcaagtcgaccgcttcgttgctctgaagtcccgggacatcacgcgacgcttcgggctgaaggggaaagacgccgtgcacgtggcctcggccttgcttgcccccgcctccgtgatgcacacttacgatgagagccacatcctgaagctgaacggcctggtcggcgatcccccgctccgcatagagagacccggctggaaggcagggcagccgccgcttcctcgactcgaagtgccaggagcaccatgaggtgcacggagcgatctggccggcgatccgagaggtcgtggacccgccgagacggcagggaaccaggaacaggcaatgacggcggcggccggtcgctgacgccctccgggagcgcgggcgccctcgcccgcaacggcctgcaggcgaggggtcgccggtcagaaccgcccgtaccacaggtcgaggatcgcgtgggagaaccccgggtaggcttgcccgggcgtgcggatctccaggctcacgccgatgccctcgtacgtcacgccctggtcgtcccgttgggtgtagtaggcgtcgagcactgcgtccggaggccacgtcccccgcgcgatgatgtcggcgaagcagggcttgatgacctggtcgatgtacgcttgcgcctctggcccgtgttccacatgggcctcgtaggacacgatgcccttgtgtatggcgcgcttgacgttcccctctgtgagcagggggaggtactcctgcttgccgtctgcgacgagctgcgcgcgcagacgctcaagctcgtcccccaaggtcttcgggtcgagagccgcccggagcttcggccagcttgggaagccctgctcccgggcgaccaccagctgggcatcggcgagtcgggcctccgcgcttgggcccttcggatggtgagcggcgaagcgcgcggttgcgtccgcgtcgccctgcctgagggacctcaacaggtccttggcttgcttgcgcaggttcgtgaggcggccggcataggggtgaagcgacgaaggcatggctatctcctttcaacgccgcctgtcgtccgcttctcaggctgaaagaagattggggtggtcggaggctggtagaggtgggcacggcccttcccgcggactggcagcgccctcgtgcgctgacaccattctacccgctgagcgacgggcacgtcaagcggcgcgtgttgctggtcagcgatgccgttgccgtcattctggctcctgacccctgccgttccggctccggcagtcggaggtgccagatgggcaggtccatcgtctccctcacctccttctgcaggctgccgaggaacccggcccagggcgcgtcctggaagagcgactccggggtgaacggattcgcggcgaagtagatggtctggccctgaccgagctcccgccgcacgatcgccggactgccgtcggggtacctggcgacaacctccgccctctcgactgtgacctcgatcgcgcgcgcggtcggctctgtggcgttctcggtgcgacgagggaagagcgggaggcgcttgtcacccatcagcacgaaccaggcgtccttcgggccggtcgtcctcaccccgaagatgcgctcccgggtggcgctggtgtcggcgccgtcgggggcccgggagaaggcatcgggatcgccgcagatgagcacgccaccggccttcacccactcctccagctcgtccgcgagctccgggtcggcgtaccgggcgaggggcaggtagatgatgcggtagtcggagagctttctcagtgcgcggtggagctgccggtcatccacgatgtcgaaccagcagcccagcttctccccgaggagggcatacgcggtgtagacctcgtcccccgaggcgtacgggccttcggccgcgtgcgcggcgctgcagtagaggatcgcggttctggtttgggtgggcagcttgagcgccggcatttcggagacggtcttcgcgatgtgcagcatcatctcccagagcggcgggtcgctgaaccgcggcgcatcggacgcgtagaagttcagcgacgtcgcgccgcaccgcagcgcctggctgcaccactccagcaggtcgtcgggcgtcatcttgtagcccgcgtagtcgaaggcctgcacgatgatctcgaccggcttcggctcggtgcgcttgctgccgcgcccgaggtcggcgagaagcttggcgccgaacccgtggttgtaaacgccgcgcccgcgggtgcgctcggcgctcgaggcatacgggtcgccctgcagcatgtccgcgtacttggccatgtgcgagtagtcgaagggcatcacaccgcccatcagccagaagtcgcagggcacgtaccaccagtcggggttgatgcgcttcacggcctcgtacttcgcctgcgcggcctgggcgtagcgcccggccatccagcggttgaaggcgatcccgcagagggggtgctcctcgtcccgcgcgcgccactcggggtcggctggggcaggcatgccgaacttgccgaggccgaacttcgcgctcacctcggcgtcgaagccgcgcatcaccggcccggcggtcgagcggaggccggggaacaccggcacggtcggctcatcctgccccacgatcgcccgcacgtagggcttgtcaccgaggagttcgcccagagaccggatctcgtcgaggcaggcctgcacgtaggccgggtccacgggcgagacccgcgggctggccccctcctcgaccgccttggggttcagcacctccgcccccagtttcaccgcccgcgcgatcacgccgctcgactcggcggcggcatcgaacctcagcccgtacctcgtgtgaaccgcgcggatgaactcgtccgttcgccagaagtcctccggctcggagccgccggcgatcccccacggcagcaggaaggcgttcaggtgattcgtccccatctggtcgaaggtgctgcggagttccctctcccagtcggcgtcgctcatggtcttgcggtcggactccggcagcgccgagcgtagcagcgcgtgcccccacatcgtcacctggtacttgcccggcgccgttccgaggagctccttgaagagcggcttgtcggtgcgcgtcctcgtgatgccatcccacgcgcccgcggtcgggtcggcccactcgggcagcttcgtctcgcgaagcgacaggtcgtcgaaccacaccgcgccgccttgcccgctgagggccacctggctctggacggtctccctcgtcgtgacgatgacctcaccgaacccccgccattcgccgggcggcccggcctcgaccatcacctgtcgggtccccgcgctgccgttgcccttgtccttcgcgcagaggctgaggcttaccatggcgccctggcacccggccgagaaccgacagaagccgctcacgcggtacgccctccctccgccgagggcgacgtaggtgtagagcgcggcatcggcgccgggcagccgtgcggcggccttcccagagtgggcgacggcctcgtccatggcgatctcgtcggccttggcaccccagggcttccaaccgcccaccgcctcctcaaagcccgggttgggcacgaggttggggccctcgtcaccgcaggcagcggcgcctacgaaggcaaggctggtgacggcgagcgccaacatgagtcggcgtcgtgtctggatcaagggggtccctccagagaggtcgggagccagaagcccgaagagcggcaagggccctccgcctctgccgttctgctgcattctgactcctggctcctgactcctgcccttctacccccccgcgaaccggaaccacacccgacacagcagctcggccaggatgagccctcccgcgaagctcaggtacaggcgccagccctgagcctgtgtcgcgcgacggtagccgaagaacatgagggccacagccagggcggtcaggaggagcgcgaagatcgcggggaggatcaggggctgggcaagcatcccgggcttcttcagcagcttgtcgccgtgctcgccgacggtctgcgtgatcgtgtgtccgagggtggtccgaccgacgaggagggcgaccagggccatgggaagctggctggcggcgaccggggcggcgaggtggctgagaggggggcgggagcctaccagggcactggctgcgaagagcgcgaacgctccgagcgccagcgcggcgagcacgtccgcgaccaccagcgtgacggcgggcttcgggtgcgccaatgctaccgtgatggggccggtgacccggacgccctggagagcgccgacgaccgccagcgccagcgggccgatggcagcacggatccagtcgcgacgcgatagctgggccccgccctcaggcttcggcatcgggcgtcgtccctggagcactgggcttggcgatcacggggagtcgcagggtgatcgtggtgccctcgttgagccgcgagtcgacctcgatggtgcccccgtgctcgtcctcgacgatacgcttgcaggagaagagcccgagcccggtgccgccctccttggtggtgaacaggggctcgaacaggtggggcaacacgtcgctggggatgccgggaccgttgtccacgaaactgatggccacctcgccctcgtcctcctcggtgcgcaccgtgacccgcccctgcttctcaggcgcggcctggatggcgttgagggcgaggttgaggaagacgcggtcgagctcgctggcatcacctaccacagccggcaggtcgggcgcgaactcgcggctgatggtgacccctcggtggttggcctccgtctgcaggaatctcagcgtctcgtccaggacctcgtccacctgcacgcgttcctgctgcacgcgggttggtgtggagaaggagagcagccggcggatcagcgccgtcagtcgcgccagctgccgctcggtagactccgccaactccgcatcgggggaactggtccgcagaaggagcctcaccagcggcaccagcggcgtgaccacattacccatgtcgtgggcgaggctggcggagagcgccccgatggtcgtgagccgctcagtgcggagaagctgctcctgcgcggcccgtaggtcgtcgtacgcctggcggaggtcggtgtagaggcgggcgctctcgatggccaccgccgcctggctcgccagcccggtcaccatctcgaggtcgtcctcggagaacaccgtcgagcggctggtcgtgtccaggtacaggacgcccaggtcgcggtcggcgcggtagatcggcacgcacatcgccgaccgtatctggagacccacgacactctccacatcctggaaccgctggtcgtgcatggcgtcactggtgaggaccgcgatccgctcggagcgggccttgtcaacgatgtggcggctgatctggatggccgcgtggtcacccgtctcgggctgtcgtgcaacccgaggggtcgcctgccccgtctccgggtcgatgagcagcaggaacgcgcgctcggccttcaccacctgcatgacgctgtcgaccagcgtgttgaggacggtctggaggtccaggctcgcgcccagagccaggccaacctgctcgaaggcgcgcagacgacggcgcagctcgtcgatgctctcggcctcggtcgggccgcccgggccgacggagtacacaatcgcctcggcctcctcgtcggccttctgctcgtcgaccagcacgacctggtcgctcacgtcgggcatgtacggcgcctcgacgggcacgcggtcgagctgcagccatgtccgccccagccggaactgcgccctgacggggagcacagcgggcgcgtagatgcgcgtctgcccgacccaggtgccgttgccgctgttccggtcctccaggacgacaccctccggcagcagacgaatctgcgcgtgccagcgtgagatgagcgggtccatcggcaggcagatgtcgttcgccgcgttccgcccgatcgccatcgactcccgatcgagcgcgaacgtgtagcccgccatgtccccggtaacgaccgtcaggatgtgctcgcccggcttcgccatagcccaaccctccggcctcaacgcctggtcagagcaggtaccgcctcgccccggatgatttcccttccgagggccccccctcctgcccggctagacgtacatcgacatccagtcgccgcgacggaacttccacatcgtcgcggtcgcctgcagcatctgggccaggagcaccgatccccacacggcgaccggcccgtacccgaacttgagcacgaggagcgcacccgcgcccatccccacgaggagctggtagtacaccgtgtaccgcagcggcgacatggtgtcgccgccggcccgcagcgctccggagagcgccatgttgactgcccagcccggctcgccgagggccaggatccggagggcgagggtgccgtaggccaccgcctcggcagtcacatcccgccccacgatgcccaccaagtgcggcgcgagcagcacatacaggcagactggcagcacctcggcccacaccgcgagtcgcacgaccgcccaacctcccgcggtggcgcgatcaggccgcccggcgcccatgttctgcccgacgacggtcatccccgccgagatcgccgagaagccgatgaacccggtgatcatcagaatctgcccggcgatagcgctgccagagatgatcggcgtcgctgcgggaaggctggtcaggattcgcagcagaatccagttggatacggctcggacgaggccctggagcccagacggcacgccgatccgcaggatgcgcgcccagaggccgaagtcgggtcggaggtggttccgccagtgtacggtcagggcaaagcgcccggacgagaggatgacgagcgccgcgagggcggcgatcgagcgcgcgcagagcgtgcccaaggcagagccggtgacgcccagtctggggagcccgaggtgaccgaagatgaaggtccagttcaggaagacgttgaggaggttgatgaacacgttcacgatgagcggggtgcggctgtcaccggccccctgcatgaccgcgccaaagacgaagttcgtcatcatcgccggcgcggccacgaagagcagcttcaggaacggctcgccgaccgcggcgacctccggcgccgcgcccgtcgcgtggagcagcgggcgggccaggaagtaccccagcggcgacagcgccgcgcaagtggtcagccccatgatccagaaggcctgcccgctgacgcgctcggcgaggggcaggtcgccggccccgaacgcacggctgaccagcacctgcgcgccggtggaggcggccatcatcacgaccatcacgacgaagatgatcgtgccgctcatccccacggccgcgaccgccgtggtggcgccgaccgacagccgacccaccatgaacaggtcggctagctgcacggtcgtctgcagcagcgccccgaccatgatcggccaggtgaggagcaggatgccccgaacaaggctgccctgagtgagatcgacccggtacggctgacggccattgagctcgaccggagacaggggtcgcggttcgggctggtcttcgctcatgcctgatgacgccctggtaggctgcgaacgacgcgctcttcgagggagaacaacgaggtggtcgagtgagcctcatgaccaccgcggcgcgaaggtcacatcggcccgtcccatcgctccgtcacaaaccagtcccgtcgcccaccggtgcgatcgacatagagatcgtagaggcagccgtcatctccgcggacccggtagtacgtccgatggcgtcgctcaagccaggagcgtcgccgcgcagcggggtggaacccatggtcatgccactgggcgacgacctcggccacctcgatgcagcggtcgccgaagtcgaagcgggccgggagagcgaagccccctgcgtccttctcgcaggtgacctccacgcgacgaccgaagaagcggcgcctcatgcgcacaccccctcccatcgacggaccggcccggtggcccgcgcgcgtcagccccgacgtggcggtgccctctcggtccactcggcggcgccgtacttggccgccacgagctcctcggcccacgcttcctcttggggtgtcaggttccgcgccacaagctccacgccgagggtggcctggaagcccaggcagatggccgcggcgacctcgtcgggggtcaccggccgccccaccacctccaccacaccgcacgcagcccgccggagcttctcccagcggctgctgatgtcctcaccacggacaccgggcaagacggcgaggaggtcatcgaggtcgatcgtcagggggatcgacccgtgctggaggatggtgccccgcgatcgcgtctgagcgctacccacgaccttccgaccttctgcgacgaggtcgcaccgggcggccttggcgaagcagatggtcggcaaggactcgcgtcggtccgccttcttcccgccttggccgcccatgatggcctgcacgcccaacagggccaggccggcctcgatgccgcgggagatctcctgataggatgtcatcaagacgtgaccgttgcggatgtccgtctcccggacgaccacactgtaggtgatctcgtcgcggtgcaggatcgcgcggccaccggtgggccgccgaacgaggtcgtaacctcgcgcgcgaatggcctcgaggtcgatgcgctcgtcgagctcctggaatcggcccagagagacggcaggggggcgccaggtgtagaggcgaagcgtggggggtactgcgccgtcagcgcgcgcgcgcaagatggcctcgtcgatggccatgttccgcgcgccgcggcacggctcactcctcaggagacgccacgtagtggcagacgtgtccgacatctagcccaggtcgccgccctcctcctcatcaaaggccgggagttcctcctcctcagcctcctcctcggcctccccctcggcctcctcctcggcctcctcggcctcgtcgatgtgcgcccggtactccgcggccgtgaggaggttgtccgagctgctctcgtcctccatgcggacgacgatcagccagccctcgccgtacggatcctcgttgatcgtctcgggcgcatcgagcacggcctcattccgacgcagaaccgttccgctcactggcgccaggaggtcttccaccgccttcgccgattccacgttgccgaagacctcatctcgctcgacctcaatgccctcgtcgggcagctcggcgaagatgatctcgcccatctcatcggcggcgtactgggtgatcccgatggttacctcgtcgccctcctggcgcacccaggcgtggccttcgtggtaccgaagatcctccggatacatgaacgtccgcctccttacatgctgagtgatgaatggtggatgatgcgtgatgagtggacgtcgcgtcggcgccgtgccctccactcatcactccgcgctcatcactgctctcgtggcgcgcatatgttctggcgtgttgccgcagcagccgccgatcaggcgcaccccgaggtcgagcatctctcgggcgaagtcggcagactcctgcggcgtgcccgcaaaccgcgtctcgccggccaccaggaccgggagccctgcgttcggctcgaccatcaccggacggtcagcgactcgcagcatctcgcggatgccgatgcggatgccctcgagatgcccgcagtttgccccgaccacgtcggcgcccagcgcaatcagcttttcgaccgcccgggcaccgtccacgccgaagctcgtgcgcccgttcggcgatgagaaggatacgcaggcgaagacggggacggtggccccggcctgccgggcgccctcgatcgccgcctccagctcgcgcaggtcctcgaaggtctcgaacagaaggaagtccggcccctcgggcaactggttctcgacctgctcgcgaaacacggcgaccgcctcgtcgcgcgggcagtcgccatacggttcgaggacggcgcctgtcggcccgagattcgccgcgattgggtagcccggcccgacggcctcgcgcagaatgcgcaccgccgcggcctggatgtccctcgtgtgctcgcccagccccgcgcgctccagcatgtgccggttcgcggcgaagctgttgctctggaagacctcggcgccggcggccaggtactcccggtgcgtctccgccacggcctcgggatgcgtcaggttccgctcgccgctgttcttggccgcgagccctcgccgggccagcatcgtgcccatcggcccctcgagtagccgaggccgcccctgaatcagcctcaggatgtcgcggtccggaccaacgggcatgacactggcgcctcctcgcggcgatcatggccccaggccaccgaccgccctccggcgtgccgcccactatatacaaacttcgcggggcctgtcaacacgggttgtggggcgacattccggcccgcaatcccggcccctgcaggggcgcttgtgaccgtggccgaaggggcagacggcgctcaccacgaagacacaaagacacgaggaacggcgcggccacgcagatgatcgatgctctcctggtgggcggcgaagtcgttgacggatcgggtggaccggctcgccgcgtcgacgtagcggtgcaggacggccgcatcacggcgatcgggagcctggggcaggtcaagacgcgcgagcgagtcgagtgctccggccgggtggtcgcgccgggcttcgtcgatccccacgcgcactctgagctcaccctcctcgtcaaccccctcggtgagagcaagctgcaccagggcgtcaccaccgagctgaacgggcagtgcggcctggcgcctttccccgtccgcgcgcgcgaccgggaggcgatgcgaagcgtctgcaccttcatcgacgccccggtcaagtggcagtgggagcagatcgacgagtacctcgacctcctggcgagggcgcgccccgcgtacaacgtcgcgaccctcgttggccagagctcgctccgcgcgtgggtcatggggttcgagaaccggccggcgacggcgggggagatcggcgggatgtgcactctcctcgccgattccctggcgcgaggcgccgtgggtgtttccctgggcctggcctacccccttggttccttctccggcccggaggagcccgctgctctggcagccgtctgcgccgagcacgaggccctggtgacggtccatatgcgcagcgagggcccggggctgatggccgcgctcgacgaagtgctcggcatcgcctcatgcacggggtgccgtctccagatcgcccacctcaagtgcgttggccgcgagcattgggggcgcgcaggcgaggtgctggcgagactcgagcgcgcggcggagggcggggcggatgtcgcctatgatgtctacccctacaccgccggcagccgccacctgtatggatcgctccccgattgggtgctcgacggtggagtgggcgccatggtcgagcggctgaagcaggccgagacgcgggcccggctccgagcctcgctcgaccagtgggctcgaggcgagagcgccgcaggcgggttctcgctgggcttccccaacacgatggtcacctcggcccggaccgaggccaactggtggtgcgtgggcaagcgcctcgatgagatcgcccgcgagcgcgaccaggaccctctcgacgcaacactcgacctgctcatcgaggaggagggcgacgtgagctgcgtcctatgggcgatgagcgaggaggatgtgcgcgagttcctccggcacccgttgggctgcctcggcaccgacgggctcgcctatgccccctatggccctctctcctccggcgccccacaccctcgctgttacgggacctacccgcggttcctcgggcactacgttcgggacgaggggctcctcccgctgcccgaggccatccgcaagtgcaccagcctccctgcctcgcgcctgcgcctgcccgatcgcggcctgctgcgggagggcttccgggccgacatcgtcgtgttcgacccggcggcaatcgccgagcgcggcgactacggtcggccgcacgtctaccccgtgggcctcgactgcgtactggtcaacggccaggtggtcgtgcggcgcggcgagacgacaggccgccgagggggggtcgtggtgaaaggaccgggccggtaggtgcgacaatgccttctgagcaaccgatcctgctcatccctgcccgcgaggactcagagcgcgacgctgttgccgcggcgtgggttgggcggggctggccggtgcagcggctggaccgcttctggcagccgcccgccctcgatcgacgccaggttcgcgtgtacgggaacgagctgttctgcctcacgctggcccagaagctccggttggggctcgtgtcgcccccggacgacctgctcggccgtgtcgacgcctgctggctgaagcgcggtctccgagcagcccgcctcgccgaggcggctcacctgtcctacccgctgttcgtcaagcccgcgacacccaagctcttccgcgccgcagtgtaccccgaccacgctgcactggcggctgagacgcgcgggctcgaaccgatcaccgcgatcatcacagcggagccagtgacctttgccgccgaggcccgctgcctcgtcttgcgcaggggtgtagtctcagtcgcggtctatgaaggctcggcgagccccgacgtggcccgggatttcgcgcaagccttcgtctccgcgaacgcgcttcccatcacctgtgcgctggatgtcggcttgatcaggggtcgcgggtgggcggtgatcgaggccaacccggtgtggggcgcggggctcaacggctgtagccccgaggcgatggtggactgcctgctggtcgcgacgatacccccggcctcttgaggggccggagagttgacggcagacccccgtcggtgcggcccggacaacagcgaggccgggcgagaaggtgccgcgcaggcggccgccgaataccaaccacccatagctagcgcacacgcgttacctatgccgttcgtgtgtctgtggtacaatgccgttgacagcctttccggctgtgtgctatcgtgcgtgaaatccgatccggccctcggggggccggcaaggggcgatgattgatgcacgtacgacgcgttctgaccgtgcttgtgaccggcctgtcgtgcgcactgatcctcgcggccatcgctggggccagcgagacgatcctccgcggaagcggcgacctgcggctcgcggtgagcggtggcgagcgcatccgggtggccgagggcccgctcgtggtccgcgggaagatcaccctcgccctgcgcgccgacacccttccggggaactacgtgacgttcgtcgtggacggggagagcgcgtactccacgaacgaccccatgccgcgactcgacttggacacgaccaccctccccgagggcaagcacacggttcgggtcgagtgcctcgacggcacgcggcgggtggcgagcacaggcgacatcgccctcgagatcgccaaccaggccgtcgtgtcgcagacaggccaggccaaggccgctcagcccaacttcgtgaagctctaccacaagaagatcctgcgggagatcgtgtggttcaatgggcgggagggcgaccttgagaggcacggcacactgcgaggcaaccacgtcctgatcaccgccaacgacctcctgcggcacatcggcggcacgatcgagtggggcccgccgggtgatctcatcctgctcgagcggaacaagatcactgtccagatcatccccggcagcacgacggtctacgtgaacggtcagccccggcagatgcagcagccggccttcaccgtccgcaaccgcacctacgtgcccatccgctcggtctgccagttcttcggcatccgggtcgactgggacctctacaccgaccgcgcgtatgtgacgtaccagatgtaacggcgacggcggacttcggacctcagacctcagaccgacggcaacggccgggagtctgaggtctctggtttgtggagtcgtcgcaacggccgttcgccgtcaggtccgaggtccgaggtccgaagtccgtcctcatcccccgatcgcctgcgcggcgcgctcgtagaggcgctcgtccggggtgagcctacgcgcctgggcgatgtgttccgccgcttcggcttgcttcccggtcagggccaacgccagcgccagggaggcctcggcgaggccgttctcgctccagcgaggggcggccgccgagagcggctcgaccgcgcccgcggcgttcccggccttcagccgcacgaccccgagcaggagctgagccaacggcagcgactcatcgcccacggcaaccgccgcctgggcggccttctcggcctcggcccagtcggcccgcagcgcgcacagcttggcggcggtgcaccggagcttcccgttgttcaccttcgccagggcctcctggacggcgctgcccatctcgccgacctcgcccagcctggccaggttggccacgtaggccagccagcgctcggcggaggccgggtcatagtccacgctctgcttcagccacgccttggcgcccccgtcgtcgccgtgcagtaccgcgtacaccgccagcagctcgtaggccggcgggattcgtcctgcctcggttcgcaccatcgccgccgtggcgagctcgtcctccgtcagcatccgctgatcctgcgcgcgcatccgctgccacatccccggcatgtcgccctcgcctccggcttccatcatggcccgcgtggccgtggcccaccgggcgaacacctgcagcatcggctccccggggcaagccttggccgcctccctcagttccgggtcgacccgggccagcactcccgggctcgccgcgccgcccgggccgcttgacctcggcacctcccgcagccagtggagcatcgccgccagccagcgcggtgctggttcgtccggtgaggcccgcagggcctcgccgacctccgcgagggcgttgtccatgacctgggccagcgcgttgctgagggcctcgggttcggcgggcgccgacttcgcatcccaactggccatcgtgtcgatcgccagcgccatgtgcggccaccagagctccgggtgctccgtcgccagagccctgatcgcgggccggacctcgtcccaggcgttgagctgcgccttggcccgcgcccacccgatccgcgcgtccacgtcatccgcccgcgcatccatcgcttgctggtacaggtaggccgcccgggcgtactcctcctcgcgtcccggccggtccaggacctccagcgccatgccccggcggaggtgagggtcggcgtcgttggggttctgggcgatccgcccatcggccgccttcagcgcagcgatcgggtcgccgagcccgaccagagccgtctggcctaccgccatcgagatgcccagctggaacgtgatggggggcagaggcaactcgccgacgatgagcttgagcatgtcctggtccgcggcgcgcgcggcgcccgttccggctgccaggaccgcggccagggcaaccggcagcgcgcgtctgaggcggttctgcatgagggtgagcctcccagaggggacagcggaagccgctgcgcgggagaggtacgcccccccggcgagcggaacccaacctccgcactgccacgcagctactatagcatttcgtaggagcggtttcaaccgcagaccacggctgttgcgtctgaaaccacttcggcacgttacgacgttgatacctccgggccggtcggcgtctctttcgcgggcagccccgctgaacccatggcgaacggcgatacgaccacatctacggacgttacgcaaggcgaggccgttctggagcttcccgcgtcggtggtcgatgagctggccgggaggcgcgagagccgcgagcaggcggcccgagagcggcaggagcgccgccagggccggctacgcacgcgacggatcgtcgttgcggcggcgccgttggtcctcgcgctcgcctggtacatctggcccgcgcgtgtcgaggtggaagggcgcggagtgtgggtcgggcggtggacgagcgtcgagcgggcgatcgcgcggtcgggggtccggctcccccgcggcgatctgctcgacgtgcgcggcggcgtgatccagcccggcggcggcgagccgcccacgcccctgtgcgcgggccagcctgtggccggcggcgccggagcctacggctaccgccacctgactctccagcggggcgcggacaagcgcgaacctgtgcgtgaggaggcggtgctcaccgacccgccgcggggggccgagtgggcgcacgactggcggcccgtctacgtcgcctccgccgccggaattgccggcctcacccgctgggacatcggcaagctgagcggcctgcgggtggtgaccgaccgagtgcaggccacgccccttggcgggtcgcgcgaagcccgggcatcccttccgaagcgcatggccctcaccttcgatgacggccccaatggcgagacgacgatgcgctatctctcggttctcgcccagaacggcgcacacgcgaccttcttcctcctcggcgattgcatcggccatgaggaggacatcgtgcggcaggaggtcgccggcgggaacgagatcggcaatcactcctgggggcacccactgctcacccggaggagcgtggccgaggtcctagccaacatcgaccgtgccgaggccatcatcagcgcgacggcggggaagcgctgccggtggttccgtccgccctacggcgcgacgacctcggcccagcgcaaggccatcctcgacgccggctaccacatcgccctttggtccgtcgatacggaggactggcgaaagccgggggccgagacgatctaccagcggatcatgagcggcgcggagccgggcgcgatcgtgctctgccatgacggcggcggcgaccgcagccagacgctggccgccatctcccgtgccgtgcccgacctgatcgcgcaagggtatgagctggtgaccctctccgagctgatcgaggcgatccccagcgacgacggaggcgtcatcctcctcagcggacgggaggagtggcgcgcccacctgccgcgggaaccgatccacgtcatcgtggccggacaggagctcacggggctctcgcccatcctggtcctgaaggggaaggcgcttctgccggtgggcaaggtgctcgaggcgctgggcgtgaagtggacctgggaccgcgaggcgcaggccatcgacgtcatctccccggggacccagcttcggctgcggctcgacagcacgcgcgtcctgtggggcaaccgggagctgcagctcaacgtgccgcccgtgctctaccacggcatcccgctggtctcggcggaggtgctcaccagagccgccggcgcggagctccaggagacgcagaaccccaggacgttcacctactccttcgccggcgcgaccaccggggccaagtccgggaagtgaggagaggagccagacaatggagttccccgcgagaggccgaatcgtcgatctgtcagccgaagtgtgcccgggtgtcctgaaggtggacggggagtacctctggggcagcgaggtccggcgatgcgagctgcgccagttcaggacaggcaccgatcacaccctcatgcactggctcgacaccgagacccatatcgggactcacatcgaggtgcccgcgcacctcttcgacgaggggaagtcgtgcgccgagatgcccctcgagacgttcctgggagaggccgtggtgctgcgctttgaccacgggtacacgatcgggccgtccgacctcgacgaggtgagggcgggcgacattgccctcctgtggagccccgcgggtggcccgccgccttcgatctccctccagggcgcctggtgcctggcggagaagccgatcaagatgctgggggtccagaatgtgagccccgacgacccgcgggcctacgaggcgggggcgaccgtgcgggccgacacccatgaggagctgctgcggagggatatcccgatcatcgaggggctggtgaacctcgagaccctccagcagcagcgggtcttcttcatggggctgcccctccgcgtagcgcacatggattcgtcctggattcgggccgtcgccgtctgcctgtagatgcggcgactcgtctctccggggagcagtccagcatggcctaccgcgacctccgggcgttcatccaggccctcgagcaagccggcgagcttcgccgcatcgcggctccggtaagccgtgacctcgagatcacggaggtcaccgaccgcgtctgcaaacgcctcgggcccgcgcttctcttcgggaatgtcgtcggtttcaacctccccgttctgaccaatgccttcggcaccccccggcggatggcgatggcgctcggtgtggaggacatcgaggagatcgcggcggagatcacggcgctcgtcacccagcagccgccgacgagcctcggcgagaaggtccgtacgggggtcaagctgctcgggatgtccgcgtacctgccgaagatggtgccctcgggtccgtgccaggaggtcgtgcagaccgagggcttcggcctggaggagctccccatcctgaagtgttggccgggtgacggcgggcggttcatcacgctccccatggtcttcaccagatgccccgacaccggcatccgcaacgtcggcatgtaccgcatgcaggtctacgacgccactacgaccggcatgcactggcacatccacaaggtcggcgcgcggcacttccgccgccaccgggagctcggcacgcgcatgcccgttgcggtcgcgctcggcggcgatccggccctcacctatgccgcgaccgcgccgctgccggaggacttcgacgagatgctcttcgccggcttcctgcggaagcgcgcggtggagctggtgccgtgcaggactgtgcccctggaggtgccggcggaggccgagattgcgctggagggatatgtcgatcccaacgagctgcggagggaggggccttttggcgatcacaccggctactactcgctccccgacgattaccccgtcttccgcctgacctgcctcacccgccgccgcgacccgatctacccggcgacgatcgtcggccggccgccgatggaagactgctacctggccaaggcgactgagcggctcttcctgccgctgctcaagctcacgttcccggagatcgtcgatatcaacctgcccatcgagggggtcttccacaacctcgccctcgtctccatccgcaagcggttccccggccacgcgcagaaggtcatgcacggtctctgggggatgggccagatgatgttcaccaaggtcatcgtggtctgcgatgccgaggtgaacgtccaggacacccaggaggttgtgtggaaggcgctgaaccacatcgaccctcagcgtgacgtcaccttcgtcgagggcccggtcgacgtgctgaaccacgcctcgccgcaacccaacgtcggcaccaagatggggatcgatgccacccggaagtggcccgaggagggcttccgccggccgtggcccgatgagatcacgatgagtgaggacgtgaagcagcgtatcgaccgagtgtggggcgagctgggtctgggatgacgggaaagagcgcagcggagatcaaggggctcttcaacgaggtctcgccgacctacgacctcctcaaccgcgtcctgagcatcggctgcgatcaacgttggcgcgaggccgccgctcgcgagatcagctcgaagcccggcgatctcctcctcgacctctgcggcggcaccggagatctcgcgctggaactggccgtccggcacccgggctgtcgggtgctgctggtcgacctcgcggaggagatgctgcggctcgtgaggcgcaaagtggtacagtcccatgtccagacaccggggaatggtgcagttccgctttcggcctgcgctgacgccctcgccctgccgctccctgaccaatcctgtgccggggtgaccatcggcttcggcatccgcaacctggaggacacccgcgcggggctgctggaagcgcgccgcgtgttgaggagcggcgggcgactcgctatcctcgagttcatgcggccccagggcctcctcgcccctctgaagcgcttcgcgctgcggcacctggtgccgttggcgacacggttcgtcgccccgcaccgggtcgaggcgtaccggtacctcgccaactccatcgtagagtacctgagcgtcgatgagatggccgcgctcctacgcgaggttggctttgtgggcatcaccgcgcgtcgtcagccgctcggcttcgcgtgggttctgggggcgacacgaccatgagggtgttcgtcgcgatcaccggagcatcgggggccatctacgcccagcgcgcgctacgcgcgctcgcccggcacggagcggaggtctgggcgaccgtgtcaccgacgggggcggagatcgttcgccacgagctaggggtcacacatctcgagctcgcgggcccggaggcgcacgtcacctggtacgccttcgacgacctcactgcgccgccggccagcgggtcatcctgcgccgccgcgatgctggtcatcccctgcagcatgggtgccctggggcgcatggccgccggcacggcggatacgctcatcacccgcgccgccgccgtcagcttgaaggagcgccgcccgctcgttctcgtccctcgcgagacgccgctcaacctcatccaccttcgcaacctgacgaccctcgccgaggccggggcggttatcctgcccgcttgcccgccgttctaccaccggccggccgacatcgagtcgctggtggatgcgctggttgggcgggcgctcgtgcacctgggcttccccgacgcggagcaacctcgctggagcccgctgaggtagccggccacctcgcccaccccaacagccgctgggcgttagctgagaggatcctctccttggtgcgagggggaagcggcgcgttggcgaccttcgcgtaggtgtagaggaagtccgccccgggcatgtccgtgccccagacgacccgctcggagccgagttcgttgatcgccatctcgagcatccccgtgtgtgcgagggacccgctcgtgtcgacacacacgttcgggcagtgccgtatggccttgatgccgtactcccaatcgcccccgatgtgcgccatgcagaccttcaggtcggggcagcactcggcgagccgcgccacgtgccgcgggtcggattccgtcggcaggttccccgtccacttgcgccaggcgtgctgcaggaccgggaggccaagctcgatggccttctcggcgatcgggaagacggacggatcgtccgcgtagcaggaggtccagagcttgactcccgccatgcccacagccacggcctcatcgatcgtccgaagcgccgccttgccgtgcttcgggttgacgtacacgaagccgacgtagaggcccggccacttccgcatcgcccgcagcgtgcgctcattcagcgccctgacctcctcctcgtccggcacgtagctgttgatcgcactcacgcagatgcggtccacgccgtaccgcgcggcgatgtccgccatggcctcttcggcgtcgtcacgcgcccagagatgggcgtggaagtcgatgatcactgcatgctgctcccgccggccgtggagttcgactgctcccctgcctgttccccctctcgccctgcgccgcctcttcacgtggggcgccaagggcgcgccgagacctgcagcgaatacgcccgcccgagtacccctaccgggcagcgcgagcagacagcatgaccccaggcgacgccgccctcgagcggcacaacgtcgagcagatcgagatgctcaaccagcggggcggccgcacgctcagcatcgttgacctgatggccgcggacacgatcaggcctgaggccgccggctacgtcctctggcacatcgcgcacggggcctcgttcgtgaccggcgcggtgcccggcggggccgggaagacgacgttgctggctgatctcctgggcatgttgccgcccggcgagcggatcgtcaccaccccggacgcgggcgcggtccgcgaggcgctgtctgactcggaccgacgcgcgcgttgttccctctgccacgagatcggctccggcatgtggtacggctacctgtgggggcagacggtcgcccgcttcttcgagctgaccgagaacggcggacgccttgccgcgtgtctgcacgccgacgacccggtgcaagtgcgcaacattcttctctcacccaccttgggcgtgaccgaggaagcgttcggccgggtcggccttcttctgttcatggccatcgggggaggatatggccgcacggtgaggcgcgtgagcagcatctgggccgccgacggccgtggcgggcatgagctcgtcttcgagcaggacgcgcggaccggcgtgctgcgagaggtccgggctgctcagtcggcgagcggcgaccgcgggccttcactcgaggcgtgcatcacgttcatgacgcagctcgccgaggggcgggcgcgacacttcgaggaggttcgggaggccacgatcgccttctacgcccgggaacggggcttctgaggcggggtgggcaccgtcaccagctggtatgcgatgtcagggtgctcccagaccagacggagctcctcatcggtgagaggcttctgggtcgagaggctggcgagctggacgaggtgcagcgtctcgcgcacccgctccgtcggcgggtcctcaatgccaaggcgcgtcttcagtacgtgcgccaggcctgccacgccgctgtgcgtgccggtcaggatcacgcggccggtctccacggtctcgggcttcccccggcccagctcctccaggtcgtacagctcgtagttgcgtcggtccttgagggctccgtcggcgtggatgcccgattcgtgcgcgaacgcgttcgcgcccacgccgacctggttcagtgggatcggaatgccgaaggagtcggccacgtagttcgccagccgccacgccttcgtcaggtccatccgcgagctgagcacctcgcgtcccctcgccgccggcgcgtggcgcagggccaggatgcacgcgaccaggtcggcgttgcccgctcgctcgccgatcccgttcacggtggtgttgatgtacgcgtcgtaacccgcgtcgaggcttccgagcgccccggccagcgaggtcgccaccgccattcccaggtcgttgtggcagtgcgcctccaccggaagcccgccccccttggcgaggcggttgatgcggtcgtagatgctaaagggatcatcggcgccgagcgtgtcgcagtaccggacccgatcggccccgtgctccttggccctccccgcgaactcgatcaggaactcgacggacgtccgcgaggcgtcctctgcgttcaccgccacggtgagcgcgccgccctgcctggcggcgtccaccgcgtcggccatcgtgcgcagaagctgatcgcggctgaagcggccctggaacttccgctggagcatctggtcagaggtcgagatgctgaggttgaagtgacggaccttggtgtgctccagcgcagtcgccacatcggcgatgatggcgcggcaccatccctccaggatgatgccccgcatgacgccgcgctcctgcagcgccaggttcgcgttgaggtacggcacctcgtggaagctgaaggggaagccgaactcagactggtacacccccatctcggccagcagcaggttgatgaccgtcttctgcagcttggccaggccgatgcgggcggtctggtccccgtcgcggtttgtcacatcaacgaggtacacttggggcacggtcgacgccgcctccccccgtgagacagcacttgccggccaggccaggccggcaggtgggcgctatgatacgcgagaggggagggtttgacaagacgctagcggcagagggctgtctgtcgccttgacgtggcgggcggcaacgccttctattgtgccggacaggtcaaccgaaccggggcgcgagtagatagtacagtgtagacgcgcaggacgaaccggaggaggcgagcggacggtgcaaggagacgagaccgcactggtcgcacgcgcgggggccggtgatatccaggccttcggcagccttgctgagatgcacgggaagcgagtctaccgcctcgcgtatcgcttctgctggaatggggatgacgcccatgacattgctcaggagaccttcatccgggccttcgagtacctgcggggtttccgacagggctcggactttggcccatggttgtaccggatagccgtgaacgtctgccttgctcaccgccagcgagagcagcgcgcgcggcgggcggcgttgctcgtaccggtagagacaggcggcgcaggtgaggaggagctggccgagaggatcgcggtctcctcgcgcgttcaggaggagatccggcgcctccccagacgccagcaagccgccgtcgtgctgtttgagctggaagggctgagtgtggacgagacggcacgcgcgatgggatgctcgaccggctcggtcaagcgccacctgcatcgggctcgagagaccctccgccgccgccttctcgacctccttgcgggtaccgcagatgcttcgggaggtgttgaggttggactgcagagccgctcggcggatgatgaacctatggtcggacagacagctgcccggtgaggggcgggacggattggtcgctcacctccagccctgtgcagcctgtcggtcgcagtatgcacagctggcgcgggtttcggcggtgctgcgaggtctggatgtgcctgacccgggcgaaagctatgggcacatcctgtcaactgcggtgcaggagcggatccaagcggcgcagaggaggagtcgagcctgggccctcggctcagggatggccagagcgacgcgcctcaggctcctggtagctggcgcggtccttctcgtgggtatcgtctgtgtcgccgtcctgcgaggtcccgtgggcaacaccagcgctttcgccgacaccctgaaggcgatggcggaggtcaggacagcgcatgcagtaggcacctcgcacggcgagaagacggaagcctggctttccgtggaccatggctaccggatcgagttgccggatcggctccgtatcggcacattggaggcgacctgggattgggaccgccacagcaacaaggttatgatctacgacccggagcccgacgtgatgaggcgggctttggcggagttgtccggaacccactggctggccgaagtgcggcccggggatgagtaccagacttcggacgcgtcgctggagggcaaggcagccaaacgcatcgacataaggagccatgaagggtggtcggcgacactctggatagacgcggacacagagcgcgttgcgaggatggagaggtcacggaccgccggggacggcagccctgtccccgaagaccggaccgacttcgagtatggtgtcacggtggatcctgcgctgttcgagttcgagccgccggcggaagcgactgtggtggacgcccgcatcgggtcggtacgagggatactggatgaggcgctcaaggcggcggagggtacgccgatccacgaggtcacggaggagaaggtccggctgtcgcgacgccaggccaactggctggacttcgaccatccgcggcgacgtgaggcttggtatctgcgcggggtaggatcgcgcagggaatgggccgacggaggggtccaggtcagacaagggagaacggtatgggacctggggccacggggcgcatcggtgaccgagactgacaatggacccgaccaagcattggccttcgattggctcttcagcctcaagatgcaggtgttccctaccgaccggcccacagaggtgactcccggagagcgcgacggggcaccgatcgtgcaggtgacgtcgtacttcaccaatcggcttacggccgaggtgacgcacaagaccaagctggtgctcgtcttcggactacatccgggcaggctcatcgagagctcgtgctactacgatgtcgcgggcgagtggcgcctcggcgagcacacaaggctcggataccccgagaagctcccggagggcgtgttcgaattcaagccgccaccgggggtgacggtcagagacatgcgaacaggcagagggtgaggtccgaggggtgatgctgtggcctctggggctgatggggaccggcacccgggacccggacgccagcccgggcacagagtgaccgtcgcacccggcctgcgttgggtgctcgggcagaaccggcgacaggaggcagtgcgcaatggccaagctggctaggtcggccaagcgtgcccgcggcagcggacggttggtcatcatcaccgtgctcctggcgctggctgggcttggcaccggagggcactggtggaaccgcgccgctgccgtgagcgcggctcggcggttcatggcggtactcgcggacgcatctgtgaccggccaacccgacttcgcccgcctcaaggcgctggtcgtacgagaggaagccagggagcttgagaaggtggtaggtgcggtggggtcggggtcccctccgagctcagctcccggcctgggctcggcgaagctcgagtacagagtgaggaaggtgtcggcgggtctcagggaggcgactgtggaggtcgcggtcaaggtggggtcggggccggccagtcagttgctggacgggaaagtggtgctgttgcgcgagggtcttgcctggaaggtcagtagcaagcgcaccggccaggcctccggaggacgggggtgaggcgtttctggaggcgagtccaggtcgtgtgacagagcaggagcactcttcgctcctcgtccgtccggtgtgacggctctccgcgcaggagggcggaggaacctgccctcgcagtcgggagaggaaaggggagggtctgccgggagggctctacgcctggcactagaagcggtctcatagcctgtggcaccggttcctccagacatgcacggcgacgcgtgcctgccaccacagcgcgtccgtatgactgaaggggccaaccgccctcgttacgagggtcccggaggcaggaggttggtcgcgggccctgcaggtgcgccagtgctccgacagcagccgccgccccaaggagcgcgaccccaagcactatccgccacgcccggccctggctccccgtcaggagggccagccccgcaagggcaaggccaaagggaagcagccacagcccgacagtcagtgcttcacgggcttccccgtggacctaccccccttcaccgtctggcgatccgtcaggtgtgaccttggcccctccattggccgttgtgtcccctcttggccgtggcacggggaaacgttcgccaccgggtgggcggagggacgggatgcgctgagcgctggggaactcgccccggtcggtgtcgcagccggggccgttaccggaaggggtcgaagtcctcgggaaggccgtgatgctgttccgaagcctgcgggaagggaacataggctgggtcaccgtacaggacgaaggtggagcgccgcaggtaggtggtgttccacgtctcgtacgtctcgtcgggcttgcccggggtcagcactggcgcccacacggaggtcaccgatcggaggtactggttggtggccggaaccatggcgtctccgagcgaacgacccgcagcatagaagggatagacgacgggagcgcaatcggcccaattgtgagatcgcacccccaccatcacggcgacggccccctgccggatgagacgaagggagagagtatcggatggctggacgaacctctcgccaatcgtcttgtcccgctgcatggacagccaccggttcacgacgcccgtttcgcaccctccgcaaagcacaacggccgggtagcagtcgacgttggccagatcggcagcgcggatgccggccgcccacgttggcccgccgtgtcctgcgatgaagaccaatcggcttcccccaagcaccgccgggctgatggcatccgccggcattggtactccgctcgggccaggctcccattccaacaccttggtctcccatccgtcgacacggaagcactctccgtaggcctgcatcgccttcaccaacgacccactcatgctgccgcgcagaccgatggcactcccccgctgggcgacgcccacgaacctgcgcggaaggctcgcccactccgactccgcacgcgcgatgttgcgcacgaaaccgacggcctcctccgcagtagcgccggtgatgaagccgtagccgaagtccatcagcgcgtcgtcgttcatcagcgtgctcagccggaacatccgcgaggccaggttcgcatcaatgctcgttggcgccgccaccacggtgacgtaccgcggctgctcccgacgcagtgcctcgatcagcgagtccacgtcctgctcgtggaactgcagaacgtgggttgcgggtcggaagcgcgtgagttcgtcgacggcacggtagtaaggatctgccgcggtcagatcggtcaggatgacgtgggagttcgccgtagccgcctcaaggcacgcagaggcgaccacgatgagagccatgggtcccacgacgtgccgaagatacacaggcactccctcccttcgcagtacgaccgcccgggctcgccacctgggcctctgcgaggatggatgcagctcccctcgccggtgaaacgagcgttcatgagcgggacgctcatgccagaaggggttacgaaaccgcttctacgccctcagcctcatcttgcccgcgatgtcctgcaggaacgccggcagcgctacctgcgcggcgcccttggtgaccgtgacctcggatctgccggtcacactccccgtgtacggatcccagaactccgcgtcgtatgttccgtcgggaaccccctgcaggagagacaggacggtgttctggtgtggcggcagcttccggccggcctccccggccatcatccgcgccaggtcgaaggcgtagaagtaggtggcctggggagaagtcatcacctgcacgtccaacgtggcgggcgacatacggggggcacgcgggttcgtttcgaggtcggagttgatccactgccacttctgaccgcgccgatcctcacccgccacgaacctcgccgccgcctcgtcgtacttcgcgtagccgccttgccgccagaggtcgttgtaccagaacttggccggcgccgccatcggcatcacgatgctggcccacaggccgatccggtagtaggcttcgatctgctcggcggtgaagttgggaatctgcacggtctggggcccgtactcgatgcagacgtagggcttccggatatccgcccgcgagccgtacccgcggctcaggtcgtcggcgatgtgcttcttcggccagtaggcgtcggcctggatgtagtcgatgtccggcaggctccagagcgaccggccgccgccccaggctccatgcaggcagaagtgagtggtgatgaggtgcttgccggggtcgacagcccgcagataggcgcccatctcccggtgccaggccgctacgtcggccatctcctgcgcatacgcatcgatcaggtcgatctcgttccagaggtcccacgacatgatgtgctggctgtagccccaacgggccgcgatgtagcggtaccgctgccggtagaggtccttggcgatggggctgaggaagaacagcgccggctcggcgaccgggccgccgttgggcgcggcgtaagggttgtactgccactcggcgtcgaacttgtcgcggcgaagctgtccgtgcgagccgagcgtcagctcgatgaacaggtcgttctgctccgcgacgtccagcgcatggtcgagccgccaggcgttgtacatcgagtaccgccccacgccgtcgaaccgcgagtcgtacttgtcactccactcgatccccgcccaccacgcgcacatccacgtccgcacgaagctcaggccggcctggtggaagagcgggaagtactcgtcgaaggcgtacgtgccctgctgggccgccgcctgattccccccgtcgcgcatgttgatgccggctgggtagtagaactccccgttctcaaactcgaagtacctcgggtcggcctggctgactcgcacccgcccccgtgcgtcgagcgccttcgtcgccgcgatcttctcggttgcggagcgcagctcgcccgcatcgtccttgacgctgacgaagtactcgcaggtacccacctccgtcggcgagtagcggatcttccagcagggctcgcccacgggcgacagcttctcgttcccgttcccgtcgcgcatccgcgcataatcctggtagaagaacccaggcacatccgccgtctgcccggaggggccgcggaagtgcgcctgtacgtcaaccaccgccgggtcgaacgggttggggtattcgcggtcgaggtagaaggtcagctcgagcttcccgtggcagggcacctggtcggcgttccggcgaagcttcagggagggctcgtcctcttggaccctcgccgaagccaccgccccgccgctctcgatgagccggacgtcgtcgatgccaagtgagccttcccacggcttgctggagaagaaccggatgccgaactcccgggggtagtagaggctgcggttccaggacttcaggtgcccccctggttgccacacctgcgagccgggagagaggtccaccgtcgcctcgttccaggcctcctgcttaagtgggatgacccggtcgccggtgtctgccgcgcggaagggcgctgtctggaaccagaggtactgcttgtccttgaggtagacgtagacgtccagatcgtccggcgcgccctggggcacgaacacctgaaagcgcaggagtccatacggccgccagtcctgccaggggtagtacgtcgcaccgatggacccggggaacttgcccgccacctcgagcgcttgccgaccgcgggcggcccgcgcctcggtcacggccaccgaggtcgtgttcgggtccaccggcgatgccatccagtccgtgctcctctcctcgaagtcccaacggagaacggcggcgccccctgggccgggaacggcggcaagcactgccagcacggcaagggcaacgcgcctgatcaaccgatcacctcgacgcgggagatcgcgcttcagcaagagaaacacgtgggaggcacagcggttccggcggcaggaggtatcgtccccttccccgatcctcccggtatcgtgtccccatgcctcggttcgccgagcccgttgcaggctcctggttgcctctcggcacgaccacgtgcgaggcctggagggcaggatgatgcccccgccgcagtgaacagggcagccgtcgctgcccgcccctgatgcaaggagcccacacccgtgcagtacttcaagccgagcgaagggcacctccacgtcggtgactgcatgccgttcttccacgatggtgtcttccacctgttctacctcctcgacgagaaccaccaccacagcaagggcggcttgggagcgcaccagtgggcacatgccagcacgacggaccttacccactgggagcaccaccccctggccatccccatcacggacgatcgcgagtgctccatctgcacgggatcggtgttcttccacgacggggtctaccgcgcctactacgccacgcggctctcggactggtcggagcacctcagcctcgccgtcagcaccgacggcgtccgctttcgcaagaccgaacccaacccgttcgcttcgccgggaccggagtacacacgctcataccgcgaccctcacgtcttccgagacccggacacccgcctcttccacctgctcgtcaccacctccttgagcgagtacgtcctccacggccgcgggggctgcctcgcgcatctcgtctcagaggacctggagtcctggcggccgaccgagcccttcatcctccccggctacctcggcgatcccgagtgcccggactacttcgagtggcacgggtggtactacctcgtcttcagcaatgatggcgtggcgcggtaccgcatgtcgagacgcccgctcgggccgtggacacgcccgccggtagacaccttcgacggccccatggcgcgcgtgctgaagaccgcggccttcaccggggatcgccgcctgggcgttgccttcttgccgaccctcgaggggagcaaggacgatggccagtggctctatggcggcaatgcgatgttccgcgagatcatccagcacgaggacggctcccttggcactcacttcccttcggagatgacgccgccggcgggagcgcccctcgacctgccgttccgcgccctgacggcgggcgcctccggaaacgcccgcgacgtgtgcctggaggccgcgagtggctttgaggtcggggggctcgccgacgtgcctctcgactgccggatcaccgcgcggctagtgccggctccgggatcgtcgtacttcgggctgtgcctcaggggcacagggccctacgagcaggggtacgagctgcgtctctcgccgggggaccggaaggccgagatccgtccgccgctcgcgagcaccatcttcgctgaccccggacgctcaatccatagcgtcgagggcctggaccgacccttcaccctcgaggtgatcacgaggggcgacatcatcgacatctgcctcgataaccgccggtgtctcatcgcccgctgcccggagcatcgaggtgagcggctcttcctcttcgcgcacaaggcagaggtcacgttcgaggggctcgagattcggccgcttctgtgaggggggaaccgcgcctagtcgtacaccatcagcaggttggtgagcgggcgagtgggggtggcgatgaactcgccattcgagtagagggcggtggagccgccgccgtcgaggttcatcgcctccaccaccccgagctgcagcatgatgttggcgagcttgttccaggtgatgggcgtttccacgacgaccaggagcagcttcccctccggtgtcacgccgaccgcactgcgccgggcgaccgagaagagcgccgggtcgccgaagccctcgtcatacgggttcaggtgtacctgaccatggctgaccagcgtcggtccgctgcacagcgccgtgcgcacatcgcggggccagccggcatagcgccccatgatcgccccgtggtgctcgatgtggacatcgccctcctcggtgactacgagggcgctgctacagagaccatcgtagaccatcacgccttccatcaccagtgatcccaccggctcgctgttccgcagatggaagtacgtgccgtcgatggctacgcgggggcgcaggcgcctgaccatgttgccgaagccctcgcgcccgaaaacgccctcgctcagcacggtgccctgggccaacccgatcacgatctgcacgttctcgccctcggggttgacggtgaccacgtggacgccgacgccgccgatgaggcgccagtcgcggtggatgtgggggctgcgctcggagctgacattccgcttcggggcgaggacaagctgctgggcgcgctcagggaggctcgcaaacagggggacggattcgggtggaccacccctgagcgcggcaacctgccgtgcgatgggggtcgcgacgagcgcagccacggcaagggcgtagacggccaaagccagtaccgccgcccaatcggcgggtctcctgctccggggtagcgtccgcgccgccgtagccacaccccgcatctcccttccgcgtcgtctcctatcatgtgtagtatacccatctcgcgagcgaatcggagatggttgcgcgcggcccaaacggcgttttcaggtggtgccggtggctggcccaacagacgacctagaggtcaatacgccagcgccgccaacggacctcgacccggaagtccagccgcccccagaccgtcggttgcttgccctcggtactggcgacgaaggccagttcggtggcgccccgcgagaaggcggagatcgcggccgcccgggcgagggtgcggagccactcggtctgctcgccgctcggcaccacggccatgccgagaggcccgaagcccagccacgcacgctcgcggccggtggcggaggcgtaggccgggtcgatcatcaccacgacatagccggcgagggcgcccgatctccgcgccagaagaaggccctggggcgtgaagccgggaaaggtagctgccaggcggttcaggtcgtcggtggtgaactcgccgctgatcaggtcgagttcggccaggatgccggggagcgaggcgacgtcgttctccttgagcggacttacgctcaagtgggattggccgatcgggccgccggcgagcagcccgacgtaggtgccccaccgatcagccggctggagtccgacgctgcgcagcacctgttcagcccagcacccgtccggggcgaacagctcgacatggcgggcgtcctgctgggcgcgcacctggcaggccgcatagagcagcccgcgcgcgacctcggcgtactcggggctgggagccgcgtgggggaggccgggctggaacacgacctcggcgcccacgtacggatggagatcgcccccggcgcgggcgacgctcggcggctcgacgtggcaccagccgacgaccgcttggtcgcgacgggcgatgagcagggcccggtcggcgaaccggttgtccaggcccacgtaggcccgaatctcgtcggcggtgaccggacggtagtgtggggcggagacctggtcggccttctgcacctcagccagctcgtccgccagggcgaccacttgctcgggcgcggcaatccgctcaattgtgagatccaccaggaccacccgtaggaacgcgtgatcgacgtcggctgggagtcccttcgccgtccggggtcggtttccttggtccgcaccgcggttgggccgccgaccggcgccacgagtcccgtcatgaagaagacacgttaccggtgggccatcctggcggtccagttcgcgatcgtggccatcgtgctcgcgtttgtgggcaagaccgcgtacgacgtctggccccggatggccgggctgaagtggcacctgtccccggggctgctggttgccgcggtcctggctggcatcgccacgcaggtgctgctcatcgccggttggaggctggctctgcgcttggtgggggccgatgtgccctgggcgggggccatgacgagccagctgctcggccagctcgcgaagtacgtgccgggcaagctgttgacgctcatcgggaagggctaccttgccgcccgggcgggagcttcggagtcgcaagcggtcctggccatgttcgtggaggcggcgacgcaggtgacgacctccctcgctgtcggggcggcctacatcgtcatcgccgcgccctccgaacgccgcctcttgcccgtcgccggtggggtggtcgtcctaagcatcgcggtcctgcaccccgcagtactcccccgcgccgtcggcttcgcgctctcgctcatgggccggacgccggtgccgctccggtacgagctgcgggcggtcgcgccgcttgccctctgcgacctggccttctggggcgtgaccggcctgggtgtctggctcctcgccaagggcctcggcctcggcgtcgctatcgtgcccatcacggcgggctactgcctctcatgggccgccgggttcctgagcttcatcttccctgggggcctcggcgtgcgggagatcgccttcgcccggcttctcggggcgtctgtcgacctgggctccgcctggagcctcgcccttgcctcccgcggatggatcctcctaccggaactgctcggcgcggcgttcgtttgggtgtaccggacaacacagaagacgcaggtcgccgctcaagccccgagccccgaggccgaaggtgcccgagagcccccgcagaagcgctgaccggttcgcgccgatcgtggtgttcgtcgccacggtggcagtctatgggtgccgcctgggcgccctggggctcaccgagccggacgaggcgcgctacgcggcggtcgggcgggcgatgctcgccacccgtgacttcatcaccccgcgcttcaacggcttcgtctacctcgacaaacccccgctcctccactggctgaccgccgcggccttcgccgtgggaggggtctgcgagtcggcggcccgcgccgggtcggtgctggccgctgccgccggcgcggctctcgtctatgccttcgggcgggcggccttcggtgcgcgtgcggggctcgtctcggccgtggtcctcgcctcctcgctgctctggttcgtgatgggccgggtggtgcggtttgacatgctgctcaccctcttcaccaccgcgaccctctgctcggcgtggagtgcgctcgaggcgggcgagagggggcgccggcactggctgctgtcagccgccgcggccgggctcggcacgctcgtcaagggcccgatcgccctggtgctgccggccatggtcctgttcccctacctcgccatcacccgacagctcgccgctctccggcgagtgccctggctgccctgcctggcgttgttggcggtcatcgtggcaccctggtgcatcctctgtgagcgagccaatcccggagccatgcgcttcatcctgctgcaggagaacctcgcccgcgcggccggggaggtcggcgggagtcatgcccggccctggtggtacctgctcgccattctcccggccgccgtgctgccctgggcggtgtgcctgcccggcgcggccgtcgaggttgtgttcagaaaggcattgtcgggctggaagcccgacctacgcgacgaacaccgcaccgcagaagggggattcctgcccgttcaagccgctgccg

SEQ ID NO: 519 - DNA, 102392 bp, Artificial Sequence
  Synthetic Oligonucleotide
cgccttcgccttcgccttcgccctcgccttcgccttcaccctcgccttcaccctcgccttcgccttcgccttcaccttcaccttcgccctcgccttcaccctcgccttcgccctcgccttcgccttcgccctcaccttcgccctcgccttcgccttcgccctcgccttcgccttcaccttcgccttcaccttcgccttcaccttcgccttcaccctcgccttcaccctcgccttcgccttcgccctcgccttcgccttcgccttcaccctcaccctcaccttcgccctcgccctcgccctcgccagttgcgggcttcgggtcggtggcggcgagaaactcctgcgcattggttaggccgtcgccatcgggatcatcgtttccggaataggcatcgagggtctgaaaatgttcgatttcccacgtatccgggaggttgtcgccgtcggtatccgccggatcgtaaattcccaagacgccattcatggtttggggcaacaccgatgcggagccgtccgcattcgccaaggcttggggcgatatcgtttttgcggcggaaagggcaagagccagcgtaccgggagcagttcccggcggcacgttgacgacaatcttcatcagggcgccttcgtttgcggcgaaggtgctgttcttcgaataggcgatgacggtagcttttgtgccggccatgtggtaatcgagagtaaaatcgccgttatcgagcaaagcgccgggctgcagtcccacgatggccgaaccgtctggcaggcggatgctgccgttgagacccgcataagcttcatcgccgtccgccagccgcaagacgacgatcgtctgcccaccgggaatcgtgttggcgttgtctagtgcgaacacggggatggcttgcgcgcccggcgcaagacatgccaggaaaagcagcgttccgaattgggaaaatcccgtgtttcgcatatcgtctctcccttcagtaacggataatgtacgtcacgacagccgacggctggatgttgttgtggggctgatcgccgcctgtcatgctggtagaagcagttctttccatttcttcatcgtcggccacatcgcggtcgttggcgtcatccgaatcattgtcgcgctggtatttgtcctgatacgagtggttgtgacgcggcatctcatcgatggtgagggtgtgcgtctcttcgcctagttgggcgccgacggtgcgttcggtgaggccgctgccttggcccgcgcccataggaacgcgcccccgcaaatcgggcacgttaaaggtgtttgtcccgtcgccactgccccagatggtgccgatggcggcaaagaggtcggaatatttgctgcgttccaccgcgcgtccgtcgcagggcaaatagcccaggggctggtccacgttggcttcgcccgcaaagggcaggacggttcccgcaggcacgcggttgaggaggctcgttgcattgtcggccgtttttgcctgaatcgcgtagggactgcaaagtatctgttgccggggcaacatctcttggggattggccagcggtgtgcctgttttgtccgattcgatggtgatacccaagtagcgcgtgttggaggagaaggccgacgaaatggcaacgacacccacggtgggcgaaacttcgagggcggtgccgccgctgtcgcccagaatcacgttgaacatgccgttgttcaccggcgcctcatagcggcgtccccaaatgacattcccgccggtgttcgcatcgtagatccggaaggatatcgagtagacgccgtcgggaaggggagttccgtctggttgggtgagttcgccctgataattcatcgcatcgggcactgacgccgcccatgccggcgccgcgccggtcgctacaagagccgtcaggataaaggccgctacaagatgtctcatggtagatctcctgtttccacaacgatgctttgccgcaaaaaaccacattttgttgtctctttgctaaaagggcctgtttttggcccgatgattgaaatagatctcgatatcgtcacagtcattgacgcgcaacttggtttgatttccgtcttttgcatagatcaccagacgccagccggtggcggccacgctgcgttcggcgaattcgttgaaggtgttgaggggcgtggtgtcgcgggaggaattgacaagattgagaacgacgtttacggtcagcccttcgttgaagcgccatcccggcggctgcggcggattggccgcgggatttcccggatgcttgtaccaaaatcgcgttgaccatgccgttgattcgcccacataatggttcggttcgccgggaaccggctggcccatctccaaattgcggataaactgcacgccgccttgggtaagggttcctgccacggccgtgaaggcgccggagtgggatccgggaatgttgatcttcatgtaattgatcttgtcgaggaatgcaccggggctcagaagcgtgccgttggcggcgtatcgcggcccaaagaagaaactgagcccattatccagcacggtgctgaaatcgagtacaatgacgccggaggcgtcttggtgttcgagtagataattgcggaacaactgggtggcggtacgaagttttccagtctgttcgtccaagtagtaaagtgtgtttccggcggcgtctttcttccggtaaccgaggatgtcctcggtaaacgacagccagtcttccttggcgactccgccgggaagaccgagttcgaaatcgaaggccttgacggcgttaacgatgtcgatcaactcgtcggcggttcgtgccccaaatacggaattgagcgaatagccgtcgcccatgacgaaaccggcgatattgtgcttgtactcgaaggcgcgcaacgtgaaatacacccatcgctgggccgtttcgaaggccttctgggcctcgagcatgtcgccctgaaaacgcaggcggtgcgtcgggtcggcataatagcgattgaggaggtcctggctgagttccgccatggtggcctcgatcgtggccttttcgccaaacagccccgcaagccgcgccacctcctgattgagcaataggccggcttcctgcgactgtaactggtaggttttcatgtcgagcagccatgttttgatggcggccttgctattgacgtcgagcagggcgtcttcctgcgcgcgaatttcagcctgttccatggcggcgaggacttccttctccgcctcgatttcgcccttgtcttcttcccattggtattggagcgcggcgttcacgctaaaggcaatgagtccgccgcttaccgtggtcgttccctggagatcggctccataggaaatgctttgttggatgcagttcgcggcggcggccagattgtcggcgcgcacctgcagggcctggatatgggcaatctccttggtgagcgaggcctgcttgttgccgtagcggatcatgatggactggatattggcattgatgccggcctcctgggcgcggcgttggacttcgatttcgacctgttgcttgaggttggcgatcttctgctggttctgctgaatgcggttggcggccaactgaatgctggtgacttgcaggttgatctcgctgccttggttttcggccggtttcagataggcgagatggaccggattggcgggatcgggtcccggatccacacccgtaatggcagccagacgctcgcgatatcctttgacttggacggccatgtcggcggatagctggtcttggctgccgcggtaggtctgatagctggcgcgggccttgtcgagtttggccttggccgcgccaaggggcgaagttatgtctccgacattgttccagttgaggagggcgtcgaacgaatccttcgtgttttcgaactgttgtaccagcatcagaaaatcttcgcggaacccgagcagattcaaattgccgtccatgaaggccttcaagccgttcaattcgccgatgctgttctgccagcttgcgatggtttcagggatgcccgaatcggcgggcatttcgtccggatcgtaatcgggaaagatgccgagaaggatctgcccttcgatgtccattttcgacagagtctcgttgatgagggttttggctttctcgatatcgcctggtgtcgcaccgttgcgcggattcccccgcatgatgtagcacatggccagttcgcgcgccgcaaccgcctgatcgcgcagcacattgaacatgatggcccagtccttgtaaccggtgaggagcggcgcggcctcgttcttggagctacagagcacgggaaccggattgtcgttttcgtcgcggaacgtggccgcatacaaagatcgtccgggcacctccgtcacgaagacgagatagccaaacggcggatagtctccgttgcccgtttgcgtccacgggaagaatcggggcatgtctacccccattccgtccgtaaacaattcgtaatagggtgttgctgcatccttataggcctccatggccctctcgaaggcgcggatctccgcatcgataacccgttcgccgggcagcggcacatcaatccgtcgcttgtaggcgcgcaccagtttttctttcgccaccaacagattggccatgcagcggtaataggcgatgtccagcaacacattgcgcagtttcttgtcgaaaggcgcgtatcggagcgcgtcgcgcaccatggtttcggcgctccggacaagggccaactcgtcatcgccaaacatttcggcgagcatctgatcgatttgggtttcggtgaggaggcggttttcgagttggttgacgggagtgtcgttcacgttgccgtagatttcgtcaatgaaccgaaatgcgggaggattggccggatcgtcaatgttgttgagcgaatccttgatgatcaacgtccatacaccccgggcattttcgccgctgaaagcggccagttggccttgcggcttgtgcggccccaaaaacggcggagaaccttctccgatggaaatcgtcgccgaatcacgaagaattaacgacgatcccccttccacacactgcccgaagttatcggcgccgccgcccacattggcaaagagcaggacttcctggccattgggcgatcggagcgagacttcgagatcctcgtcccaggagtgctcgatatcgagcgcgacctgcacgtcggccacgaccacgttgtcctccaccgttaccgacgatgtgatcataccgggattgggaatgtctttgggcgtttcgccaaaggcgggcgtgtacgaatcaattccctgttggaacaggcgaaagacggcgggacttccttccgcgccggcagcatttacgaagatagttgccgagcggggcagccccggattggccggcacgttgaaagtgaacgatccgttgtttgttccattggcgccggacaacgtgaggaattcgccctccgaaatttcggcctgccacgacattgtgccggcgcctgcattggctacgttgaccgtgacggaaccgcccgccgtggccactacactgctctgcgggttgatcgtcaagatattctccgcggcgccctgaacgaccagcaccacggcggggctgccgtccacattatgctcctccgtgtaaacacggatggcctggctgcggacgccgcccgtattggccccaaatttgaccttgaacgacccgctgtccgtgccgttgtcgtcaccgtcgaaacgcagccaagtgcccgaagccgatggaatcaattccgcatcccatttgaattccttcttgtcgagtttcttgacagttacgtcgaatgtggcggtcccggcggtgttgtccacctgccgaaccagcggagatacccagaactcggcatgccacgttttttccaggggcgcgctcttgtcaaggggcccttgggcggaggtaatcgtcaacgaccaatccagaagacggcccacgccccctgtctggtcttggcgaaacagcatggaccgtgcggtgctgatagtatcggacacaaaatgtgtgcgagccaaaaaaggcgcgcagggctggccaaaggaagacgcggcgagcaccaccgtcccgttggtgacaagttcaggcgtgggcaaatagacgctttcgcattcgatgatgccaggattcaacacggcgcccgggttgtcgctccatcgcccgtcgggaccgattgcggcgaaatcctcgtcgttgtccaattcattcggtttgccttcaccccaattcgtataggcgcctgaaccgccgctttcccaaacccatgtcccttcttcatcagcgtcgctaaaaccgatccaagcccgttcaagatggtccaaaagtcctgaaacatccgtgatccagtcattttcctcatcgtcgttcacggaaccaaggcgcctccacaacgttcggcttcggcttgggcgttccagtaactcaggggcgcggtaattttgtaataatggccattggcctcgttgtatacccagccgctttcaggagccgcataggcgccgcggtggccgttgaaaagcagggttcccggtgtttcgcttgtacccgggcaaaggtttgcaaatcgggggcgtacaagtcgtgtgtcattctgggcgccgctatcaacgccggttgccggattagcccccaagatcgcaacaacaagccacagcggcgtcgcgaccttccatgcgcgtttactgctgtatagtccgttcattcctgtttcgctcccgggtccaacttacttggcgtctacaagaggtgcttccggtacgtttacatcacccggcacttttttaagcacaaatccgccttcgatctgtgtggccagatgggcaaatgccctgttttcaggaatcatccgctcgataacagcccccgcgaattcggtcagcgcgtcaataacggtgtccttgtcgggcgcccggtaatggaactcgaaagagcgggtgaatcgggtggccaggcgcgaggtgtaagcgtcgggaacgggaattccctcgatccggagattgaaagcggtatccgtgaccgtaatggtctgtgcgggccagccttggcccggcggatcggattcgggaatgatcccggtgtcgtctccccggaagtatgcttgggcggttccgccggatcgaagaatgaccaaatcgaagccaagtccgcttgaaagttgccgggtgaccacgcctttccacaccgcgtcattatcttcgatgtacacggtgcaatcggatggtgttcccaccacatatccagtgccggccaaaatccggatttcaatggattcggtgttttctacggtcaaatcgtcaagaatccgtatgggaatctccgcctcaaagccgttcacggcggcgctaccggcaagcacggtaaaatcttcccctcccgtggccaaggatgtattgtccacgacgtaattcacggtccccataaaggcgctcgtaaagaggatctttaggattacatcgctttccccttcgtgggtttttaccatcgtggtttcgaaactcgctttgggaatcgcgccttgattacgcaggaaatagacgagatcgcccgcgtcgagacggccatcttcattcatgtccatcgcttcggcatcggattcggaaaggctgttcctgcccaagatagaatcgcgaaggttttcttccgtcacggggcctgttccagcggtactgcccatggcaaatgctaataaggcaatgaacacgatgagaaaacccactcgagatgaaattagcccagcgcatgcacgttccactcgaatccctccctgaggtgcttgggaaacacaccacccttccgcgtttccctgcttattcccgactgcccactccatctttatatctcccctgtcaacggagacagatgtactccccagcacgatgattttacattaaaccaaagagagtaaaatgtcaagaacgagacagggcgggccatgaatgcccggcaagccgccgggcgtactgttcgaggcagtaggcgaatgtttcgatacggagggcgagggagccgggggaatggttttcgtccatgtcgcggaatgtgaagaagggtttgtccgcgcatcggagaatggcttcgagaacggcggacaggggcgcgtccataccgcagcgaaaactggaccattcgactccaatcaggcggggatggcgcgcgatgtatttcgcggcccataatttgcggttgctgtattcggaaaaactgggccgccagacatcgcttatgccgagcgcgtcgggatcgtttccgaataacccgcgcagggcttcgtccccgatgggcagcgattcgatggtgagaatgggatagcccagccggtgaagggcatcccacacgccgtgggagatccccggatccacgtggtacggcctgccgagcatgaccaatgcgatgccccggccgggctcgagcgaatcaatcacggcgcgtccctttgatcgccatgcctcttggaaatcttcccatgcggcgaatgccgcctcggcggcgcgcagcgattcgcggcgggtcatgcccaaatcgtcgcgccaatcctcccacagttgccgcgcggccaggtgcggatcgccgatatccacaaaggtctttctcagttggatgccgcgttccgcgaaaaggtcgcgatcgcgcctgaacgcggcggtggcggcttcgaccgctccggtgcaggcggggcaggcccgggtggcgacgacaccgcgcagccatgtggggaaggtgtccatgatgggaaagaagacgtgggtcaatggggttttctcatggatgcgggcgatcagatcgtgaaggtgcgcgatggccagtttactcggataacacggatcgatacagccgcgtttcgcaccttcgcggtacattttttcgttgctgtaaccggaccagatcaggcggtcttcgggcacgcccagcgcgcggaaatagccgaggaaaaacggagccgcggcatacatattcagtacgcggggcattccgattcgtagtctctcgcgctgttggataacccactgtcccagccgtccggatcgcggtacggcaagggggaggccgggcgatcggaacgtttcgcgcgcggacaacgcggccaaattcaaaccggcgtcactattgtgcgcccggggaggttccgggcggtgtcccgatgcgcctttctcgcagggagcgatgatggcctggcgtttgctcccgttcacgcgcatttcgaggatggtgcggatacacgcattcccgcagccggcgcagcgcgtggagtcgtcgtgcctcgcatcgcactggatcgtttccaacgcatcgaacccgataaaggtcgaagtccgatgttgggcttccatccatcgccgtgtttccatggcgcacccgagggcgccggcttcgccgcaatgttcatgaatgcggatcacgggttcgattcccgattcccgaaactgaccccgaatgaaatccacctgcgccttgacggccgccagattgcgctggacgccgccctgcagcacaaagacacgacccagttggggcaggttgtgccgctggcacacatacagccagatgtttttcggtaggaccgcggcaagccccgcgagaatttcgccgggcgtccagccgtgccgttgcacatccacaattccggattgcagaaacacggcgcatccgtggggaaaatcgggcatgtggcgggccgaaaaagccgcgtcggcatagcgatcgacggaaatgcccagcattgcggcggtggcctgaagatagaagccgttgccggccgaacattgggtgttgaggcggaaatcccgcacggccccccgttgcaggaaaacgatcttgatgtcctgcccgccgatgtcgcaaatcacgtccgcgtcgggatgcgcgcaaagtcccgcgcgcatgtgggcgaccgtttcgacgatggccgtgtcggcctgcatgacatgccgcaggatttcctttgcatagccggttacgcctgcgccgagaatccgcaatcgagcgccggcggtttcgacaccttggcgcaactcgcttgcgacatgccgcaggtcttcgacgggattgccccccgaaagccggtaggccttggcgatgatgctgccttggggagtcatcaggaccgctttcgtgctggtcgaacccgcatcaacgcccagataggcctcgacgtccgcttgcggcaggagaggaggcggactccacgccgggggcgcgtaatcgcgcataaaggcttcccgttcggcatcatcgcggaccagtccagcctgtccttgcggcacgcggcgttcctccatgatccggcggagcggttccgttccgcggtaccggccaatggaaggatgggctgcgatcaaggcttgtccgcaacacacggcgccgattgcgccgaaaaacaacgcatgatccggcacgataatcaaccgtccgtccggctcgccgtccggaacgaaaacaccatggtcgcgccagcgacgcggcagatggtgacgccaacgctcggccagacccggcatgaatacatgcggcccgcccagcaggagaaccgtgggcggcaaggcctcgccgcgggcaagcacggcaaggttttgaagaacgatggaatcgaacagggacgccatgagttcgtccgacggtgttccccgtttttgtagactgatgacgtcggtttccgcaaacacgccacatttgcccgcaacgggatggattcggaccgttgcccaatttacagcctgtaaattgttgatgcacagaccggtttttaccgcgatacgatcaatgatcgctcccgttccgccggcgcatttgtcgttcattgacacggtcttgcgccggccgccgtgcggggtggtgtcgtgaaagacaactattttggcgtcttcgccgcccagttcgatgatcgtgcgcgtctccggatgcaggatctcggcagcccggcatagggcgctggtttccggcacgaaatgggcgccaatcgcttcggcgacggccgtgcctccgcttccggtgacgaagacatggaattcatgccgggggatttccggaaaggccgcttcgatatcgttcagaaaatcatggcataccgacgcttggcgcatttcatggcggcgatacgcggaccatgccacgtcgcggcttttcgccatcatgacgattgccttgacggttgtgctgccgacgtcgaggcctatggttggagacacggtcgtgtccccgtttgttaggcgttgtgccgcacgggacattttattgaatgcccatatagcgcttgataacggcgacggtctccgtgtgaccgttcatttcggcaatttccaaggggatttttcccgacgagttctttacgtaagtgtccgcgccccgggccagcagcaattcggcgatttccgagtagccgttccgtgcggcctcgtgcagcgccgtgaaaccggcctcattgcgaaacgtgatgtcggcattcttttccagaagcaatttgaccatgtcggtaaaaccgagtgtgcatgacagaaacagcggggttttgccgagatagagcgtgttcacgataccggggtgttcgtccaagagacggcgaacttcgtcaatcttgtttccaaacacgttcgacatcagggcattgttcaacgcggcgtgcgtgcgacccgtttcttcctccttggcctgcaggttatccaactggtcaatcgttccccggacgatgccgacattgctcttggcgcccttcgatcgcaggaactcgacgacttccgatcggtttttcgagagggcgcgatccagtggagtcttgccgcggcgatcggatgcgttgatatcggcgccgagcaccagcaagagttcgacgacatccttgtgcccgcagtatgccgcctcgtggagggcggtcatgccctcgaaatttttctcggtcgcggcaatgtccgcgccgtggccaagaagcaattcaacgatgacgcgccgcccctgccgggcggcgatgtgcaacggcgcaagaccctgttcgcgcatgttggccagatcgggacaatcttcaagaaatcgcttgacgccggccacgtccccgctgttgagggcggcgctgaaggcgctttcggtggccggacgcaacaatgcggccacttcatcgttgttcgagtcctgtgcgattttcaagggcgtgcgcccctcgctgttgcgcaggttgacattggcgccccgggacatcagcagtttgaccatgcgcacatgaccctgttccgccgcaatatgcaagggcgtgaatccgttgatgtctgcggcgttgatatcggcgccttcgccgatgaacacctgcacggggccccaatggccgtcccaggccgccgcgtgaatcggagaacgcccgttgcgatctttggcgttgatgtcggcgccgttggccaccagcaacttaaccaattgcacgtctccgcgttgcgcggcgatgtgaagcggcgttcgttgtgaaatgtcggctgcggtgggattggccccgtgtgccagcaggagttcgccgatgccgagacatcccttttccgcggccgaatgcagcggagtccattggttttgatcgatcgcattgggatcggcgcccttgttgaggagaatatccacaagatccgggtgcatggcttgggcggccacatgcagcggaatctggccgatgttgtctttggcatggatggatgcatttcgttcgagcaagacttttaccgcgcggctttgatccttttcgaaagcgctgaaaagcggggtgcgctcgttgccgtcacgggcttcgatgtcggcccccttgtccaacagaagggtcacgagataatcctgacctgcggccgcggctacgtggagtgcggtcgttccgtacttggtttttccttccaagacggcccctttttccaagagatattccaccacggcaatacgatcgggattcggttccggttcgactttttgcacccggctttgattccagatgtggcgcggcttgatccggtcctccatgacggcagtatgcagcgggctttcgccccgcttgtttcgggcattgacgtcggcgccgcgttcaacgagccgggccacggcgtcctttcgggcctcgcgggccgcgacatgcagcgccgtccatcccagtttgtcgccgttttcgaccgtcgcgcccgtgtcgcacaaaagttccaccatgtcggcgagtcccgcttccgcggccacatggaggggggtacggcccttgttgtccgtcgagaagacgaccgccccgttgtcaatcaaaaaggcggccatgtccttttgggcggcctgtaccgccacatggagcggcgtgaatccgtcttttcgcttggcgttgatgtcggcgcccagcgaaagcaacaaggggacaagttcgcggtcgccgtttttcgccttgatatgaaggatactgtcgccggtggcaaaaattcgctggccgatgtcggctccccgttcgacaaacagtttcaccacttcgccgttattgtgcagcgccgcgatgaagagcggggaatttccttccacgtccacctgggcgggatcgacgcccgcgtcgagcaggtattcggcgatttccttatggccgaacatggcggcggtatggagcggggtgcgtttgatggcgttttgttccgtggcggcggacggcttgtttccgacgatttctttcagcgcggcgagatcaccgtaggcggcggcggcttcggcggaaacatccgccccgaattcacgcagcagttttgccgcatcgtattgcttggcctgcatggcgatcatgaccggcagcgacagcttgttttcgtccgcgtcgagatccaatcgagcaccgtagtccagcaacagttcaagcatgggcagattgccggcctccgctgcgcaatgaaccgccgtatatcctcgcggatcccgtccgtccaagtcttccagacgcaaaatatggttttcggcatccgccaaatcgcctgcctttaccgcctcgaccaacgtaggatatttgggaggcggcaaattgtccggaggggtggccggccgtgttttggatggcatgcgtggtggttttgtgagcagggtcggcgtgggaagcgcaagcccttcgtcgccggattccgtaggggcgggcgcttgtggttgaaaaggcgtctgtgccgggttgaagaactccggcagcgtgcccgtcgccggagttgctcccaagggaagaaggcctgttgtggggccctggggacccgagagaggggcggccggcggttgggcagcgccggctgcgcctagcggaatgaagacggagccgtctccaccgcccgggaattgaatatccttgacccagttcatgtttgccggcggggtagacgagccggtcggtggcgttatggatggaaaggccggcgcgggtggcgcaggcgcaaggggaatcggggactccgggagagtggctgggggcgcgctcgtaacgggggccggttccgcttgcgcgggttcgggaagggccggcgatgtttccacgggattttcgggcgcggattccgctggcgtttccgtgattttcggttcagaaaggggcgcaggggcagcttctgtccggatctccgaaaatggttcgggtacagattcgacagccggagcaggcgcgggagtttcggccgccgggggaacccgcgtttccgcaggcgccggtgtgggatgaatgggcggcgattccggcgtttccgtgggcaaaggttcttcgccgacacggacttgcaacacctggatgctggtcaatgcgccgggagcgccgggaatttggatatccttcaaccaatccatcggttgttgcgtggattgctccgtctggtctgtctgcgcgaagaggagggggggtaataggatccccgcacatcccagcgcaagaagcgcagacagccgccgggatttccaaaaggcgcttcgtgccttcatgccaatcatccttgtgcctccgtggcgtcgtgccatatcggtgatttctttggtccgctttgtgcggacaaatggtttcccatcagggtaacgaattgcgcggcccgtccggcgacatgagaggccgaaggccggctccaacttgacaaatcattttggttttcctgtcccacgcaatacagcggacggcgaaaggcggggtttttcctgcaataagcacggatggcttccagcgaagcgccggatccggctaatgcctcctcgaattcccgttcgcagacctgtctggcctcgtcaagcgccgattgcaggcgactgtaggcatgtacggcgccatcgcccgatgtttctatcgaaacgaagtgaaccgaacggccctgccgggcgcagtaggccgcgacggccggttgcacgccgtcggattgggtcgagggaaggcatccgaaaggttttacacttatgaccagatgggctttccggtacaaggcgcaatagagggtcttgccgatttccatgtggccctcgcctccgacaatgtgcgtgttgaaaaagggccttgccagtttacgcagcattgcctgcggaatttgaggatgcgggacgcctcgcagcgctcggcgcatccgttcgtagtcgcggttcaacagccatgccgtcagacgcaaaacggccacgcctttccagtcggccgcgcgcgaccgtgccgcggtgtccctggtctgcttggtcgtgccgccgcgtccatggcgaaaacgttgcgccgcgacgtcaatcaggtaattgacccatgtcatgaccggttcggcggccacttccgcgccttcggattcgagaaactcgaacaggcggtaattgccgtcgccttcggtaagttgcgcccaaaactcgccggtgactttgcaaaggggcttcgggcgcgtgaaatccacttcgatttcgcgatcaatcaattccgcgcagcgtgcgagcgcacttacaagcgtgtcgtcgaacaaccggtgcgcaatacatcgcgccgaatcgcgatccagccccgggattcggcgacacagcgcgcctcctatcagcgccgtcagccagcgcccgcgtgttggcgcggccatggtctgcctgcgaagcgcatcgcatacgatttccatcactttcccaaacgtgcgttccgtttgtccggggacgatttcatacggacggatgcgcatggcaaggtcgttgagcagatcccccaccatgaggcatgtgatgaagcgttcagcgaaccgggcgttgagcggaatcgcgtcctcctcgccggactgtttcaggccgcctttctcttggaacaaaatgacccggaatccttcgaatccgctgttgcgcagtgcaagcccgaattcctcctcgtacatgccaaaccggcacgggccgcacgatcccgccgtgacgaatacataggcatcgttgatttcgcgcggcgtaagaccggtttcgtcccgcaaccggcgcaagcggtttaccagtgcgccaatggtgaaataggccgggttgcacatgcccgggttgcccagttcgcgcccggttcgataatccgcattcgtcggcgtgggcagggcttccgatcggtagccgagcggcgcgaacgccgcgcccagcaacacgccgtgccgctccgtcaacccgccgtacaagacggtgacgcgatcccgttccgcgcgcgtgaaaggacggcattcgctccttcggtaatgtgcagcatgtgtttgatttgcttgcccttccatcatgcgggaatgatgccatattgccccgtttcggaacaatgacgccatatccccttgtcttcttttcctggcctcattgctgtccaaaagaattgtaaaaaaccacaaaaccgcaaggagccacgttttacctttttattccgttcatcggttcgatatctgcgactatctgcgtcatctgcggaaaatcacatgatccacagatggcgcagatatacgcagatggaaaacagggcacggatgttcgggccaggcgattccgaactcaaatctgcatgtcagagcggcccaaaatacgattgatcgggaacacttcttcttcatcgcgaagaaaaggtgtcccacgaacgctttcccggaaaaaacgttgtctatttactcaaaatggctttctgcaagccgacatttggacagagatgtcctggccgaaaaaagcacgcctaatccggaaaaatcttttattgccgccggacgggccttttcaagtatgatgagggtgtgcgcggcatgcgcgaatgattcggccacaaacggagggagagttcgatatgaacaagacaccggtatcacgcagggattttttggcggcgtcaagcctggcgctgggcgcgggagcgatgtggcacggttcggccatgggcgccaacgaccgtatcaacatcggcatgatcggtacgggcgaacgcgccgggtcgcacatcggcgatctgggcaaattgcaggaatcgcacaatgtgcgcatcacggcggtttgcgacgtgtggcggctcaaccgggaagccgcggcggcgagggtcaagaaattgtttggcaagaagcccttcgagacgtcgcgctttggcgaagtgctcgcgcggagcgacgtggatgcggtggtcatctcgacgccggattttgggcatacgccgattatgatcgaggcgttgaaggccggcaaggatgtatacgttgaaaagcccatgtcgctgacgatcgaggaagcgaatgaagcgttggatctcgcgcggaaaaacgaccgggtcgtccaggcgggcacgcagcgccgcagcgagggctgctggaaggccgcgcgcgcctttatcgcgtcgggcaaactcggccaagtcacgcgaatctcagcggcgaacaatgtgaacgagccgcgctgggcgcgcaagttcgacgattgcaaggaagaagatgtggattgggacgcctatttgttcaaccggcccaaggtcccgttcgatccgcgcctgttgcgccgctggcacttgtacaagatgtgcacaaacgggatttcaggtctttggatgagccatctcgtggatgccgccgcaatccttatgaatgcgtcctatccgaacagcgccgtcgcgctgggcggtctctacatgtggaaagacggccgggagcatacggatgtcttccatgctttgctcgattatccggaaggattcttgttcgattggtgcatgggcctgacgaattcagcggggaatcattacaccgttcacggtcgtaacggcacgctggagccggagaaactggcttattccggagacggcggggccggtgatcaaaaactcggggagggcaaactcgaccccgtgccgaatgaagaccatgtggccaactgggttgactgcatgcgctcgcgaaaacggcccaatgcggacattgaatttggccatcagcatgccgccgcgacgatcatggccgccaacgcgctcgagaccggccaacggatgcggtatgaccgcgaaaagcgaacgatttatcccggttgacaaaccggacaagccgtaacgggaacgggcaggattcggaatcgggaggcggcatggaaacgcaggcagcggtgcggtttcttcaggaacgcgtggcgcttttcgatggctttgacgccgggcgcttgggcgcgcttgtcgaaaattcacgttttgtttcctttgaagagaacgaatcaatcatcgaattcggcgaggaaggacgcttccttggcattctattcgacggcgaggccgaaatatcggtcatgaacgatgcgggcgaccgtcgcacgctggccctgctcgagccgggtaatctgttcggcgagatatcgctcatgaccgggggcaaaaccattgccgatgtcattggcaagacccgttgccgggcactgctcgtcccgcaggaggcgttcgcgcggcttatcgccgtcagtccgtccgccattcaatacttgtcgcggcttattattgatcgtacccgcgcatcggcctacgaggagcagaagtcgcagctgaatgctgccgcgttgcgccgcagcgaagatccctatggcctgcgtcttgccacggacaagccgatgaaactccttgtggtcaactgcggtagttcgtcgcttaaatacaatctgttcgacacaacggacgaggcgggcaatgcacatggcgtcatcgagcgcattggccaggaaggcacgcggcatcgccgtcattccgcgcggggcgacgacgagacggcgttgcgggccgccggtcacggggaagcctttgcagccatgatcgaagcgctcaccgcgccggatacgggcgtgctcaagtcgctcgacgaagtgtcggcggtgggccatcgcgtcgttcacggcggcggacggtacagccatcaggaaatcatcacggacgaggttctcgccgaaatcgagaaggcgtccgcgctcgcgccgctgcacaatcccgtcaacctgatcggcattcgcgaagcgatgcgccttttcccaaatatcccgcatgtggcggttttcgacaccgccttccatctcaccatgccgccctatgccttcctgtacggccttccctacgagtatttcgagacgaagggcattcgccgttacggttttcatggcgcctcgcacaaatacgtcgccatgaaggccgccgaatttctcaagcggccgttcaatgaactcgaaaccatcgtgtgccacctcggaaacggcgcatcggtgtgcgcggtggatcacgggcgatcggtggacacttcgatgggcatgacgcccgccgagggattgatcatgggcacccgttgcggcgacattgatcccgccgtcctgattcacctcatgaaaaccgagggccttgacgcggccggtcttgaaagcctgattacccgggaaggcggtctcaagggcctttcgggcatctcgaatgacatgcgcgagatcgaagcggccgccgatcagggcgatcaccgcgccctgctcgctctcagaaccttcagttatcgcgtgcgcaaatatatcggtgcgtacgcggcggccatgggcggacttgacgcgcttgtcttcacgggcggcatcggacaaggcagcgttggtgtgcgaagccttgcctgccaacatcttgccggtatgggcatccgcattgacgagcggaaaaaccgggaagccgacggattcacgcgtgtctgcgacatcggcgcagacgattcacgtgtccggattctggtcattccaaccgatgaagaacgcatgatcgcacgggaaaccctgcgcgccatcgaacgccggtacgttaccgaaatcatccgggcccagaggcccatgccggtccccatcgaggtttcggcccaccacgtacatctcgccggggaacatgtcgaggcgctgttcggccaaggccgcacccttacgccgaaaagcgatctatcgcagcccggacaattcgcgtgcgaggaacgtgtggatctcgtgggacccaagggccgcgtggcgggcgtgcgtgtgctgggtcctgtccgttccgaaacccaagtcgaaatcgccctgaccgagcaattcaaactcggcattgacgcgcccattcgcgaatccggggatttgcgcggaagcccgggtgtgaaactggagggtcccaacggatccgttgaactggagcagggcgtcatctgtgcgctacggcacatccacatgacccccgaagacgccttacgcatgggattacgcgacaaggacgtggtctgcgtgcgcgtggagggcaaacgtgaactcgtctttggcgatgtgctcgtccgcgttagcccgaattaccgccttgcgatgcacatagacaccgacgaggccaacgcggcccacatcggcgccggtgcgacggggttcgtggacgccatccagagcaggcgatgacgcagtggcgggcgcgtgttttacggccttgaaccccaagacgacatggcctatcataagcgtgtaaaccggtggcatgggatccaaaaaagccgggcgcgtgcgcccgatgctggggagtagccgatcgatgagtcagaaaattcgtatcgaattatccatcatgatgttcatccagttcttcatctggggcgcgtgggccgtcacgatgggaacctacctcggcaagatcggctttacgggcgcggacattggcaaggcgtacagcacgacggcgtgggcggccgtgttgtctccgtttttcattgggatggtcgccgaccgttttttcccggcgcaaatcgtgctgggcgtgatgcacctgcttggcgcggggttgatgttctgggcctccaccgtcacgacgcccggcctgttcttttgggtgctgctcggctatgcgttgtgctacatgccgacgctggcattggtcaatgcgatttcattccatcagatgaccgatcccgccaaggaatttccctcggttcgcgtgcttggcacacttggctggattgccgtggggtgggtgatcagcctgatgaaggtcgaagacacggcactgccgctgcaaatcgcggcgggcgcttccttgctgatgggcctgtattccttcgcgttgccccatacgccgccgaagtccgccggaaagaaaatttccgtcagccagattctgggtttgccggcgctcaaactgatgaaggagccgtcctttgcggtgttcgtcgtcagttcgttgcttatctgcattccgcttgctttttattatagtttctgcaatccgttcctgaacgaaaagggcatgccgtatccggcgctcaaccagtcgctgggccaggtgtccgaggtcctcttcatgatcgtcatgccattcttctttgtccggctgggcgtcaagaaaatgttgctgatcggcatgctggcatgggcggtccgttacgcgtgttttgcctatggcgcggcgacgatgccgttgatgggcctttattacatcggcatcattctgcacggcatctgctacgacttcttctttgtgaccggccaactttatgtggacaagaaagcgccggaggaaatccgcgcgaacgcgcagggtttcattgcgctggtaacgtatggcgcgggcatgattatcggatcgaatctttcaggcatgattgtggacaagtttacgacgttggatgcggccggaacgctggtggcgcgcaattggcagtccatttggctgattccgggcggcatggcgctggtcatcgtggtgttgtttgccctgctcttccatgagcggaacggcgccaaggcggagaaggcgtaaagctgagttggcgagagcaaaggacgaaaaggacacaaaggacacaaagggctttcgttgtcggtgaggagtccttttggtccctttcgtccctttcgtccttgggcgtccggccttgaaggcgcccgttccagcgagaacggcagggaaggaatggtcttatgaaagcggcaatcaaccaatgggcatttccgaatgacatgcccgcgcaggaagcgctggatcgtgtgaagcgcgcggggttcgatgcgttcgagatctgcggcgggcccggcgggccggtcaaactcgatgcgaccgaggccgaaatggccgcgattcggcgacatgcggattcgattggcattgggttgaccagcgtcgcgtcgggcgtcggctgggactattcgctgtcgtcgcccgatccggcgatgcgggaaaagggcaaggaagcgattgcccggctgcttcaaatcgcgaaatggctgggtgtggataccctcctgacggtgccgggcgcagtaacgccggacatatcgtatgacgcggcaatcgaaaacgcgctcgatgccatccaaggtctcgtacccgtggcggagcgcctcggcgtgtgcatcgccatcgaaaacgtttggaacaagttcttgttgagtcccgtcgagatgcgcgatttcatagaccaattccagagcccacaggtcggcgcgtatttcgacacgggaaacatcgtggcatacggctatccggagcagtggatacgcattttgggcgatcggattcggatggttcacgcgaaagactttcgggcctcgaccggcaacatggacggctttgtgatgttgcttgaaggaaacgtgaattggccggctgtgatggcggcgtttcgcgaaatcggttacgacaaggcgctcgtcgcggaatacggcccatactcgcattcgctcgacgcgatgctcgcgcatgtacgcacaagccttgggacgattatcgaactttgaaacagccgtgacccgaagggcataaaggccaaaaggacctgaaggattaggaagacactgcagggtgggtgacgcgaagcggaacccaccaaatgattggggagtcgtgagaaatgaatgtggcgatagtcggatgcaacggaatgggccgtcatcacgcacggatggcggcgaattgcgggttgcgcatcgtggtgtgcgcggacgtccagaagcccattgcacgggcgctggcggatgcccatggggcggattcgatgaccgattgcctcgcggcggtggagcggcgcgacgtggacattgtcgccgtcacgaccccaaccccgacgcatacgttttacgtcgcggccgccgcgagggccggcaagcacattttctgcgaaaaaccgttcgggcgcacggtcgaacaatgccgggaggccatggccgccgtgcaaaaggccggcgtcaaactgttcgtcgggcatgtggtgcggtatttccaggaattcgaggcgatgcgcgcacaagtcgaggccggtaaggtcggcaagcccggtttcgtgaaattgtaccggggcggaatctttccgacgggcgtaaacggctggtttcgcgattattcccagagcggcggcgtcgcgttcgacagcatgattcatgacctcgattggctgcgctacgttttcggcgagccggaacgtatcttctgccaggccatccagcgcagcacgccggaacatcttgactatgccatggcgaccgttcgcatgaagagcgggctgatcgcgaaagtcatcggaacatgggcccatccatccggtttccgtgtcgaggcggaaatatgcggcgacaagggcatgattcagttcaatagcgacgaggcgccgttgtttgtggcgcgacgcaacacgggagggggcgggccgggcatgatcgtgccggccagcccggtgccggtcagtccctacgaactcgagtggcgtgattttctgtcatggattgaaggcaagtccgccgcgcgcgtgacgccggaagacggactcgcggccgtccggatggccgccgccgcgctcaagtcagtcgaatccggcaaaccggtcaatctctagggaggatgccgtcatggccaaagtcggaattatgagtttcgcccacatgcacgcctatagttacgcggcgtgtctaaatgaacttcccgaagcggcgctcgtagccgtctgggacgatgacacgaagcgcgggcgcgccgccgcccgccagtttggcgcggcgtttgtcgcaaacatggacgcgtttctcgcgtcggacattgatgcggtgattgtgacgtccgagaacgtgcggcatcgcgaaatggtcgaaaaggccgccgccgcgggcaaatggattttgagcgaaaagccgctttcgccggacgtttcggattgccgcgcgatgatcgccgcgtgcaagaaggcgaaagtgggtcttggtacggcgttcccctgccggtattcgccgccgctcatggaagtgaagcgaatggtatcctcgggagactacggcgccatctatgcggtgtcctgcacgaacaacggacaatttcccggcggctggtttgcgaggcaggccatggccggcgggggtgcgacgatggatcacacagtgcacgttgccgatgccctgcgctggattaccggaaaggagttcacgaaggtctattgcgaaaacggtaatctgctgcgcgaaggcattgacaccgacgacatcggcagccttcacatggagatggaaggcggaattcaagtttcgcatatcgcgtcatggaatcgctcgaaaagttttccgacatggggtgacgtgacgcttgaaattgtcgccgaaaaaggtatcatccgcgtggacgcgttcaatcagaagatcaacgtctataatgacgaggccgtgcgggcggaatgggcctactggggcggcaatcccgatttgggacttgtacgcgacttcgtcgtggcctgtgacgaacgccgcgaacccgctgtcacgggtctcgatggcctgcgcgcggtcgaagtgaccgtcgcggcctacaagagcgcggcatccaatcgcgtggccgccgtgtgaggcggacaggagcacaggagatcggatgatgaaacatatacaacgggttacgattccgcggatggctgtcgaatacaaggccgaggtctacaaacaggactcgtttttcgcgccgtttgtcgcggccggcaaactggtggcgcttgtcgcgggggcggtcttcggcctttcgtcgctgctttccggattccgaaccgaattgtaacgcccttgcccgaatataaaggaaatggccggaagaaatcggatcttccggcccatttctcagcgacctcttgcgccattgagatcacaaaaaatgatggcagcccgctgggcgcggggcattgccggcgtcaggccaaggcggattttcccgaggatgccttgtcgcggtgatcgctttcatacaccagcagcgggtcttcgtgattgagtatcactccgggcgtgatgacgcattcgcgcacgtcgttgcgcgagggcacgtcgaacatgacgtcgagcatgatttcttccagaatggatcgcaatccgcgggcgccggtgttcttggcaatggcgacatccgcgatggcctcgatggtctcatccggaaaacgaagtttgaccttttcgagttcgagcagtttttcgtactgcttgacaagggcgtttttgggttcgaccagaatgcggatcaggtcgtttcgattgagttcgtgcaaggttgccaccaccggcagacgtccgatgaattcggggatcagaccgtatttgatgagatcttccggttcgacctgctcgagcagttcgccgatgttgcgctcgtttttcggacgaatatcggcgttgaaaccgattacgttggtgcgggtccgccgttcgatcaccttgtccagtccgttgaacgcgcccccgcagataaaaaggatgttttgggtgttgaccgagatgcattcctgctgcgggtgcttgcggccgccctgcgggggaacgttggcgacggtgccttcgaggattttgagcagcgcctgttgcaccccttcaccggaaacatcgcgtgtaatcgagggactgtcgctcttgcgggcgattttgtctatctcgtcaatgtagacgatgccggtctcggcgcgggtcggatcgaattccgacgcctgcaagagtttgagaatgacattttcgacgtcgtcgcccacatagccggcctcggtcagcgtggtcgcgtccacgatcgcgaacggcacatcgagcatccgggccagactctccgccaacaacgtcttgccgcagcccgaggggccgatcaacatgagattcgacttctgaatctcgaccccgccgatgacgccccccgccgcaatgcgcttgtaatgattgtgcacggccaccgaaagaatgcgttttgcgtgttcctgaccgatcacatactgatcgagaaacgacttaatctcaccgggcgtcggcacctttaccgaacgcttgaccttgcgctggttgcgttcctcggccacaatctccgagcagagattgacgcattcgtcgcagatgtttacatcgggacccgcgatgagcttattgacttcgtcgtggcgcttgccacaaaaagaacatgcgggaatctcgttgcgccgatttggaggcattcgattctccttctaccaatggaactatcggtcatggtatagcacttttcggcgtttttgtcaagagttttctttccgccgattaccgtaaccgcctatattgtgccagccgacggggttgcccgtcaagaaagattcgggcatccacaatctgcacgctacgggaagtcggcatccttgccgaccggtatttacgcaaagcccctctgattttgccggtcaacccgaagtggcgcgcgaggacatgcgccactcccaaccatcaagagcctcgcgatcatgtctcttctactgaaacgcggccggtacggcatgaaacgcacacagacgcatcttacgtgcggaccgcggacaatcccgctttccatgaaatgggatccccgccgtgggcgagaagttgcatcaatttgacacgtccagttcgttccgcaaatactgctgcctcaatcaggcaaccggcaaggaggaatggcgccatgacggatttcacgaatggcaatggacgcgtacccacgcttcatgtggtgggtgattcaattccgcaggcctattttcgggccatgaaagccgtttgggaaaacggtttggccatccggacggaatacgaccgcaaggacaattccggttcgtatattgatccgccgagccgcgatgcccgcgttttgattgaagtgaaggatccgtttgcgcaaccgcgttttcctccgatttcgttttgcgaaattggcgtatatatcgccgaaatcatgggactcaaggattaccgggtcgttccgttcgacaagcttcgcgaggcggttcatggggaattgtcggcgcaggaatggccgtacacctatcatcagcgacttttcgcgcatccctgctcggatggttcgacgcttgatcagatggccttggcgatcgaacgcgttgtaaagacccctcattcccgccgggcggttgcctcgaccgccgtgccgacagtggacccgtttttacgggaggatatcccatgccttcgcgaggtccaattgcgttgcccggaagacgcggacggacgtcttgtattgaatatgaacacgatgtggcgatcccgcgatctctacaaggcatggggggacaacgtcattgcgattactttcctgcagcagacgattgcgcggacaatcgcggcggcttccgggcgggaggttcgcgtgggcagttatgcggactacagcggcgcgcttcacatctacggtcaggatttcggcgcggtcgggggcgacgcggagcgcggcctgcacagtttcttcgagactttcgacgaggaggcattcatcgcgcgatcgctgaccagcgagatggcccgcgacatgcttgtgctaccgcaacttcaaaacctgctgacggatcgtcagcgggaacaatggggatttcctcctgaatccattgcgctgctcgaatcgctgattcgcgacatcgaaaacggcgattgcatggtgtagcggcaggcaattgaaacagtggatggttccagacggggttgttgcgttcaagggcggttgatatcgcgattcagacgtcgtttgggtggcttttcgcgaaaacgatgtagcggctggcgaaaaaattgaagatgagaccggccaggatgcccataatcgaagcgatctgcggaatgagggcgggccagagcgacaacgcgccgagcgttacgccgtaattgaccacggcgccgaccgagctggccgcgataaagccgaacatttgccgccaaaacggcccgcggccggcataggaaaacgtgaagcggcggttgagcaggaaattcgtgatcatcgaaacaaggatggccacggccacggccgccttgaggggaaccccggcccataactctacggtgagcacggccaggttgacgaccgtgccggaaagaccgaccagcccgaattgaacgaaatgcgaccagttgccataacggtaggtatagagccgccggacgtgttcgagatagcgcaattgttccttgaacgaaagtttgctttcaccgtgggcgcgcttgctgaaatggatgggcacctcgcaaacgtttttgcatccgcacttgatcaacagttccagggcgattttgtatccgacgggattcagggcgtccgcccgatcgaaggtctcgcggcgtatcgcgaaaaatccgctcatcgggtcccgcacggaggtcagcggcagggcgaaccatgtcgccacccggctgtttatccagcgaaacaggccccattggtcgtccgtcgaaccgccggggacgtaacgcgaaccgagcgcgaaatcatggccggcatcgagcgccgcgatcatttccggaatcttttcgggcgggtggctcaggtccgcatccatcacaagcagcgtgtcgccgcgcgcttcgcggaatccgtcgagcaccgccggactgagtccacgattcgccgtccgaacgacaacccggacccagggtttgttcagcgcggcgacggcctcgacgatgccgtcacggctgtcgtcgtccatgaaaacgacttccaaatcaagcgcgcaggtctcgcgaacgcgttcgatacgcgcgatcaattccggcacgttggccgcttcatgatacgtcggcacgatgacggagagagtcatggatatcccttggcaggctgtggtttgaagactctaggcggatcgacatggaggaagcggatagggcggcgcgcatcatctcttgcctttcagccgtatcattcacccttcatccttctcgtcttagcggtcgcgcccggattcggccctgagcctttcgacaaacggtgttgaaacggaaccgcccgcggcttcgatacggtgcagttcatgccatgccgcattgtaatcctttgtatcgaataacgccaccatgaaggggcgccatgcgccaagaaaaacaggatccgccgcaaaggccttttcgagacgggcgcggcactccgtaattttgttctcgatgagatccacaatggcaaggcataggtgggaaagcgcatattggggatccaatcgcgcgcattcctcgaacgtttttctcgcttcgtcgttccggcccgaaccgagttgtccgagacctgaaagaaacagatccattgccttccgggtcggggcgggatcgcccttttccgcaagcacctgggcgagccgcccataacgtatgcccagatccggattcaactcgccggcacgccgaagcggcgcgaccgccgtatcgaaatcatgggcatcggccaacgccatgccccattctgaataggcgatcgcatagccgggatcatggcgcgtggccttctcgaaagattccgcggcggcgcgcaactggttgttctggcgatagccataaccgtccagcaaggcccggatcgccgcggcgggtccggatatctcgttgcccgattcgatggcgcgcaagagatttccatagatgtcgcgggtaggcgatccggccgatccgatgcccggaatgcggtggagggcctgtcgcgccgtgtcgcgatcgccgtgttcggccagcgccacggcaagattgccatatccttccatgaaatccttcggatcgggcgggcttttgccgtccacgaccggcttgccggtggccgtgatcgcgtaggccaggacatgttcgataccctgaaattcctttaccctgtaccgcagatttcgcgcggccaacagcgcgtcgagttgtttgtgtggtcccgaatcgaaatagtccaacacgaccaccatccagaccgtccgctcgcaaggacgcgacgcgtcgccgcaaccgtaactattcagcaaaaaagccgcctgatccacaagcgtttcgatggtttcggcggaagataccggattggcgcagcctcccatgttgaacagcaacacgtccttccagatggaaacttgcaccaaaatcggttcgccgggcttggcctcgtgtttgagaaatcggcccgccgacagccagtcggtgcgctgaggtcctggaaaaagcattgcggtctggcaggccatcagggccgcacacgcaatcgttcccgttgtgcgcatccaattccggggcagcgccgctatcgcgcctccgatcagcacgtaaagccccagcgaactatagaccgtgtaccggggaaaaatgcacggacgccatgcaaggcttgccgcatacaggatgaccggcggaagcagcaggaacaggataaacaacagtgttgtccggtcgcgcggtatgcgccttgcgccccaggccagcgccgcgcccgcgatcgcaagccatgccagatcgaacaacggatggagccgcgcccatgcgcgcatttgcgcggaggggcgcatttggtaagtcagatggatcgcatcgtccgcaaaaacatcacccaggaattcaagaaatccgggcgtcttttgccaggaagccgtctgttcgggcgaccagaattggatccctgcgacgtatagcaggagcggcgccaccatgatcgcatgcaagccgcaccatacgaacaggcggttgatcggctgccggtgggcgagcaggagataaacgccttcggcaaacggcgccagtaatccgaaggtatggctccacatcagcaggatgttcaggagcacatgcgccgcccaccaaggccactgtcccccgcgcaaaattcgaagcagggtgtagagcgaagcggaggccagcaacgccaccagtccgtacatgtggatttcctgtgaaaaatgccgatgaatcggagacaatgccacgagggccgccgccaacagccccgcaaccgggccaaaggccagcgatccaatcgcgtacatgaccgcaatcgtcgcaatgccgaaagccaccgatgccaggcgcagtccgatcggcaaaggacttatgaatcggccccaaaggtattcgaaggcgtcgtaaacgggcatggtcgccgggtcgagtgtatggttgatgcgcagaaatgcgggcaggcttggcgcgtcgagatacttcaggctcgtgtattcgtcccaccacaccgattccgcgcgaatgccgtacaggcgcaatgccagcccgcccagcagaataatcgccaggatcaggcctgtgtatcttcgggacgtttgttccatgtcgccaagatccgtgtttgccggacagtataggatattcgggggcggacaacgaattcggcgggccggggatgcctcgactcgaatgcgacattcagtcccctttcgtgctcgcgctcgtgcccgtaatcgtgctcgtaatcgtcatcctaacgcggctcagccgcaaggcctcaatcaaggatatgatttctttgtccgcaacttctgtgtcccatgcacagaagttgcggacaaagaaactaaggctcttccggttttggcgatcttcagccccccttcgataataggcgccctctgtagtagggtcattgtggcaacaccatgagattcgacacggcaggcatcctcgtcgggaatgggcagcttctgtagcggggatggattcatcgcaagacgccgcgagtattccatttccccggaggggaaaaacacgaatagccgcgggtgataacccgcgggacgggatcgtggaagatgaccctgaaagggtcgaacgtgaaagggtcctccggtacctaattgttcaacccgttccgggttgaccgctggatgatccggttccgtgggttgacacccacggctattcacgtttcggcccctgccggggccgggggccaccgtcaatcgggggcgttgaaggaataggggacgtctcacgtcatgaggccggtccggacacgcccgttcaaccggatcagaaaagatcggaaaaagcggatgagccgaaactaatcgaagatcgcggatccaagtttttgttcccaacaatcaaggaccgatgacggacagacatcggctacccgtttgatcttgtctcgttcgaatcagtgggatgcgagcagcgcacgagcaagacgaggcgcacatacggaccaaataggttttgagatttccggcacaacaccggacgcaatccccctgatccctatacgtgatacgtggcgtgttgatgcagtgcggcattcaaggtattatgaattgcggaagataaccatggattctaaaatcaaaatcgtgatccttgtatgtgtactcgttcttgcggcggtgattgacgaaacggggcatgcggaagaaggcgacgccggaaaagcgccgatggcgctttggacgttcgaggagccggtggaagcgcttcagttccatggcgcaccggataagacggtttggacggccaagaccgatcaggcgatcgtgcgccgcggaggcgtgcggggctatgcgctggatttgcgaggcaatcacgcaatccgggccggcgctttcgatcggtcccggatgtccgctctttccatcatggcatgggttcgcccgttggaccttacgggtttccgcgaaattttccggcaggagagcgacgaccgtgtgctgttttcgtttcaagatagcggaaacatcctgtcgctgggcttgaatgtaaacggttatgtggaatgcgacgcacgcatcgttccaaaacagatcctcgacggcacatggcatcactgcgccggaaccttcgacggccacaccatgcgcgtctttctcgacgggaaggaaatcggcgtcctcgaacggccgggattgatcgcgttgtcgcccggtttgccggcgttcattggttcaatgggcggaacaaacgagcattttcagggcggcctggacgagttgcgcctctatgacgtcgcgctgggcgcggaagaaatcatggggcttttccgtcaagggctggcgtccatttcggaaaattccaaacggctggacattgccgccgggaaactctacgtggaggcgccgtccttttccgaaaccgtggccaacacgcgcaagaacctccgtatgcgcggtcccgcggccgatccggacttgacggatgcgcttggggcgagattgcgcgccgcatttccggacgaatgcgccgcctttttcgagtggaccggcacaaccgccggcgcgcttctgtcccaggacgaatcgtcgaacgaagcgcaggcacggcggcttatcgaactcatgctcgaatataaaccgctgacggaatatcagaagcaaaagcagtcgccggaagatcgcgcgaaatgggacgaggcggagcgtatccgcgatcggtttgaacggttgtcggcacagggcgagtcggctcaaagttccccggaatggttcgatctgatgttcgacgccgggcgtcgaatcgcatttcgtccccgcgtgtacgagcccgtcgcaccctatgtaaaacccgaaacgcccgaaacgcgaaacttgaccgaagacgaggcccgggtcgcaatcgaaagcgactggatgcaccaggccgatcaaaatccgacaccggaacgcattcgcgatgaaatccgttgggcgcgtgaaatggctgcgcatatccaagtggacgtttccgaaccattggcccgattggacatgctggcgaaaaagattccggggaaaaccgccacggaactttgcgatttatatctggccgtgcggatggcaaaacgcgaaatcatgttcaagaatcccgtgatcgatttttcgcggctgctgctggtggacatgccctatccgcagggatccgaatggcagcacgagacgcgccatcgtctcggttacatggccgtgcccggcgcgcggctgatcatcctcgatggactccatccggcgggaaatgtcacgcaactgatgccccaaccgccgttgcatggatcactctggcggcccgacgtgtcttttgacggcaaaaaagtcctgttctgtttcaaaccgcacaatgaaaagtcgtttcacatttatgaaatcaactgcgacggatccggcctcgtgcagttgaccgatggggtctacgatgacgtggatccgatctatctgccggacggccatatcatgtttgcgacgacgcgcggacataattacgtccggtgcatgccacccaccaattcgttccaacttgcacgggccgatgcggacggtgggaacatttatctggtttcgtacagcaacgaacccgactacctgccgtccgtaatggacgatgggcgtgtcgtctatacccgttgggagtacacggacaagcccctgtggcgcgcgcagaaattgtggaccacccatcccgacggcacgcaggtggccacgttctggggcaatcagagcgtctggccggatgtcatgaaagacgcgcgcaatattccgggcagtcgccgcgtgatgttcaccggcagcgcccatcacgattggtttgcggggtccgtgggcattatcgatcccgacaagggcctcaattttcccaacggattgaccaaggtcaccgccgatgtcgagtggcccgagtgctacaacggccccgtcgatcccgtcgagtcgccaagttaccacgtctcaggcaagtatccggcatactactcgccctacccgctgagcgagcgtgattttcttgtatcggcgcaacgcgacggaaagttccggctctatctgatggatgtggacggcaaccgcgaattgatctatgagggtgtccacaacatttttcatgcgatgccgctcaagccgcgcgcgaaaccgcatgagatcgtggaccgcgtggcgtggccgtcccgcggggagcgcgataatcccgcgccgggcgtgctgttcagcaacgatgtctacaaaaatgcgccggaagaactgcgcggtaaggcgcggtatctccgcatctggcagatagacgccaaaacgtacacctactggcacaagcgtccgtacatctcgaccggccccgtggtgtccgccgtgcagtccgaaggcgtgaaacgcctcatcggcaccgtgcccgtcgaaagcgacggatccgtctcatttacggctccgtcggggcaggctttgcactttcaattgctggacgggcattttcgggccttgcagacgatgcgcagtttcgtcggcgtgatgcccggcgagagccgggggtgtctgggttgccatgaatcgcacagccgcgcaccgggactcggtgaaaaatccatcgcgggcagcgcgccgccgcgcgcgattgaaccgccgccgtggccggacaccaccgtcagttatgcgcgttatgtccggcccgtgctggaccggtactgctcccgctgccacgagggggacggcgaaggccgcaagacctttgatatgaccgaacggcccagtccgccggtgttttccgaaccgtacatgacgttgatcgggcgtccgacgtggggtgcgccgtatacgccgccggaaaagcccgtgccgggcttcggcatcgccggggtgctcatggtcgaagcgttcgatcagcgcgatccgaaggcctatgtgacgccgaaacccatgacgagcctttcgtacaggagtccgttgattgaaatggtgtccagcgggaaacaccatggcgtcgttgtggatgagacgagtcggcaacggctcatcgcgtgggtggatgccatgtgcccctatctcggcgacgaggaagtacgggccatccccgatccggaattccagggcgtggactggctggccatccggccccggatcgcaacggcgcccgttgtcgtgcgtcccggtccggtggatgaagacgccaaaccgcccgcatgaccgtcggcatgatgaaaaccccgtgagaagacaacgattgacgattacgataagccggcacgataaaggaggctgcccgtgagtttgattattggatgtctggtatgtggaatcggcggcgcgacgacgccgctcgtggtggtgtcgttcaacttgcgttacggcacggcgctcgatggcgaaaacgcatggccgaaacgccgggaattgatggtcgaaacgatccggacaatgaatccggacatcatgggaacgcaggaatgccttgagtttcaggcgcaatacctcgccgaggccatgccggaatatgcctggatcggcgtggggcgcgagacggacggcaagggtgagatgagcgcgctgttctaccggaaagacgcgttgacggctgaggaatcgggccattactggctttccgaaacgcccgaagtgcacggttcccgttcgtggaacacgagttgcacgcgcatggtcacatgggcgcggtttcgccatgccgggacaggggcggctttccatgtgctcaatacgcatttcgatcacagaagcgaagaggcccgcgtccaatcggcccggctgattgtccagcgcttgttatcgctgccgcgggaaatgcctgtcattctcacgggcgatttcaacgccaacgccgaaacatccgccgcatggaaaatcctcgttgagggcggattcaaggatgcgtgtctcctggccggggaacgtctcggtcccgacgtgacgtttggcggattcaaagcgccgcccgacgtaaaacagcagcgcatagactggattcttgtccgaaatgccggcagtgtgcagcggtatgaaaccgtcacgttcaacaaggatgggcgctatccttcggaccattatcccgtttccgcggtcatactcattccggggacgccgtgaaaccgccacagacagaagatttcctgccgcgcggattgaccgaagcggaagcccggcggcgtcttctccaggaaggccccaacgaactctccgcctcgaaaccccgcggactggcgacgatcgcgttcgaggtgatccgcgaaccgatgtttctgttgctggtcgcatgcggcgcgatctatctggcgttgggcgatatccgggaagcgatgatgctgttggggttcgtgttcgttatcatgggcattacgttctaccaggaacgcaagacggaacgagccttggaggccttgcgcgatttatccagtcctcgcgcgctggtcgttcgcgacggcgttgaaaagcgcatcgccgggcgtgacgtggtaaggggcgacatactcgtgttgtccgagggcgatcgcgtgcccgccgacgccgtcgtgctttcttgcagttacatgtcggtggacgaatccctgctgacgggcgaatccgtgccggttcgcaaagcgccctggcacgaggccgcgaaacgggaatccgccgggacggaccggccgggcggcgacgatcaggctcttgtttattccggaaccttggtcgtgcagggcaaggggcttgccgaagtttgcgcaatcggcatgcagacggaactgggccggattggcaaggcgctgcaatcggtaacggtcgaaaagacccgcctgtccgtcgaagtctcacaattggttcggaatgtggccattcttgccgtttcgttttgtgtggccgtggtgttgatttatggattgacccggcaagattggcttcaagggtttctcgccggcatcacgctggccatggcgttgatgccggaggaatttccggtcgtattgaccatcttcctcgcgctgggcgcgtggcggatttccaaaaacaacgtgctgacgcggcgcgtgccggcggttgaaaccctcggtgcggcgacggcgctctgcgtggacaagaccggcacgttgacacagaattgcatgacggtgcggcgaatcctggctaacggccgcgactatacggtggattatgcctccaaggagccgctgccggaagcctttcacgaaattgtcgaatacagtattttggcgtcccagatcgatccgtttgatccgatggaaaaggctttcaagcaattgggggaacggtacctgcacgataccgagcatttgcacgtgaattgggtgctcgagcaggaatatcccctttcgcgggaactgctggccatgtcgcatgtctggcgcgcgccggacagcgacgaattcgccaccgccgcgaagggcgcgccggaagccatcgctgatttatgtcatttcgacgaagggcaacaggccgccatgacggcggatgtaaaaatactggcgcgcgacggtctgcgcgtgctgggcgtggccaaggcccatttccggcgaaagaccatgccgggcgagcagcacgatttcgagttcgaatatctcggcctgattggctttgaggatcccgttcggcccgccgtgcccaatgcggtcagggaatgccatgcggcgggaattcgcgtgatcatgatcacgggggattatccggaaaccgccctgtgcatcgcgcggcagattgggcttcattccgccgacgaatgcatcaccggcgcggaattggacaacatggacgatgcggccctgcgggaacgcatacggacggcccatattttcgcgcgggttgtgccggaacagaaactgcgactggtcaatgcgctcaaggccaacggcgaaatcgtcgctatgacgggcgacggcgtcaatgacgccccggccctcaaatcggcggacatcggcatcgccatgggcgggcgcggcacggacgtcgcccgcgaagcggcgggactggtcctgctcgacgacgacttttcatccatcgtgcaggcggtgcggctgggccgccgaatcttcgacaatttgcgcaaggcgatggtctacatcctggcggtacacgtgcctattgcgggactttcgctcattcctgttctcttcaaatggccgctcgtgctgtatcccgtccatatcgtctttctcgaactgatcattgacccggcgtgttccatcgccttcgaggcggaaccggaagaggagggcgtcatgcggcgtccgccgcgcaatccatccgcgctgttgttcgggcgcgccagcgtcgtgttgggcctcatgcagggaatcagtgtgcttgtcatcgtgctggcggtcttcgccgccgcccgctatcgcggccacagcgccgaggatgcgcgaaccctgacgtttgcgacgctcatcgtcggcaatttgggcctgattctgaccaatcggtcatggtcccgcacttttttctccatgttttcggtgcgcaacaacgccctgtggggcgtaatcatcggagcgccgctgtttctgggattggtgttgtatgtgccgtttctccgcgaactgtttcactttacgccgctgcaccttgtggacatcgttttcgcgcttgcggccggcgccgccagtattttatggtttgaaggcatgaaggttctccggcattcggcatgaacaaaacaggccaggcagtggtttcatgagcaagcgccgcaaattcaaaatcggacagcgttccccggacgagatcaaacggcttcgccggcgtttgctcagcggcacgctcgccgaaattcaccaaatccgcgacgaatggcacggtgtccattaccggtggtggatcattacgctgtccggcgtgctggccttgttcgtgctctcgtatttctcctacacccaactgggctggtacgcggaccagcgcccgctgccgacgggcagcgactggcttctccggcgcattccggcggtcaatgtgctgcccatcctgtcgtggggctggtttgctctgcacctctatgcggcgggcgcggccatcgccttccatccgcgccggatcccgttcctgctgttcatgctcagcgtgttcctgttcatccgcacggcgttcgtgtttctttcccccattggcccgccggtcgaaatgattgacatgggcaaactcgattatctgttctcgcgcctgatgggaacctataccttcaaaaatgaattcatcttttccggccacacctgcatcccattccttttcttcctttttttcgacacaaaaggcctcaaactgctcatgctctgcggctcgatcaccatggcgatatgcgtccttctctcgcacaaccattacaccgtggacgtgatcgccgcctaccttatcgggtattccatctacgtgctgtcggaaaatctgttctacggattcatccgtcccctgttccaagtcttcccttcccaggcgagatattgatgatgaacgtttccgcatggctcgaacggctggaccatccgcctattgaattcaaacgaaccctgcgcgcggtctatgggtcggacgaatccgtcgtcgcggcgcgcctgcgcttgctgcggcgggttttgggacgattccgggaacgcttcggcgacgggcccgtacgcgtatttcgcgcgccgggacgcatcaatttgcgcggcatgcacgtggacacccacggcggctacctcaacctgatgacccaccagcgtgaagtgctggcggccgttcagtcgcgggccgacgcggattccgttttcgtcaacaccgatccgcacttcgaggaaaccgtcattcggaccggtgatgcgcgggccggcgagtcgttccgacgatcttggacggagtacatcctctcccccggcgtccgaagggaggtcgaggcgcgccgcggccattggtcgcattatctggccggcgcatggctcggtatccagcatcgtttcccggatgtgctgctatgcggcatgaatgccgcgatcgggagcgatttgccgcggggcgcttccttgagttcgtccgcggccctttgcgtggcggtatgcagcgccgtgcttgcgctgaacgggaaggaactggccccgctcgaattgatcctcgcggcgcgcgacgcggaatggtacacgggatcccgttgtggcctgagcgaccaggccgcgattatcctcggtgggcaaggcgaactagtcaatttggccctgttcgcgccggatctgaacctggcgagtctccggcgcatggcatttccggaaacgctgcgcatcctggttgtcaactcgtacacggaacgcagcctgagcggcgcggcgctcgtggcctatacgcgcaatcgcttcgcctattcgttggcgatggaaatcctccgtcaggagatgcggcgacagggattccccgaacctttcgtcgccgaaacggaccgcttgtcgcgcgtgacccaagaacgcatcccagaccttccgcgcatcctatgcgccatgccggacgccctttcgctggccgatttgcgcgcgcgctatgccttgccgggactcgacgaagcctaccggcaatacttcggaaccgttcccgaggatcaaagaccggacatgatacacttgcgcgggccgctccttttcggcatcgcggaatccgaacgggcgcggcgctttgcggacgcgctgacggacggcgactggggcggcgccggacgactgatgtccatcgggcacgatggcgaccggctcctcgatgcatccggacggccgtaccggttcgacgtatccgacgggacgctggccgaaatggccgcccaacacacgcccatcgaaatggcgcccggcgcctacggcgcgagcgcgcccgtgctcgacggtatcgtggacgccgcgatcgccgcgggcgcattgggatcatcgctcacgggcgccggcatggccgggaccgttctggcgctctgccgagccgaagacgaatcgcgggtcgtgcaggccgtccgcgattggctgggatcggacgaatatgtaaaacgagccgggaaggaacttggaaaagaccaactggacgacgcggttcacgtcaacgccgcgcctgccgccgccgccgaactgcatggcgaatagcgagcgattcggcggcaggctctaaagatctacggcttatccagtgggcgatagggatgttatggacgaaaaaggcccaggaagcggttggttcccttcgcattcttcatccccggcgaaagcggctctttcgacaacaccacgatggccgtcgcgagcacgaggagggcgatgggtgatgcggcgggaacgctgttgggtggaagaacgttcagaatgtagggccgggtgtattggatgcttttcgcaccgtcatcgaaccggcattcgtagacgccggcgtcttcgggaacgaccgggctcagggtgatcgtgcgggttgtcgctcccgtaacgcggggcggggcatccacgatatccgcgccgtccttcttccattggtaattcgatccgtccggcgccgtcaacgagacgaccatgccttcctcaatccaaccgttggggtggggcgtgatggcggttgtgcgggtccgcgcgcggagattgtcttcgcgatgcgtgtcgagcaatgcctgtagttcggcggcctgttcggggtatagcgaagcgaggttgttcgtttcgccgggatcgttttccacgttataaagcgctcttgcgccggtcgagaggttgtgaatcaatttcatcgaaccccgccggacggtttcgaggttgacccaccgcggcgcggcgccgccccgcgtgtaggcaaagacggggccgtctggatcgcgcgttccgaacagatctttcccttgccacgcgggccgcggcggcaatccggccaaggcggccagtgtgggcagcaggtcaacagtcgtcacgacggaagggacggttgcaggggccaaccccggcccattgacgatcagcggcacgcgaaagaccggctcgtagacggtaaggccatggcccaagtggccatgctcgaacatgtgttctccgtggtccgccgtgaccacgaagatcgtgtccggatgcgtttgcgcaatggacaggatcagccgcatgacttccgtgtccgtgaaccggcagtcgccgtcgaaaagggtccacacggcgtccttccccgtggcggacaattcggcataggtacgtgcgggtatcaggcccagcgtgtaatcaatctgatcgaacaggtaaccgtaaaaattctccgcgatggtctgttccgccgggagcagccccgggttgggatagccgaaaagcgcgcggtagacctccggcggccagaagggcagatgcgggtccatgtaatggatatacaggaaaaacggctgcccggcggtttcaatgcgcgcgatggcgttgttcgtcaactcatcggcgggcaggatgggcgccgaatcatcgtcatagatgtcgaagccctgggcaaacccattgtcaaaggtcaagtgattattgctctgaatgccaattgtcgcatatccggctttgttgaaaaaggtggccatcgtttcgatggcgcttggcagcgtggatgtgcctgtatagacctgatgcgcatccacgtgcagcgacgtaaacaccgaagccatagccggacgcgtccatgtgcaggccgtggttgcgttggtgaaccgcaccgaatgcgacgaccaatcgagcagggcgggcatgacgccctgcccaccgcgttccgcgtcaagccggtcggccctcaacgcatcgagcacaatcagaacgatattgggcggggggaaggccgtcgccgcggtgtccatggccaagaacagcgccgctgaaagcagaaaatatttgatcttgctggtcaaaaagttgcttcaagctcgaccggtggcacaccatctttgtcccatccgcgcttttcgtaatacagcgagagcattttctcgaactcgtgttcatcgagtgttttccccgcgttggggccggtcagcacgggggctttggtcactttgaacgggagcgaatcggccttgcgggtcgcacccagccggatgtttatgcgccgcgtgaggttgtagacccgatcggacagttcgagcagttcttcgagcgtcatcgtcttgcccgtgacataggtgtaaaacttctcgtagtggcgttcgttgaggccgagttcgatccaaggcaagcggcagacgccgagcatgtcgaacagcggccgaacggcttggtggtacatgacaaggtccaccttttgctcggcggaccacgacgcgccctcctcgatttccttggcgatggtccatgcgcgggcgtggtgcgcgccgatgtccgacgtggcgtaggccagccccatggacgtgccgacccggctgtcgtaggctgactgttcgagcccttttacctggagcaggatcttttccatttcgggccactgtttgatgatgcgccgcgatccgtccgcaaggatatcgcccacgccctcccgatgggcgatgcggtgcatcaggtcgaggatggcgtcgtcgtcgttccatgcgatgcccttgccgtcgagatccgccagcgagatgacgcccttttcgtagccttcgatgacggcgccgatgatgctgcccgtcgagatggtgtccatgccgagttcgtcgcacaatttgttggccgccaagacggcgtcgaaccgctcgacgccgaggttcgatccgagcatggcgcaggattcgtattcggggccttccgtgacggtgccggcgtatttgccgttctttacgagacagatgttgctgcagcacatcgggcacatgaagcaggcgctgtcgccgatcttgtaatgttcgagcatggtttcgccgttgatcttgtcgtgggcggcgaaggtggtcgccttgaagttgtacgtcggcaggatgcccttcgagttcgcgtattcgatgacgttcatcaggccctgctgctgccacagccggaaatacttgtgatccgtcatgtatttgacggccttttgcgtttcctccacaagtccgttcatgtcatggaccggcagatccttcgtgccgcgcacgacgatggccttgaggtttttcgatcccatgatcgcgccgatgcctgtacggcccgcgttgcggctccaatcggaattgacgcaggcgaatcggacgcggttctcgcccgcgaccccaatgacggcgatatgaaggttgtgcgagccgagcttctccttgatgatgccctccgcttcgaggcaggttttgcccttgagcgcgggcatgcggatgatgctggtgtgttcgtcgtcaatgaacaggatcgaaagttccggcgccgcgccggcaagggcgagataatcgtggccggtctggcgcagttcgacgccaaacccgccgccaatggacgaatcgccgtaaaggcctgttgccggagaaattgcgacaaatgaatttttaccggacgacggcacgtagcaaccggtcaacggcccggccgccacaaccagcagattctccggaccaagcgggtcaatgtggaaatcatgcgccttgaggttgtcccagacgagtttcgcgccgaatccgcgcccgccgacatagcgctcgatgaaatccccggaaagatcgcggcgttcgatgacgcccgtggtcagattgacgtgcaatcccttgaaaaaatagccgcccttgagattcataactgctcctttccaatttcggcgtattgaagcgtcttcgtctcgcccttttcgacgaattcaatttccttcatctgggtgtagcccaggacgttgttgaggcgcttgctttcgccgagggcgtattcgggcacgagccgaatcgcgtttttggggcaatgcttgacacattcgggatcgtcgtcgcatagatcgcacttgatcggatattcgcattcgtcgtgcgcgtacatcgcgccgaacgggcacgattcgacgcaatgaaaacacgagatgcagacgcccgtatcgaggctcaccacgccgtccctgcggctgatcgcgtccaccgggcacacttcctcacacggcggctttttgcactggctgcacacaatcggcatccgaaccaccggatgtgggtaggtgatgagcacgcgaatcgcgctcttcttggggttgttgacgccgaaatgcttgatcgcgcacaccagttcgcacatcttgcacccggaacattccgcgggaataaccgccagctttcgcgacatcctctgcctccgagtagcccgacttcacaaggcaggagccggaatattccgagttccacgcactgcgaacgactacgacttccgcgattccggcgtgcggcatccacaagccacgcgccgtccatcgcaaacccccggtatactaaggcccgagcagcaaggaatcaagtggaaagcagcgccgctgtgtatcggcaagcggccccaccgttatttcagtctgtaaggcgttatgcgacccagtagttccccgatttcgtcgcggatattgaggagttccgaagcgtcctgcgtatgcgcgttcggggccttggcgatttcgtttcggacacgttcgagcagggccttggcggtttggcggtcggcacggggcatgcctttgggcggtttcttggcgaaggcttgcagcatatggaggtattcgaagtcctccatgccgttgcggatgtcttcccagcgcatgcttgaacagatcttgtcgcgtccggggtacacgatgaacggatcgccggccggcaggggttggcgatcggcaacgtagatgctgccgccggtcgcgtccatccacggcgacacgtccaccgccgccgggacgggatcccacgtcttccaatgcgcgtatccccagtgcaggaatcctttgaggtcgagcgaccacgaaagccaaaacaggatgcggttgcggatgagcggataatcgaggaatcggttgggatactcgccctgtggatacaggcagacgtaactccacgtggcctctttgggattctctttgcggccgggtttgatgtgctggatttgcgggacgcggatgtcaatgaagccgtcaagcccttcgtgcatgatcgcgtccacgatgggtacgccgggcagccacccgcgcaccttgcccgcgcgttccgtccatgatttctcgttgacggggatcggttcgtccgcgatgtgctgaatgtatcggcccgcccaacccttttcctttaggtgcgcccagacgcccttcagaaaggcctccatatacggctcgaattcggcctcggacaacgtgccggtgtcaagcggtttgccgtccgatccaacgatgttgaagcgcgaccagacaaattgactttcccacccgccgcagcgccccgcgacgtggccgccctcgatccacgtgacgcccgccttcttgaacatttcgacccaccggtcgagcgccgtgaaatcgaacgcaaacgcgccgtccgcctgttgcgtcatgcagacgagcatcgtgaagggcgtgaggatcgtatcctgccggtggcggcccatgtcctgcgcgacgcgatcgatccacgtccagcaggcgtcggaaaagagcggaatccggtagtattcggcgagattggcggggaagaaccactccgtttgatgcagcgtcggttcgtcgggcagcgtgaatgcccaaacgtgaatggcaacgggcacgtcaatgtgctgcccgtcgaggtctatgcccagcgtgccggtgtagtcgccgggcggcgtgtctttcgggaccgtcacggacacccacagcggctgcgtccattcgtcgcggatgcgcacgaccggttgttcgagaaatccgtcgggaaagaatcccggtgcggcgcgcaggaaggttttcggatccttgttcgcgggcgggttgttatggacgtaggtataccatatccaatgcgcgccgagatttgacttggcgatgattgcgccgtccggcccttgtagatccggcagcgagaacgacgccttcgcgactgtcagacccttcggggtgcgcagcagaacctgcgcgtcttcggtatcgtttcgcgctgctttcaacgcaatcgcttgcggcgcgtttgccggcttcacggaatccggaaacgccttgtccagtgaatgtgtcgtccaccagtcaatgttttccgcgcgcgcggcggcggaacctatcaggaccgcgcacaccgtgcaaccccataaaaacgtccccatcgcatccatgatcgcatcctcttccgttgaaactttttagtgcgtccaattcgctcgccatcataatcgaaggggcctgtacccttcgaatagatatcgaaggcgtgccggaagcggtttgaaaacgctttcggggggctgatacgataatcggcgatggggatggagttccccgtaatcgccatgtggctgataactcctgtcgaaaaaagagaaggcgataggaggttgcagcatgagagatacgaccgcgagcgtcgaactcctggggcaaatctgcgcgcagtttcatcttcagaatttgacgccgcagctcaatgcatgttccgagaccctccgaagcggcgggagggtggaagtcgccgtgctcgggcaattcaaggcggggaaaagttccttcctcaacacgatcatcggaagcgaaatcatgcccgtgaatgtcctgccggccaccgcggtaattacgcggattgggtacggccctacggatcgggccgtggtccatcggttatccggcgaaatcgaggaaattccgttggccgaactgcccgaatatgttaccgaacaacgcaatccgaggaacgaaaaacgcgtggccttggttgaggtggaactggcgtcgctggcgccgtaccgcggtatatgcttcgtggacacgccgggccttgggagcatcttcgcccacaacacgcaggcgtccatggactggttgccgaaggtgggcggggcaattgtggccatcagtgcgaaccagcccttgggcgaacaggatctgcgactgttgggtgaggtgttcaagcataccccggaggtggtgatccttcttacgaaagccgatctggtttccgatcgcgaacggaaagccgtcatcgaatttacgcaatggcagattgcccagaataccggggggcgtcaactcctcgtccttccgttctcgaaccggccggattttgaacggtttcaaaacgatgtacgcgaatacctcctcacgaacgtggcggggcgccatgaggagttgttcgtgaaaatcatgggacacaaactctccgccctgatctcggaatgccgggcctatctgatcctggcgcagacggcggcccagtccgcggaagcagcccggtccgagttgcgcgacatgattcggcgtgaacgggagggcttggattcgttgggaaaggagattcacgtattgacccgggatttgaaaacgcgcgtacgcacggcggccggcgagcgattccacgatcttcacggcgaattgaccaagcggctttgcgcatcgctgaaaaaagcgatgggcgcatggacgggcagccttgcgaaaaggacccaggcgtttcaggattgggccgcaagggccttcgaggaggaattgggccgcgtttcggagcatggaaaaggatatctcgaagaatacctaatcgaggcgcaagtcagttttcatcgcaccgtgcgggcttttcaagaccggttgtcgaaggaaatcgagcgggcgctgggcatctcgttcgaaagcgcgcggtttcacgccgaaatcgcggcgcccaggaagcctgacgtgaaaatgggccaagtcttcgacagccatatcgatctcctctggttcgccattcccatgggcctttttcaccggcttttcgagcgtcatttccttcggcttatcccttgggaggtggagaagaatctttcgcggctggccagccaatgggcggacgccgtaaacgcctcgatagatagtctcgcccggcagtccatggaatccatacaaaacgaactggcgaccatcgaagggctggtttcgggtgtgggcgatcagtgtagcgccatcgaaacggcccttcgccggctcgacgaatgttccgaatgcttggcgattccaaacggaagaggagacgcggccgcccatttcggaaactgttagttccggaggccggcggtcccgctaccagtaccgggaatgcggaaagatggcgaagcaaccgatcgaaacaagcccgaaccacaagcgggttatcgctatcacgcttagaatggttgacgagtttctgtgcgaatgcgaactatgggcacggggccgcgaactgcactcggttctctatcgggaggaaaattcgctcacatcggaacagcgtgagcagattttccataaagtggaatcccttcgctctgttttgatggaaatgcaacagacactcggactgaagaccatgataaaagaacccgcgcgcatcattcgtgcggcctgttttgccctttgggaatccctgatcgaactgcaggggaagtatatccgcgcgtatggcgaaccctctggggaactggtggcatatctcgatccgaagagcgaagagattatcaccctgctccaagacattttgaagatagtcgaatctgacaagccttccacgaagagttcagcatagatgcatgggctgttgtcatggctaacaagaagaaacttcgcgcgctggacagcgccgaaaaggaacgccgccgggaaaatgcgcttcggcccaatccctatcttgggtacaaccacaatgcattggccttgtatcttttggaacgcgaagcgtacgccattgccgaggctgaactgaggcgggcggtctggctcaatccccatgaaccggtgttcatggccaacttggcgtggtgccttttcaaacaggggcgtgatgaagaggcgtggaaatgtctgcgacaggctgtcggaaaaaatagccataacccgcggatagaccaaatcgctgcttggatgggactgtccggcggccgtatcaaggagggcagcgatgcgccacaagaatgaaaaacacacggcctacttcgatgtgctggatgcgctcgtgaagacggcggagtgcgccctgtgcgcgctcgaatccgtgtccctgaagcgctacttcgacgggctgctttacgagatggtgaacgatccgaaggtccggagcgaacttgcccactccaagggatattgccaccgacatgctcatatgttgctcgaccaatccggcgcatttggaacggccctcctttaccaggatcagattgaggcgtttagaaaatgcctggaaggtttttctgtggcaaggtcgaggtacgtcgccggaaggggggaacgttcctggagcacccatgccgggtgtccggcgtgccgcattcaggacgaatcgcgaaaacggaacctatccgttctttgcaagtggatcgcggatcccgacatgcgcgccgctttccaaaaaagcgccggtttttgcgtgccccatttcttcgttgcggtcgaatttttaaaaagaccggaggattgcgagttcgttgttcaggtccaccgcgaaaaatatgctgatcttgcacgggagttggcggaattcgaacgaaagcacaactaccaattttccggagagatcatgggcaaagaatgcgattcgtggcagcgcgcggtgaagatgattgtgggatcgcgaggcctgttttagattgccgtgaatttgctcttacggcccggcgtggcatacaatagaatacatggggatggagttccccataattgccaagtggctgatgactcctatcgtgtcgaaggatgcggtaggagtttcgtgtaaggaaacccccgcccaaagggatggtccctatccttccaatcgcgtcagttcatacgaggaactgatgaatggaggttttttatggaatcggcatttgcggtagcggcgttatggatggggctggcggtcgccgccacttcgctttcgaatcatttgcggatatcggtcgcgttgattgaaatctgcatcgggatcgcggcgggattcgtggccgatcggtatttcggcgcaggcagccttggcggcgacctgccctggcttcgttttctggcgggcacgggcgcggtgctcctcacgtttctggctggggcggagcttgaacccgccgtgcttcgtaaaaaatggaaagaggtgtcgatcgtcggcctgattgggttcgtggcgccgttcgttggctgcgcagccgtggcgcactttgtcctgggatgggatgttcgggcgagcgggctcgcgggagtcgccttgtccacgacctccatggcggttgtatacgcggtcatgctcgaaacgggcttcaatcaaaccgatttcggcaagggtattctcggcgcgggctgcttggaagtgccttgccgttcggacaggtttaccgagacaatcgaaccgttgcgcgtgtctggacaggacattgtttccgctttctccgggaactcgcatcatcagaacctcctcgatgatacccgatgccgggtggcagccgccaatcggacgcgcgctacggtttcttctcttctttcttgtcgtccttcttcttgtcgaccacgccgtcgggacagcgaatctcgatagtctcaaggcacttgacactacgcccgacccatttgtcgccgggcaggatcagacggaatttgccttcaaggggcggcagaggttccgcgttcttgtcgatggcgatcatgacgcgcttgccttcggtcgtcatggtgagctccgtccaggaagccagcgtctgatagccgtccgttccgcggaacaggacgtacatgttttcgcggcgatactcgctcgcggcttcggcggctttggccttcttgaacagttcgctcaagcggacacccgaatagtcgaagatgccgatgaaccccgaagagtgtcctacgcaaatcaactcctcttcgatgtcgacgggcattttacgcagatccgccacggacagagggatcttcgtgccgtccaagtcgacgattgtcagcgtttccgaggagcgcgcagggccttcagcccacgctcccgccgcacttatcacacttgccgccaatatacacacactccatttcagacaagacatcatactcgctcctgtttgttgttgtcagcacggcttgctgtgaaaaccaaggggactcaagggacaacggtcacggtggcgggatcggtcggttcggtagggccgcccttgccgagcttgtcggccagattgcttgtacaggggtaggtgttcgggtccggtgtggtcgagttgggatcgtgagcgatatagcgaatccattcggcatgggcatcgagatagaggcagttcatgccgcccgggacgtggttgaactggttccccgtcccgcttggattctgacataccatgtcccagatgaccgggatcgtgctttgcgccatggcggtagccgcgggattgttgatgtccgtgacgaagaaacgttcgacgccttcacgcaaacgataaaggcgcgtcgtttcctgtgtttgcgtgtcgatatactcgatatcggtggtcacgaagttttccggcaagactttcttgctatcgcgggcatccttcgatgcgttcttctggatgccccaatcgtcgtcggaacgtgtcgcccacccaatgtacatgtatgaataatcgcggaactgctgcggcagttccttgaagcgaaggtctctcagttggtcgatgatgcccttgattcgccccgcctggggatcggacggacagaagatgatgttgtagtccgacatgtattccggatagacggcaggcccccaaaagaatgtatgcatgggtacggggtccgcgccgtcggcggggtagtagcccggatactggggcggaaaattctgggcgccggcctcgtttgcatacatcttgaataccaggccgagctgtttcaggttattctggcacgaagaacgccgtgctgcttcgcgcgcgcgcgccagtgccggcagcaggatggccgccagtatgccgatgattgcaataacgacgagcagttctatgagcgtaaagccattccttcgcgtcaacattatgcagtccctccctgtgtttatggatcgttgtgttggatgcgagcctattcgatatgcaccgcgaaacataacgatagcataccacgtcttttttcgaatgtaaagtttccgtaattactcctgcccgattggatctttccgcttctcgataagggcgatttccccgataatcatccgtttgtccacggccttgcacatgtcgtacacggtcaacagcgcgacgcttacggccgtcaaggcttccatctcgacgccggtcttgtccgtcgcgacggcttcgctctcgacggcgactccgtccgattcgagcatggcatggacacggacactgccgatattgaccgtgtggcaaagcggaatcaggtcgcaggtgcgtttcgcggcctggatgccggcgatctcggcgatggcgagcacatcgcctttcttgatgtggttctctcggacgagggttattgtctccggcaataaatgaatgcggccgtgtgccctcgcaacacggcgctgcacgggtttcccgctcacatccaccatccgcgcgcggccttcgttatcgagatgggacaactttttcaccttcatcctcctatgctgttaaaatggccacggctcgtctggccgcacaagggtttctccgccacggcgcgcagaatggcctcgcgcgcgcccagttcgcggacgccgaattggatgtcgttgaagaggcacgggcggatcatgccgtcgcatgacaaccgcaggcgattgcagcgcgcgcaatccccgccgcttccgccgatcacgaccgagaaatccccaatttcgagattcatccgccggatatagcgcacctccagcccctcctgccgggcataggccgcgacaccgcgcgcatcgggttcgtcgggtgagtcctgaacgacgcaattgagcttgatgggggccagcccggcctcgcgggccgcgcggatgccttcgagaacacggtgtacgtcgccgccgcgcgtaatggccgcgtaacgggccggatcgaccgtgtcgagactgacgttcacgcggtgaagaccagcttcgacaagtgggcgcgcgaattcggccaggcgcgtgccgttgctagtcatggcgaagtccgcgatgccttccatgcggctcagcatttcaatcaacgcgacgatgccgcgccggacgagcggttcgccgcccgtcacgcggaccttggtgatgcccagttccacggcggtccgggccacttcggcgatctcctcgaagcgaagcatgcattcgtgtccgatgggagggacgccctcgggcggcatgcagtaggtgcaacgcaagttgcatttgtccgttacggagatccggagatagtcgatcttcctattgaatcggtcgaacacggaccaacgttccttcctgcatgacggttgttccaatgggcaacacgatcaatccatcggcatcgcacaaggcattgatatgggccgagccgtgatatgcgccggcttcgacgcgtccatccggcgtgagcttgacgggcagccatgtttcgcggtccgttcctttcgtcttgatgggcgatgccagcggcaacatcgaatgaaacgggtgaaaatcataccccataatcttgtagagaaaaggcttcacaaggatctcgaactggatgaatgtcgagacgggattgccgggcagtccgaagcaatagatgtccggagagacgccaaaggtggtcggtttgcccggttttattgcgatggaatcgaaaaggatttcgacgccgttttccgtcatgatgtccggcacgagatcgaagtccccttttgacacgccgccggagagcaggattacatcgttttccgctatggcccgtttgagcgcactatcaatcgcgggttttgtgtcgcgcgcaatcccgtagtacgttggaagcgtgtccgcggtaagcgcctgcgcgtacagttgatggctgttgctcgtgcgaatctgcgaaggtccggggtactcggtgggctcgaccagttcgtcgccggtggcaatgatccctacgcgcgccttgcggtaaacgcgcgggtacgtacaacccacggtggcgaggaccgccacatgttgtgcggcgatccgcgatccgtgcagcagcaccgcatcaccctcgcggatgtcttcgctctttcgacagatgttgtctcgtgtcgacgcgccattgaagcggacaacgttctcgcgcacctgttcggtgtactcgatcataatgacacaatccgcgccctcagggagcatcgcaccggttgtctggaccgatagcacgacaggcgggtctgcatcgtaggtgcgaatgagcggcgcggaagccgagttgggcgatcccagcgaattgaaggcgacgcccgccggaatcgagacggctatcacaacggttccgcccgacggaatcaggtcgaaggaataggccgcgtccatgccggtgaaatggtccaccgaggcattgtccacgacaatatccgtggcgtcgaaatccatgacggattcgctgaaggtggccgttaccggaataggggctgcattcgttggattgggcgctatcgtggccagaacaaccgtcgggctgggcgattcaaaggtgatgccgagggatcccggcgtattgggattgccggctgtatccgtggcggcgcctgcttccaccgtcgccgtaaccggtccattcgacatgggatacagattgaacgagtagctgtcgcccgcgccgacaaagtcgccgacaatggcattggacactcccacatccgaagcgtcgaatccaaggacggattcgctgaacagcgccgtcaccggaatgggtgtcgtgccggtggggtctgaggcagtcgtttgcagcagcacggtgggcggcgtattgtctatcgttacggtatcgcttggacccgcattcggagcctcgttcccatcggcatccaacgccgttcctgccgcgatggaaatacctaatgcgccatcgccggagatccccgaaatcgttactatccgctggactgctccgctcccggaaatgccgatggttcccgatgcggtgccttcgatattcagaactacatcgtctggaatcaggctgatgctcgtcgcatccgtatagataagaacaaactccaccggcccgatatttgttatgggaatcgaaggtccgacgatggatatgcgggggcccacatattcgtaggcgcccatgtcgaactcggaaccttgaggacgcacgacccccgcgaggtccgtcaggggggcgtttgcggcggtccccgcgtcaatgcacggcgatacagcccggagcctgaaatctcccgctgcgggattccgcaaggcgggatccgcatcgagattgccttggccgggccatccgccttggatatccgaatagtctgccgtggcgatcccgccgttgtccacggcgatttccccgttgccgtcgttccacaggatgcagtttactatcgcgcccgttgaaccggtgcgggtaaagatgccgccgcacgtgtccgccgtattgccatacacggtgcaattggtgaaagactgaatgccgcctccttcattgtaggccgccccgcctgccgttccggagatgttgcccgaaaaaaggcagttcacaagcgagggagcgcagtttcccccgttgtaaatgccgccgccttttactgaagaggcattggcggtgaaccggcatgccgaaaaagattgtgtccccgcactgttgtaggcccctccgccggcattttgggcggtgttggcctgccaagtgcaattggctgccaccaaaatccctccggtggtataaatgcctccgccgtccatgccggcggtgttggactcgaacgtggttgaagtgatggtggggcctgcgccgttgttgtacacaccgccgcccgacccggtcgcgttgttgaaccccaaataacaggaaatcaaccgggggccgcctccctcattataaacgccgccgccatcgcgcgccgtattgtacaggaacgtgcagttggtcaggcgatgggaggcggccttattgtaaatgcccccgcccatttccgatgcctgattgttgaaaaataccgtgttttctacaatcgccgaagcgccgagacaattgtgcatggcgccgcccaagaggccgtagttgccatagaagcggcagttggccacggaaactccgccgccatgattgtacatgccgccgccatatcccagactttcctctccgtccgcacgcccgccggtaatcgaaaacccgtcaagggtggcgcgattgtttccctcgataacatgataggccggaataccggggccgcggccgtttgaaccgtcaataatggtcgtgcgcactgcccagtcgcgctggttgcgttccgtctccgttcccgcgaatcccccgtacagatacacgcggcgctgggttatcatcaggctaccgttcggactgggacgggtttcgtcatagatcccttcggccacccagatttcgtcgtcccgtgccgccaaatccagcgcgggttggatggtttgaaaagccgtggcccaactcaagccatcttccgttccggacaaattatccctgtcaacgtaccatacccctgaaatagcaggaagggaacagagcattgtcagcacgaaaaaacggtctttttcataattcgtagatcctccctggcgcactaccccgctttgttttcatttaattaaacttccctcacatttgaattttacacttatcatagaaaaaagtcaaaaagttttttttgtattattaacttgagagtaccatgttctcgaagttgggaatgtaacgccgatttccaaatcggcttgttgaaacgcgacatgccgatttggaaatcggcgctacaaagcagccattttcaatttcaacacaagatctcgttgcctgatccgacatgaaattgcccggaaatgccaatcttcctggaaattctcatccttattgtctcgaatccgctgaaagaccgcgttggcgaataggtgttccttgtctgaaagggggccgatcccgtataagggttcaggcctattggaggaaacgggcgatgggacgcgtgaaggcgttttacgggaccgtggcggttctgggcggctttgtattgattacttactggggcatgatggttgtttggggcagcgggtcctggctgcatgggacgcgcagtcttcgtctcggccccatttatgtgccgatgttgctgttggggctggcgacgttgattgtcctgccggctttcctgttgagcgtgtgcaggatcatgcagactcgcggccgtttccctcgatggaccgggcttccgggcgccagttgcgcgatggcgtggcaggcgttgttgcttgcggcgctggtgctggttttcgacacgccatggtccggtttgtttcgcacggattgggccggggtttttcgcaatgcgggcaagccggcggttctcgaattgggcgacgaccacctgaattatcctgagctaccgcttcagcccgtggattattatgcgtggtccgtttacgatctcgacggacgggaagtgccgatggcgtcgttccgcggcaaaacgcttttcctgaatttctgggcgacgtggtgcatgccgtgccgttccgaaatgcccagcgtgcagcgtctttacgacgcggcgaaggataagggcgtggcgtttgcgtttgtttcgcgggaagaggcggagactgtccgcacgtttatgaaagcggaagggtacacgctgccggtgtatctggcgaaagaacgccccccggcgttcatggccattaccgggatccccgcaacgatgatctttgcccccgacggccaactggcatttcgccacacgggcgccgcggcgtgggacacacccaagactcttgagtttctcgcgaaactaaccggcgttccgtgaaatggacagtcccgtgaatgaaacgaaaccgcttggcgggggtgatatccggcgattgcgcgccgattttccgctgctgaccgattccggcgttccggtcatctatctggacaatgctgcgacgacccagaagccgcgcgccgtcattgatgcgcttacccggttctatgcgctacagaacgcgccggttcatcgcggcatttaccggcttggcgatcaggcctcggccttgtatgaacaggcgcggagccgggtgtcgcggttcattggagccggaagcagcagcgagatcgtgttcacgcgcggaacgacggaaagcatcaatctcgttgcgcagaccttcggacgtcggagactcgggcccggggatgaaattctcgtgaccgaaatggaacaccatgcaaatatcgtcccttggcaaatcgtctgccgggaacatggcgcgatcctgcgatggatacccgcgggccgggcgtgcgaagtgcgggccgatgaattggcgcggcgcctgggtccgcgcactcgcctgctggccgtcgtccatgtttccaatgtgaccggaaccgtcaatcccatcggctccctcatcgaaatcgcccatgcgaaaggggttcccgtgttggtggacggcgcccaagcggccggccatttgccggttgatgtgaccgcgctgggctgcgatttctatgcgttttccggccacaagatgctggggccgatgggcgtcgggatcctgtacggacgtggggatctgttgcgagacatgcccccgtggcaggggggcggcggcgcgattgcgcacgttggccgcgattcgtccaccttccgcgaaccgccggcgaaattcgaggccggcacgccgcccgtggcggaggccatcgccttggccgaggccatcgaatacatcgaacgggccgggcgcgcgcgcctcgcggcctatgagcaatccctgattcatcaggtcgagcgcggtctgaaagccattccgggcgtccggattcatggcgatcccgccgaacgggccgcggcggtttctttctctttggagggtgtgcatccgcatgacgtcagccagatgctcgatgaagacggtatcgccgtgcgcgcgggcaatctgtgcgcacagccgttgatggatgcgctgggcgttccaggagtcgttcgaatagcgcccgccttttacaacacaccggaagaaattgacttgacgatgcaagcgctggaccgcgtgcgcgggatttttcgatgaacctatacgaccaagtcctgctcgaccataaccggaatccgcggaatttccgccccatgcccggcgccacgcattccggcgaggcggataatccgctgtgcggcgatcgtatcgccgtttttctgcgcgtcgaggacggcgtcgtggccgaggcaagttttcagggcaaggcgtgcgccgtggccacggcatcggcctcgctcatgaccgtcgccgtgcagggggaggttgtggaggaagcgaaaaaaatgtgtctttccgtgaaggcttttctcaatgaccgggcggaaccggcgccgaccgcttcccttgccatgcttgaacgggtccgcgattatcctgttcgcatcggatgtgccgaattgccgtggacagcggttgccgccgcgttggcgacgggggaccgacagccctaaagcggatcgattggcaattcggggcaatctttttcatcagatggtattgacaatatgagaaatcagcgatatagtagtcgcgacaagtgatagcttgtgcagtttggcggcgaatagagaagtttgcgcgtcggtaaatgcgacaaaaacatgagaaaggagatcgttggggacgtttacccaagcaggtgatggccgaagtgtaagggcagttttccgaactactggcgaagtccaacacaaagggttgtcacatgaaaaagcaaggttttacgctcatcgaattgctggttgtcatcgccatcattggcatcttggcggcaatactgttgcccgcgcttgcccgagcccgtgaatcagcacgccgttcgagttgccagaacaacctgaaacagcttggcgtggtgtacaagatgtacgcgaacgaaaaccgcgcccagaaatttcccatgatggccgcccggttgtcgtatcaggtccagaatgcggaggtcatctacagttcgtacaacgaatgcggatacaacaatccgtatctgccgccgacggcgggcggcgacgcggaattcgtgccggacgggaagtccatttatcccgaatacctgacggacgtgaacatcctgatttgtccgtcggattcccaggcgaaaaaggcccagcagtactggtttatcaacggcaaggtggatccgtgcgcgattacggccgaatcgtacatgtacgtgaattgggccctgacaggacgcgacggcgaaggatatttgaaatccggcgcggatcccaatccgggcaatatgcccttgggcgtggcggcgattggcacgtatctggatcttggcttcatcaccaaggtcaacacgcttctcacgcagcagtcggccatcgatccccccggctcgcaaaacctgtatgacaccgacttcaagttcacgaaccaggacggaaaagaaatcaccatctatcagatgcgggagggtatcgagcggtttttcatcaccgacatcaacaatcccggcgcaacgacgcgcgcgcaaagcgtcattcccatcgaatgggatcttgccagcacgaccgccgatgagttcaaccacgtgcccggcggatcaaacgtcatgtttctggacggacacgtcgagttcatcaagtatccgggcgaatttccgattacgcaggcctttgccgtcatgacgtccatgttctagcgtcgtgagtcgccgatgcaagggacaaacgaccacagcaagtgaacaaaagggactgacccgcttttcgggagtttgatcagcggatcagtctttccttttttcgcggcctttctttcatccttgcccggcttgccgaaaaagaactcgatgcgaagatgtgggaagaggcgaagcattgcacccgcatcccgcattcaagtttgaatcgcttgcatcgaacatgtaggtctttttttcaatctctgggtatctgcgtcatctgtggaagatcggaagacggtccgtggatgccgaaaaaaggaagtgggattgtctttgccccaatcgcctgcaaagaacttgacgcaaagggctggaaaacgggactcctgaaaaaagcgcggttattccggtttctcttccacggccgggtccgggacgaaaaaggccagggaagcgaaactgatggaggttcgggtgtcgcccgttttgcgcgcggaaatgtcatgggccagcaggcggccggttgcggatttcggcacgatccgcagcaggatggcgatggcgtttttcgcgcagattggattgcgggtatcgtcgagatagcggacaaagccccggaaatcccgcgtgagaatgaggcggaacgcctccttgtccagtgcttcgatggattcgatgatgttttccttgaaagggcggtaactgaagttgttgccgtaatgcgtaaagtcggaactgacgaccagcagggtccgatcatccatcagggggtgaagcgatttcgcgacggcttcgatcgcgtccacgtcggtcttcttctggtaatcaaggaaatcgccgactaggatggggatcaagcggaacgttccaaggcgttcctggaggaagggcaacgtcgcctcgattgaatattcgatttcgtggacttgcacgcgggacgaatcggcctggtagttgacgctacgcacttcgatgagcggcgaaagatccaactgccggatgctttggccatccaacggaatgctgcccaagggggtttggtaaaactcgaccgacggaatcgagcaaccgcggaaggaactccggtgcgacgcccccagcacgataacgcgatcgtattgtcccggctgaagcattcccagcgcggcgcccgcaatggcgccggatgtctggtacggcgcatgcggcacgatgcatgccgccattcgttcgcccgccgggggccgcgcgtctttcatgcactccttcagggccgattccagcgctgctttgtcggctggataccagacacccgcggcgaccggcagggcaaaacgcgttacagcttcggacaagccgctccacagaagcgtcaggcagatgccgtaaaaaatgtggcgccgcatcgcgcgttgtctcccgttgtcggaacgtatctgaaaatgtatcgaatcggctgcaggattgtccatgtgaatggttgaacaaccgagcggccgtttagggtatggttcgatggttcattgctgttcaggcgcaatgcttgggcatgggcagggctttgccggccttggatgatttttcggcggtggcgatcaccgcgatgacgcgccgggcgctttcgggggtcacgacaagcggctcgccgagcatgagatgatcggcaatgttgcgataataggcgtgccagtcggactcgaagtacttgagcgtcgcctcggatcgcacgccgtcgcggtaactgatgacagtaaacttgtcgtcatcgtagtcgaggatgccgcctttcgtacccaggatgcgccatcgcggtttgccggccgcggcgatttgcgacaattcgatgaaggcgctgcatccgttcgagaagcgcaccgtggccgagcaatggtcctcgttggtgacatcgtgccagacgcgtttttcctggaaatagccggagacctcgacgatttgcgccggaacgagtccgagggtccaatcaacgacgtgtgcgccccaatcgtagaacgcgccgccgctgatctttttttcggaccgccaccagtaactcggatggccgtatccgcccatgcaggcctcgatatggaaaacctcgccgatcaggccgctggcgatcgcgtgtttgatggccatgtagtcgccgtcccagcggcggttgtgaaagacgctcaacatgcgcctgttcctgcgggcggcggcgatcatcgcatcggcttcttcgatggtgatgcagaagggtttctcggtgatcgcatggacgccggcattcaggcattcgatgacccgtttggcgtgatcgttgtgctcggtgatgaccgtggcgagttccacgcctgatttttcaagcatttttcgtgaggaggcgtaggtcggaatgccgggaaagtcctcctcggcctcaatccggcgctgttcgacaaggtcgcatgcggccacaatttcaaaaccggcggcgcgcatgctttcgagatgaagtcggcccatcttgaacgattttccgtatccgatgacgcccgccttcatggatttgatctctttgcgaccaaaggtccagtccacgcccctccggatcattttctggacttcggggtgattcagcgagcgttcgtcgtggcccagcgcgaggaaaaagacccggcctttgccgtgggtccgtgtgtatgccatgggctgcggcttgccccgccacatggccgttgcaaggacttcgcaggaatccgcctggaatttgtcgagcagatacagttcgtccgtcacgcggaaaggttgtatccgccgcgtgatcatcgaatccgccgctgtcggcgtcacgggaaactcgaattgcgcatcgtgcccggcaaacgtcgagccgagcatgtccacataagccgcatttttcgtgaacgaggccgccgcgccatgcaatccgatgaatgcgccgccattcttcacgaaattgacaagcccattttcctgatctttccgtagttccccgccgtcggcataaacgattgccgcatcaaaacgcccgatatttcccgcgcgcagcgtgtttaggtcgtgcgtcggtgtgaccagataccgcccggtgtcttccagaagtttttttacaatttcgccgcaccgatcgaggggatgatattgtccccccagtaccatgaggatttttttcatcgtcgccattccgcgtcctttctctgctataattacacggtgtcaaagtgcattgagtgcgattttacgtacataacggaggaataacaaatcgccgcgggcggggaggcaatgacgaaaatggatggggaggcgaaagtggttgcctgtgccgcatgcggtcatgtcatgaaaattccgccccagtatgccgatacgccggggcggtgtggccggtgtggcgccacggtaaacgatcgcgttttgatacccgccattgatctgtccgatctggggccgccatcccccaaaaagaagacatctgcggccgtccagaattcagaaaccttttcgactactgttcgccgggcgttgctggcggggttggccggtgctttggttggggggggtgtcgtaggcgctttctttactattcgtcgcacggaggggcaggccatcacgccgggcactcttttcgcaaacgccaacacggggctcgtgctcggtttcacgatatgttcgctgtttttctttgtcaagcatttgaattggggaccgttcagggcggccggggctggaatgctcagttgtgtcgtgatcggctccgtcatgtttctcttggaagcccgtttggttgccccgccggacataggtttgtttgcccaaatcgcgatggccgccatggcgggaggggtcgcggggttgatcatgggggccaaattgaacaacgaagactgaccgtatgccggagacctcggccgccatcatgttccaattcataaggagatggcggatcacacattgaatctccgccattgcagccgttttttggggcctatcccatcgcgtgtgcgcgggccgctggggttcgtttttttgaatcatgttattagggaggcatatacttttttcgatcgttgagggaacgggaggtgagcgatgcaaagagtgagtgtgttggcttttttgctgttatggtgtggggttgctttttcggtcgagttcgtgtttgaagaacaacccggatcgtgcctgttgaaaggcgatggaaaaacgtggatggccacgatgatggccgctttcgatccggcaaaacgcgatgagacatacaaagtctacacacatatccacgattttcagggcatcgccccgattaccaagggaccgggcgggaaatatccgcatcatcgcggtatgttcattggctggaaggatgtcgtggccaacggtctccacttcaatttgtgggaaatggcgaatacctcgcagcgccatgtggcgtggctggaacgcaaaggagggctggactccgcgcggcaatcggagcgcatccactggtgcgatccggagggaaaagtgcttatcgaggagacgcggacccttgccgtccggcccggtcccggcggcgtgcgccttttcgattttcagtctgtgcttttggccccgtccggcgacatccagttgcgcggggatcttcagcacgccggcatgcaggtccgcatggcgcaagaagtggcggaccatgaagattcgacgaaatacattttgcccgaaggcgcccaggaactgccggacgacaaggtcgtgggtgcatggtgggtatgttgcagtccggttgtgcgcgatgtgcgctattgggtcgttcatatgacaccgtccggtcatccgttgggtcagccggtgtattcgattcgccggtatgcgcgattcggtgcgttttttgagccggacttgcaggccggaaagccatcggcattctcgtttcgcattgcggtatcggacaaggaactggaccgcgccgcctgcgaatcgctgtatgccgattattgcaagcccgccccctgattcgattcggagacttacgcgtgcgcaagttggcggtcacattctacggcatcattcacggatcgttgatcaaggaatgcgccgtcgtgccggaacagcgcgcggaactgtgcatggaaggcgacccgtggctggcgacggtttcgacgccctacgatccctccgcccattcggatacctgcaaagtctttacgcatttgtatagtccttgcgacgggctgccgattacaaaaggggcgggcggtttcgattcgcatcagcgtggcctgcatatcggctggcgacgcacggaagtggaagggcggaacttcgacacgtggcatatgacggattgttcccagcgccatggcggatggctggctgaaccggggcatgtggccgcccacgcgttcatcgtggattggtgcgacgcgggggggcggcctttcctgcgcgagtttcggtccgtgttgtgccgccgcgcgcgatatggcgcgcgcatgttcgatttgcagtcgcggctggccgccgtggaccgtcctgtcgccctgcgcggggacccgcaccatgccggtgtccagattcgcctggcgaatgaagtttgccggcggccgtggggcacccggttcgtgctgccgggcaatgcacaacgccggcgcaacgatgtcgtgcgcgatgcgctctgggtttgctgcctttccactattcgagacaagcgccatgccgttttgcacatgacccatcccgccaatccgggtctcgaacatctagtctatgggatacgcgcctatgggcgtttcggggcctttttcgatgcggatttgaagcccgggtttcccatgcgcatgcgtttccgaatcctgtggaccgagggcgaattggacagagatgaatgcgaggctctctatcgcgagtacacctcatccttctgaacattacaagcccggcaaggcaatgataattcccgccttgtgggcaggatgaacgatggggaccccatggacttgattcggcgcctgatatcttatcgtctccgccgcggtccacggcgtcgctggtgtggacgtttacggtgggaactgtcgcgctggggttcgcgggggctttcgggaacccggatcgtctcggcgggaatgtaacgggcgagtttgtcttcggtcgagttgtaacagtcgcagcggggacaccttgaaagccgttcggcctgctcgtcaaggtagatatatccgcaaaacgtgcaccgccagagaaactgtttggttaggaccgcctgtattctccgggaaacgatttccgtatgcgtccagatgacaatggccagcgcgcacagcagggcgctgtaaaaaacgagcgcggaggtaagcgaaatctggatcatgatgatggcgcccctgctttttcgtgatcatccacggtctttgccgatggccgtttgccgttcccgtcttcctttccgggtgtcgccagcgtgaagagtccggcttggggcgtcatgggtatgtgccgcattgcttccctcatgatccgccctcgacctcgacgaataacgtgccgcgttgcaagtggacgttttcaatcggttcgaattgaaaacggggaagcacagtttggagttccgagacgacgccggtggcgtcttcgatggaagtttggacgttttccacttttcctttttcgttgacgctgaaaataatcgaaatgggagccgtaagccgggccggttccaggcgccacagggaagcgatcggaggaacaaacagggcgcggcgatcccgtggatcggacatccattcgacgaacagcgcaattccgggcgccggacattccaaccgcacgcggttgggcgttgtttgatcggttcggggccatgcccattgcgagagcgcggggccgattccgcgcaattcgctggtgaaccgcgcccatgaatcgggcgtgtcggcctcgcgcgtctcgaagagttcgctgaactgggaacgaatcttaagactttcttccgggctgcgcaagaccggcagggacgacgcgagccggggtagttcgacgggtggcagcaagtcggtatccgattcatcggccaacgcgagcagattcgggtaccgatcggtcggcatcggctgatcgctgtccggggttgggggttggacaaggccgatggtaaattgccgtgtttcgggttttggcagaagaatcacgatcgaaaaaaccgataccatcgaaagatgaaacaggaccgagacggcgagtgctatgttaaaagcggatgcgcgcggcatgacgcgttaccgttgcggcggcccggcgggacgggcggcaatcgtgcaatggcggatgccggcgtcgttgaccagtccgagcacttcgatgagccgcgcgctttcgatgcgggcatcgggccggattacgacggtgatgtccgggcgttgcgcatgcgcctctgcgagaatgcgcgaaacttcgtcgaatccgcccacctgctcctcattcacaaaaatcccgccctcatgcgaaagcgtgattgacaagtctttttcctcgtatgcggacggcccggcggcctcggcggtcttgatggtcacggggaactgcgtggcgaaggttgttcccagcatgaagaaaatcaacaggttcagaacgacgtccatgagggccgtcatatcgatcgtggggcggatcctgggcttccgttccttgcggaaccgtatgaggcgtttatccgccgccgcttgcatcatggggcctatccgtcctcgccggttcggtgcattgtcatcaattcaacggcttccgatgcgccgacttccatttcaacgatcatggtgtccacgcgcgtaacgaaataattgtacgccaccatggcgggaatgcccacaacaagccccgcaaacgtcgtgatcagggcatttccaatgccttcggcgagatcggaagggtttaccatgcctcggcggttctcgatggccgcgaagcatttgatcatcccttggaccgtacccagcaggccgagcaacggcgcgacttgcgcgcaggttcccagtccggcgagataacgttcgagacggggtatttccagccgtcccgcgtcttcaatggcctcgcggatatcggttttggtgcggttgtgcttgaccaggcccgcttttacgatgcgcgcgatgggcgcacgggtttcgtcgcaggtttgcaacgcctcctggacgcgatcctgccgtagcgcggcgcggatcagatccatgaattcccgcgtgacgactgtgatgcggcgcagcgtgtagaagcgctcgatcgcgatggccaacgcgacgatcgagcaaacgaaaatcggccacatcaccacgccgcccctgccgatcaattcgtatgcggtgttgtatcctgccggtaacatggcttcaagcctccggtaagtctaaagcgtgacgagcgtgcccacgcccttgtccgtaaaaatttcaagcagaagcgcgtgtggaacgcgtccgtcaatgatgtgggtgcgcgatacgccgtgatccagcgccttgatgcatgcgtccactttcggaatcatgccgcccgcgatgattccctcgcgcgtcaactgggccacctcgccgtgccgcagatggtgaatcagcgaatccgggtcgtccttgtcgcgcagcacacccggcgtgtccgtcagaaagacaagtttttcggcctgaagcgccgcggccacttcgcccgcggcggtgtccgcattgatgttccacgtgcccccctccgcgtctgtcgcgagtggggcgacgacgggaatcatgcctgccgcgcagagcacgttgaggatgcgggcatgcacattgacaatctggccgacatgtccgatatcggcgccgtcctcgaactcgatctttcgcgcgtgcagcagattcgcatccttgccggaaaggccgacggcctgcccgccggcttggttgagcagcgtgacgatgtccttgttgaccgttcctgccaggatcatttccacgacttcaatggcggcgtcgtcggtgacacggcgcccctgatggaacttggattcgatggccagccgtttcaacatgccgttgatggccggtccgccgccgtgtacgacgatcggattcatgccgacatatttcatcaacacgacatcttccgccgtgctcttgcggatgcggggatccgtcatggcgctgccgccgtacttgataacgaccgtcttgccctcgaacttccgaatgtacggcaacgcctcgaccaacaccgatgctttttgtataaccgcttccatttttctccttctgtcgtgcccgcaagcgcctcgggcggcaactacgtcctgtaatctgcattgatttccacgtagttgtggctcaaatccgatgtccagaatacggtttttcccggtccatttccgacttccacgcgaatgcggaattccggcttgcgcatgcaggccgccgcgtcttcttccttgtattcggccggcatcccgttgcgcatgacttggatatcgtcaatccacatgcacagtttctccgggatgaacgatgcgccggaatagcctgcggcgcaggcgaaacgcccccagttggggtcttgcccaaaaaaggccgtcttgcacagttgggatgtcgcgatggcgcgcgcgatgatctttgcgtcgttgtcggaagaggcgccattcacggcaatttcgacgaattttgtcgcaccttccccgtcacgtaccagcgattgggccatgtgaatgcacacgtcgcgcaatgctgcggcaaagcgcccgaagtcgtccgtgcccggctgtagaaccggcgtgcccgatgccccgttcgccaaacagatgaccgagtcgcttgtgctcatgtcgttgtccacgcatatttgattgaaggatacctcgacggattcgcgcagaatcttggcgagcggctccggttcgatggcggcatccgtggtcaacaggcagaacatggtggccatgttgggcgcaatcatgcccgcgcccttcgcgatggcgcccagccgcaccgtgccgcccgaaagcgctagttcgacggctgtttctttcgggacggtatccgtggtcatgatggcggcggcggcatccgcgctgccgtccgcgcgcagcgatgccaggcattcccgcacgccgttcgcgatacggtccatcggcaacgggaggccaatgactcccgtgctcaacacgcagatctcctcggatcgtgcgccgatgccttcggcaaccatttttgccgttgcctgggcatcggcatagccgcgatcgcccgtgcaggcgtttgcgttgccgctgttcgcgaaaatcgcccgcgcgacgccgcgcgtgcatacgctttcactccagcgcaccggaggcgccttgaataggttgcgcgtgaatgtgccggccgctgtcgccaatcggtcgctgacgatgagcgcgcaatcctttttggtcgaattcggcttgatggccgcagcgacgcctgttgcttggaagccttttgccgccgtcacgccgcccgggatggtcgtcatggcatcatccccgccagtttaaggccggtcgtctccggcagcccgaacatgacattcatgcactgcaccgccatgcctgccgtgccgccgacgaggttgtctatggcgctgacgataatcaggtttttggtgcgtttgtccacgacccaaccgatatcgcagaaattcgagccacgcacataacggatttccgccggtttgccttcgccgagcacgcgcacgaacggctcgtccgcgtagcgttcatagcaggccgccacatcgaagatttccttgagatgcacggttatcgtgctgagaattccgcgtgtgtaggcgcctacgtgcggcgtgaactgcaccgtaaaggccttcagcagctcctgttcgatttccggcgtatgctggtgatttccgatacggtaggccttgacgttttcattcatttccgggaagtggaaagcctccgccacggcccggcccgcgcccgaaagacccgaaatcgcgtccacaacgattggtacatccttgtcaatgggagcgtccacgagcggtcgcatcggcaagatcacgcttgcagggtagcaaccaggcgccgccaccaattgggcgtctcgcaattgatcgcgataatagggaacaaggccgtacaccgcttcccgcacccattggcccgccgtgtgctcgaccttgtagtattcggagtagagacgcagatccttgatgcggaagtccggacccatgtccaccgtgcgaacgcccgcctcgcgcaatgccgcgcccaacgccatggacttcgtgcccggcaccgcgatgaacaccacgtcgcacttcttcgccaacgccgccgggtcgaatttttcgcataccacatccacgagtttaccaaaggccggcaacaattcctggatggattttcctgcctcgacttccgccgcggccaccagtttcgcctcgggatgcaaattcagcaggcgtatcaattcacgcccgccgtaaccaatggcgcctacaagacctacacgtatcatgaaatacacctccgtgggatggattggaaacagccggattatagtccgctgtcggcagggcaatcaaagaaagctcacacattcgacgaattttctactgcagcagccacgcgacaccggcgccgcccaggatgacccaaggcaccttggcgcgcaggagcaaggccgcaaacgccgccgttccgactgcggccaacgatggattccagggcacttccatgccgagcatcgcggtggtggcaagaaggaggccgacgaaggatgccacggctccacgaagcacgcaccggactgcgggacggcggcgcaggcggtggaattccggggccagcgccagcagcaccagaaacgagggaaggaagatccccatggtcgccgcgcaggccccggccagcccttcgcgcatgtagcccacgaatgtggcggtgatgatgatcggtccgggcgtgacttggcccagtgcgatgccgtccatgaatgtccgcgcgtccagccaatgccgggcatccaccacctcgtgcagcatgatggggagggcggcgtatcctccgccgaaggcaaacaggtcaatccgcatcatcgtgaaggccagattgaaaagcgagcggtccacgaagaaaagcaccaccatgccggccaacgctgcggacacgacaagcgcggccgcccgccatgcgtttctccgttgcgtaaagggcgcgggcgatcgcggcgattcttcgtcgcccacacgccggtaaagccaaaatccggccaaggccgcgacggggatggcgatatacggaacgccgccaagtccgagatagatcgcgacactgaaggccagcagtacgtcctgccgatacttcacaaattcccggccgaaggaccacgccgcatgcgccaccaaggccacgaccacagcctgcaatccgttgaacattgcaagaatagacggcaaattgtgtgtccggctgtacacggcggacagggcgagcatgagtagaaacgccggcagtccaaaacccacaaaggccgccagcgccccgcgaatgccgccgatgcgcaatcccaaataccccgccatctgcattcccgtggcgccgggaatcgcctggcacagtccgatgccgtcgtcgaatgcctcggcccttacccagccgcgactccgcacgagatcttcgcgtagatgaacgatgatggccggtccgccgaacgccgagcacccgagaatcaaaaaggtccggaatatttgccacaggtttggattcggcatgggtcgaatcggttgctggtttgtttgcatgtcctggatgatatcatttttcccgcatccaattttggtattgccgggtagggacacctctgtcctgtactcaatccgctcgtatctgcgtcatccgcggaaggccatgcggtcaaccgaggacgcggctattcgtagatgctgaaaagatgaatggggaatcaacgcaagcccgatttcagccagccgcttgtcacgcctcgacggtttgccgtttggggagacgcaccacaaatcgcgtgttcgaggacgcggcgtccaagaacaagtcgccgtggtggttttcgaccatccggcgcgaaatgctcaaaccaagaccgatgccgccgatggtctgtttcgtggtgaagaaggggacaaaggccatttcctgaagatccctgcccaagccgtgtccactgtcggttatggcaaatcgaatagtcgtcccttcatcttcgacgtcgagccgtatccatttttccggcaattctttgacggcgtcgtaggcattgttgatcaggttgagcagcacttggcccaattgggcagagcggcattcaatatggagttcattcggtatgggcgacaccgtcagtgtgatgccggcgtctctacagcgcgccatgcacacttccagtgtttctgtgacgatggtggcgaccgattcccgcacgaatgcgtcggacgagccgtccctggacaaattccgcagtccttggacaatatgttgaacgcgcttgacattgcgcacgatggtcttggtcacgtttgcccggtattcgtttgaaaggcggggatcgtcgagacttcgttcgagttgttcggcgccgaccgaaataatggccatgggattgtttatctcgtgcgcgatgccgcttgccatcgtgcccaaggccgacaggcgcgccgcgttcagcatgagcaactgctgttcgatgattaggcgctgcgcctttacgcgttcggtgatgtcgtttccgatgcaaaggatttcttttatgcggccgttttcgtcgcggatcggccggttggtccacgatatccagacgatgtccccgtttttccggcagttttcgttttcattgcacagatactgttccgggtgttccccgatgccctttatcattgcctcgtgggcgcgcccgtcggaatcttccgggcgcaggatggttccgatgacattgcgtccgatgatttcctcctcggtgtacccgaaaaattcctgcgcgaaatgattgaagaaaaggatgttgccgttcacgtccatgcgcatgatgacgctgttggcgctctcgaccagttcgcggtatttcgcctcgctttcgcgaagggcctcctcggcttttttgcggcgatcaatatcgcgtgtgatgccctgaaatccgagcaatttgccttccgaatcgaacaggggcgccgacaccgtttcggtccaaatcaaggttccgtcctttcggatttgctccagttcataggtcgcgcttcccggattgattccctgttccatgagtttcaaacgctcgctgaattgcgccttgaacgaggcaagcgaccgcggggttataaattccaaaacggatcgcccaatgacttcttccgctttgtatccccgctgccgttcgtccgccgggctgacatacgccgcgcgcagatcgggtgtcaactgccaaaaaacatcgtccacgctttctatcatgaaccggagggattcctcgctttctttcagcgcctcctcggcctgcttgcgttccgtgatgtcgcggcccaccgactgggtttcgatcaggcgtcccgttttatcgaagaagccccggttgacaaactgcatccagcggatttcccccgtgccggcatagacacggttttcgataacaacgacggggttgtccggcgacatctttccgagttgctcttcgatgatcggacggtcatcctcatgcgccaggggttgccagggtttttcaatcagatcgtttcttgttttattgaaaaagcggcaaaaaacgtcgttcacaaacacgaatgtgccatcgggccggaaccggctgatgatttccgtctgatcctccaagacagtccggtagcgttgctcgctgtcgcgcaaagccgtttcgatgaggcggcgttcggcgatttcttgttccaattgccggttgatccgcatcagttcggcggtgcgttcggccacgcgattttcaagttgtgctcgcgtctgctcaagctcctcgaacgctttccgtttttcctccatctggacacggagcgtttcctgttcgacttggagccgttgcttggcccggtgggtttcatacactccccagaagaggccgccgatgaacaatacaatgccggtgctcatgagcggttccttgaccagatggaacggcctcacgaccggacgcacattgccgccgaaagatgagatgccatccatgacattgatgatctggccggccaagataagggcgatgccgatggccgccagaaaagtgatcggccgtacggcatacacgacggacaagacaaacgtggtcccaatgcccaacagaagtagactgaaaaaagtaatggtatcggcgataaaaaaactataccagccttggtaaaagcccacacggcccagtaaatgaagggaaagaaccagcgacagtgaaatgacgacataccacgcgacgcgcggcggcaaatcatattttgtcgccggagatgccccttgatcggcttccgccttctccggttcgttcccgtcacgcctcatgaaatacccctgccctgttcgggccgttgctccctgctcctacctttcccgtatgccggtttcattgtactactttctcgccaaaattgaaaggcctctgtttgaaccaccgcgtaaagcgtcgtagactatattccgccaagtgcgagaggagaagcgccgatgtcggaaacgaagaagtttcgcgtgggggttatcggggtgggttcgattgcgcaggcgtgccacctgccgggttatctcaaagatgatcgggcgcaattggtggctttcgccgaccccgaaccggagcgccacaaggagatggcgctgtcctatggcgagatgcggggctatgcgcattaccgcgacatgcttgcccgggaaaaactcgatgtcgtcagcgtgtgcacgccgaacaagtatcatgccgaagccgtaatcgccgcgctggaggcgaaatgccatgtcttgtgcgaaaagcccatttcaacgacgctgcaagaggccgacctgatgatcgccgccgcgagaaaagtccggcgcaaactgatgattggcttcacgcaccggcttttcaatggcccgaagaaatgcaaggaactactcgaggagaagacgctgggaaaaccgttcatgatccgcgtgcggtttgcgcatggcgggccgtttcccggctgggccaagagtgattggttttaccagaagaatctggcggcaggcggcgcgatgctggacatgggcattcatgcgattgatttatgcctgtggcttttcggcccgatcgtggccgtaagcgccaaggcggcgacgctcgtcaagaaaatcgaagtggatgacaatgcgttgttgctgctcgaattcaaaagcggcgcgctcggatacatcgaagtgggctggaccagccgtcccggattcagcggccttgaaatctacgggaccgagggatccatcatctgcgactacacgcggggcgtgtatctggtggggggcaaggcatcggcggggcgcgacggcaaacacgaatggaaaacgctggacaaatcgcccacggaagggggatggtccacggagatgggctactggctcgatgtggtcacgggggtggaaaaactgaccatggacggcagggccggacgggatgcgttggaagtggcgctggcggcctacaagtcgagccagaccgccaagcgcgtcaccatcgaataagccgcctgcaacctttcgcgcggcgcgggtatatcattgagaaggagggttgccatgattcgcgggctatttgtttcgattggcctttccgtgctggttcttgttccggatactgcgttggcgcaacgcgagccaagggctttccgaaccatcaacacggatcaatacgaggtggccgttcacaagaatggcctgattgacattcgggtgaaccggatcgaaaccattgccaccggtctgtatccgatgatctggattgagggggaggccgcgccgaaaccttttcccgttgatgcgcgatacagcaaccgcgctcccgtgaacaaccgccttggagaaggacaggggatgtggttcaagaaggggacgctggattggattgtggagacgtaccccacaaaacctttcatgacgattcaagtggcgttcgaaaacacaaccaaaaagcccgtgacgatcaaggcgctgattccatgggcgcttggaggcgagaaaaagggttcgctcaatctggggttgggttccggcgggtccgttattcttgaaaacggccgccatctgggtttgaccgacgaagttccccaagtcgtcgccgggaagacgcaatgtctaagcaattgcacggccttcaatccgaccagcggattgtcgttgacggcgggttttctgaccatgcggcatgcgtacggacgaatcatgcttgaattggatgacgatccgacgagggccgtcatgcgcgccgactgtatatttgatccgccgatcgaggttccgcccggaaagcgcctcgaatcggagattttttatgtggcccttactgaacgaaaccccttcgacgggttggagcatttcgggcaggccgtcggcgcgttcaacgatgccggcccgcaaggtttccggttgccgcacggttgggattcatggaacaccgccctcaagagcgacatcaacgaatcgaacgttttggcggcgttggatgtgttcgatcgcgatttgaaacgttacggttggacgcattttgcgattgggggcggttggcagcaggccacgggaacctgggaaccggattccgcgaagtttccgcatggcatgaaatggctggccgaccagatccattcgcgaaaaatgacggccggcctttggttggatccgtttaccgcccatgtaaacagcgccgttgcgcgggaacatccggattggttgcgccaaccggccgaggcgtaccgttccatgctggacccggatgatcgcatcatagatgtgacaatccccgaggcgtacgcgtgggtgcgggatctggctgtacgcgtcgggaacgattggggattcgacacgttgcagcagggcgattttgcatgccggttgctgtatgcggatcggtacgccgcggtgggtgttacgcgcgtggatgtgtttcggatgggcgtgcaagccttgcgcgaagggctaggcggggaatcgttgattacctctttttccccggcgcaggtcacggcgccggtttggcgtcgggagacaggccggaaaccttggggatgtgtcgaggcgatgacgaacgccgcccggcgctattattttgcgccgcattgttggatagccgacacggactgttcctattttgggattgattccacacgggaacggtggagtgtgggccatagacctcccttgtccgccgaacaggcgcaggcatggctgacggccgccgccctgaccggcggcgtgatcaaaatgggcgattggcctccggacctcgacgccggacagcgcgcccttttgacacggcttctgcccaccattggccgctctgcgcgccctgtcgatctctttgaaggcaaaacgcctgcgatttggtcgcttccgattcaatgcgccgtgggatcatggcatgtcgtcgccgtattcaactggaacgatgccgcccctgccaagattcccctcgatttcacaaacctgggtctcaatttcaaccgctactataccgtctatgatttctggcgcgacaagttctatggcctcgccaaggggaggctgatgctcgacatgccgccgggcagcgtgcggctgctgggtctgcgagcctatgagggccgaccgatgtttctcgccacggatcggcatttcacgcaaggggccaccgatttcacccgcctcgaatggaatgcgcaaacccgcctcttgtcgggaacatttaccggcattgcggagacggattataacctgcgtatttttgtgccggacgaatatgcggtgaaatcgtcctattgttcggcggaagcgcccaaaacggaacaggacgggaaagtttacaaactcggttttcgctgtatcgaatcagcaccggtcaactggaacgttcagttctgaaccgcaaggcggtggatttcccacgcgatcgcgccgtttatcaggcccgacgcggcgagcaagggcacgtcgtagccttcgaggggcacgcaggcgtcgggccaatcccacatgggatcaatccatataacgccgcgatcatgagcaaaatcgcgttcgtgccggagcgccgtgaaagcgacacgggcgccggccggccgtgccttgcggaggagatcgtccggcggctgctggtatccgatgagcacaatcatgtcgccgggacgataaacgtcatcgggtttcggcgacgtgcggaatcccgcgttccacacgtccgaatgaaacagttttccgatgtctgttttacccacttcgtccggaaacaggtggcccatgctgtacatgaacaattgtgcgccccgctttctcgccgctcggcaccatgcgcctgttttgtcgagttggcggcgttgttcgcgatccacgcgatccagcatggccttgattgtgttgatatagcggttggcgatgacacccgctgccacgggggggacttctttatcgtcgtgaaaggcaatatcgccgttcttgtactgcgtgatgcgcgggatgccgctgtatgagccgatactttcgtaaatgaccggcattttgccgagccgggtcaacgcggcgatcgtttcgccggtaaaaatccatgcgggaatggcgtttgccagcgtgggggagatgcctgcctcttcggcatgattcggaaaaaacggccattgatcatgaaccggccttgaaccgaaggtcactacaagcgcctgcgtgtttttcagggggtcaggcatgccggcgccgatttcgggcgtgtacaaaaccacatcggcgggatcaggcggctcgcttcccagtgcgcgaatcatcataaagccgccggcgcgtccgctgatttcgctgacgagcgagggctggcccgccgcccatagtttccctccgttggccagagcggcggcggcccgttcggcaaccggctgcatggcggataggtcgccccgggcacattcgatcgcatgcgccacgcgcgccagatacgaaccgttgatcggggcggccatggccgcactcattatgccgataatcgccgtcatcatgcgcggaaaccctttacttgaaagacagtcggaacccttttcccgaaacgactatcggatccaccgtgggaacatcgcccgattcgggcaatagaatccgcatgggggaaaaatccagaatatctttcctgatgtcaatgccgggcacgatacgcaccagttccataccgcgcggcgtcaactggaaaatgcccacattggacacgtaaagcactttcttgcccgtggcaagcgcttggcgtccactgaaggtaatttcgtccacattggcgatgaatttcggcttgccgtattcgacgatgcgcagggcattgccttccagacgaatctttccacccagcatccaactactgacgaagataatcgtccgcgccgcggtcgtgaagtcaatgaatccccccggtccgacgtaattgattgcgccctcgccgcgtttggaaacgttgacgtttccatcgctgtcacattgcagcatccccaggatgctcacatccaggctttcgtagcaccgatggaaaatttccgcgctggtaatcatctttttgggacatatcgcagcgccgaaaaagacgcccggcgctggcaatccaccaatgacgccgctttccgtaaacagggtgatgtcctcgtagagtcccgcctcgtacagcagccggcaaacttcttccggcaggccgacgccgatgttgaccaggctgccccggcgaacgttttccgcgaaagccgtcgcggccaagcgcgcaagcgaatcgtccaccgctgtgcgtctcggcgtgatgcgcagagtttcgttggcgtacttgagtttggcaacgctttccgcgatcggcatgtcgctttcggtagtgaacatcggccagtgtttgcgatgtttgacggaacccgtctgttccgtgcgggggtagacaacgaccgcgtccacatccgatgccggcagaaagatatcgtccgaatttttttcgacgacgtacccgacattgacgataaccaatccaccgtttgcccgcgcggcctttgcaatttcgcgactctccgcgagcatggccgtgtgcctcatgtagatattgccttcgcggtccgccgatggcgcgttgaacatcgcgaccgttatcgggggaagccggtagcgcaatttgccgttttcaaccgcaacccattgttccccggcgggcggtgtcacgggcgatccgcgccccacgcgcggatccatgaatgtgccgatgccggtgcttgtcaacagggatgtttccccgtggccttggccctcgatgaggaacgccataaccccttggggaatgcattggagttccagttttccttggtctgccagacgaagcatcgccttgaaggtttcgagatgtccgctgaaaaaacgcgtgcataagccgggaaggccgagttcttccagcgatcccggcgcgcggccccgagcgcccatgcccccaatcgccatgacggtcaaatcgcgcgggtggcccgtttcctgaaacaattcccgaatggaccaatacaggatggacgcccattgattggcgcccaaacccgaagcggccacgacggcgccgtcggggatcaatttgacggcgtcacgcggtcccatgaatttcggattgtcgggaatcgtgaaccgataatgcgtgtcgcgccggttccatgtcagccgccatttgagaacgtgatacaatacggaaatcttggaaaatagtgtcatgaggggtacttcctctttgaatccgtgacgtaagatagccgcttcaagaccgaaaagcaagagatatcggcgcggccactttacatggccgattccgttgcgctaccgtacccgtcaaaccggaacgaaaaaaaggatcgaagtatgaaagcgcctgtcgggattggggtattgagttttgcgcatggccatgtcggtgcgtatgtggacgtgatgaagaattttgccgatgtgagactggtgtcggcatacgacgacaatgagcaacggggcaagggggtgtgtgacaatgcggggatgcgctacacgccgcatgtcgaagatgtcttggacgatccgaatgtgcaggcggtcatggtgggcagcgagacatgccggcacgcagaattgtgcgtcgcggcggcgcgggccggaaagcacatcctctgccagaagcctatggccctctcgctcgaggattgcgaccgcatgatcgcggcggcggaaaaagcgggcgtgatgcttgccgtggccttccagatgcgtcacgacccggccaacatccggatgcgcgagattgtccagtcgggcgaattgggccgcatcgcggtcattcgccgccgccactgcatcggcgtgctgctcatggaatcgttcgtcaacgggccgacgcattggcatatcgaggccgacaagaacatgggcatgttcatggatgacgcgacgcatcccgccgactggttccactggatgctcggcaagcccgtcagcgtgatagccgaaattgacaatgtaatcacccatgtcgcgcccgacgacaacggtgtggccgtgttccgtttcgcacagggggaaatggggatcgttttcaacagttcgacggtcatggcgtcggaaaacacgaccgaaatctacggggagaaaggctgcgtgattcaaaattacggggacgcgccgtcgtgcgacacgcggctgcctggcgggatagccgtcaagatgttcaagtacggcgagggcaagtggcaggacctcggcgttccgattcctcccggccacggttgccggattcaagccgtgccgaggccctgggtggacagtcttgtgaacgagaccccgccggccgcgacgggacatgacggccgcgtggccgtcgagatgatcctcggcgcctacaaggcggcgcgtgaaggccgccgggtaacgtttccgttatgaaaggatccatgacgggattgcgggctgtttgtcgtccgcaacgggaagcgttgatgcccgtcatggggaaaaaggcagtatgaaggaattcgatctcgacacgatggtggatgtgggttgcgccacgatcctggaagtgcagcagaagatccagggcatggtgatagacaatccggcccgggcgctggatccggtcattgtcggtgcgcggaaaaaggccgcgttgcgcgtggatgtcttcgcggaggattacaccgaggccgaactgcgcaagaaattgaggaaataccgcccccgcgtgatcggggaagagagtcttttgaaggaggatctcgatctatcgcgcgaggatcgcctggtcgtgctgctcgacatgctcgatggcacggatttgctcgagcggggcttgtccaactggtgttcggcgatggtgttctattatccgcccgaatgcaggattttggcgtcgttcgtcggcattccgaacgatgccgtctactttgcgatcgaggatcgatcggcgccggtgcggaaatttctctggcatgtccgccgcggtcagccgcgcgtcattgacgtgaccggcccgtcgtccgtcacggccttgcaggaagcctcgctgtcgttctacggccagcagcccgccaatttcatgtccgttgcgggaaacaggcgttttgccgcgaaactggctgaattcgaaaccgtcaaggacgactcattcaagcgcatgcgcatctataatttggcgggcaatccgatgatgatgaaactcattgacggatccaaacgcattgacgcggtgttcgatttgctggggcaattgccgcacgacatggcgcccggcgcctacatcgcccgccgcgccggcgcaatcctgtgcggcctcgacgggcggcccattctggaagaagatcttgcgcgcatgttgataaaacccgcgcacggggcatcgaaaaggccgtatctgctggccgccaccgagggattgaaaaacgaatttctcgccctcttcggaacggatgcgtgccgggactgagaagtcccgatcctttttttgcatcaatggcgtgttatgcgccggccgcttcgcgcaaggcccgcaggacggcctgcgcggcgccgggggccggatcgctgagcaccggcaggaaaatcgtccgggccatcgcgcgttcggcattcgggaaatcgccgggacggtagccggcatagccctcgctcgcgcacaagggaccgcgattgcgcgtaaaaatatcgaagcctttggcaaacagcggcaagtcgtgcaggttcggatacggcgaaagcgacgcgcccacgccgcgcgccttgatccgctcgacgtaatccgcggtggacagaccccccatggcctccggctcgtgaatgattgggaatccataaaaaccgccgcgctcggcgccctcgtggaccgtgatggggcgcaatcccggaatcgaatccagtccggcctccacttcggcgaaatacgccgcgcggcgccggttcaattccggcagttttttcaattggaccgccgcgatgccgatgcccaggggatgcgcccggaacttcatgcccagtccgagcggttgaagctccgcatattttgccccgaccaaatcaatgcccgcgatgcggttgacctgtccgacaaggcatgcccgctcgaacacatcgaggtcgtccgtggcgatcatgcccccttcccccgcgctgaccgccttcgatccctgcaaactccatgcgccaacatggccgatcgcgccgcacatgcgccctttgtactttgcgccgtgcgcgtgggaacaatcctcgaccacggcgacgcccgtctcccgcgaaacggccatgatcgcgtccatgtcgcagacgtttccccaaagatgcacggcgcacaggcaacgcgtccgcggtgttattttccgtttcatgtcggccggatcgatcagaagcgtatccggattgatgtcgcagaaaacgggccgcgcgcccagcagcagggccggcgcgatgctgcaaatccaagtattgacgggacaaacgacctcgtcgcccggcccgactcccagtccgaaatacgccgagtacaaggccgatgtgccgttcaccaccgacacggcgaacttcgtgcccatccacgcccgccacgcctgttcgaattcgcgcaccacgggcgttccgcccgaaagctcgtttcgacgaaccatgtcggcggccatcgcggcctcgtcctcgccgatttgccgccaccggtcaagctcgcccgccgcccgcgccgtctgcacgaacgcacgcggaccgcccggattgacttccacgtcgagcgccatgttctttcccgatcgcgtgatgtgaaccgctattttttagcggcgtcttcctttggcacgaccttgtcgaaattgggctccgtgccgtccgttccttcttccatcaaccacatggccgcgtccacgatacttgcctggaacgtcggattttcccaaagatcctcgcgatggccgagggcgctgaaatacaccttgcccttgcccaacgcgctgcaccaaatcaccggatacggcgcaatgcgatacgccgcttgttttgcccctgcctcgcccgggtccagcaacgccagcacatgcatcgtttccgtgttgaaatttttgaacagataccactcctcctcgaaactccaatccgccggaatgctcgccatcgccggatgcgccggatccacaatcttcagcgtgcccttgaactgcgcgccatgcgtgacgaattcggcgcccaccatcttcaaatagggcgtcacctcgccgccggccggcgtgtgaaacgtgtccgacgcggaatgaaagcccatgaaacgcccgccgttccggacccactccaccagttcggcctggcccttttcacccatcggcgcgccgccgtccttgctggggcgcgtcaagtcgccctgcgtgtaaaaacacaccagatcgtagttcttgagattgtccgcattgatcaggctcgcatccttcgtgctggtgaaaggcgacccgttttcccgcgcaagccgcccgagaatcgtttccgccagactcggctgatcgcccttgacggccaccgggctgtgctcgaacccttccgacttgctcaagaacaaaatccgcggcggcgtgatatcctgcgccacggccacgaaagccacacccaagagaaccgctgtcgcccatgccgtccatgcaaccattcgacacatcgtcctttcctcccatgcgttttccatcgcgttgtccaaccggcgtagcataccctcccccgcggcgcgggtcaattcgccgcatttgtagtgtattcctgcacatgaaatttggaacgagcacgcaggtaatggtatatagttcgatatgcgggcaagctgaaggattctaatcgacaataggtttttcagtgcttcagaaaggggttgttgattatgaacgagtataatttgctggatgaatcgtggattcccgtactataccgaaacggctgcttcattcgcatcggcatccgcaaagccctcgaagacgcccaccgcattcgaaccatcgccgcaagcaatcccatggaccgcgtcgcaatccttcggttcctactcgccttgctgtattggtgcaagggcaatccaccggatggagcgaacgcaaacactggcgatccgtttccaacggattggttctcgatgcttgatgccaagagagactgctttaacctcctgggtgaggggaagaggttctatcaatacagaaaggctggttctggctcggaaaagaagcttgccgcaaactatttggcacaagaggtgcccaccggcacgaacaaatggcatttccggcatgcgacggacgagaaggatggcttgtgtcccgcatgctgcgccatgggcttgctgcgactcccactattcgcaacatcagggggacgtggcaagccgccaggcgtcaacgcgaaaccgcctctctatgtcataccggtcggcgattcgctcgcaaagaccttgcggctctcgtggaagccaatgcccaatctgggaacaccggcttgggagaagccggaaatggaacttctaaagacgggggagttgcccttactgatgggattcacttggatcccgcgacgggtctggctagataatcccgacaaacccgaaacaccctgcatatcatgcggtcaggtctgccgattgatccgcctcagcgtcttcgctcctatcggaagcaccaaaacgcaggaaggcggtgtaggtcgcttctggcgcgacccacacgttctctattccacttcagccaatgacgaagtaatctcgctgcatgccgccgacgtgcgcgccgctccggacgccgcagcgggacagtgggcaagaatcatcgctggcaatcagaaagtgcggcaagcagatgatcgaatcgggacttggattgttggtttctcgacagtgaacaacgatacgtatttggaggcgaccgaaagccttgtgcgtgacccattcttacccgaacagtcggaggccatcattgccagactggaacgatggcaaaaggaaggatcaaaacttgcccgcaaggcgcgtcccccgaatgagaaggttgcctcgcgaaagcatgtcgaaatccttccaatgctcgatggggttcgtccacatgtcgaaagcaaggtgttcgcggacgtaggcgagttgcttgtgggagacgatgaagcatgggagcaggcggcggctaagtacaggccaatgatgaggatggtagcccgatcgcttgcgcccggcttcacgaccgaggccctacgccgtcgccggaccatacaattcattgtccccaatatgaaacccaaacctgaaccggtcaagaaagatacccggaagaaagggggcgcgagcgaatgacgcctaccgagatgttcatcaaaaccctgacgaacctcaaaaccggcgacctcagcctcctgcgcacgcacgcaggacaaggtctcgatgagtcgctggaaggattcgacctcttcaccggaatctggtggcccttgcgcgagaagaatcaagctgcaccgcgccgttcagtggcatggctgatcgcgaagctctacgcgttctgtcccatccaccaggagcggggatgcgcgctcgccgcgcaattacgccgttgccgacccagcgaacagttctttaagaagtgtgacaggctgctcctgttgccgaacgaccggttggaaccagctcttcaatgggcaatcggaacccttgcttcaaataaattgcggctcgactgggtgcaactaacggacgatttatccatttgggaacgtgaaacaacccgcctcaggtgggcggaacaattactcgaaaacagggaggagaaatagacatgttgatcgaaatccacgccatccaaaaccacagcccggccaacctgaaccgggacgacctcggcgcacccaagacctgctacttcggcggcgtgctgcggtcgcgcatctccagccagtgcatcaagcgcagtatccgaacaagcgagcagttcaaggccttgtgcggcggaatccgtacccggcagttggcaaaattgattgctgaaaaggtaaccggcaaggccgatgtgaagaagcgcgcggcaaagatcctcaaggaatgcggcatcgctccaaaagacgaagacaagagcgacatgctcgtttacacgacgcaagaggcgatccaggagatggcggcgcttctgcaagatggcgacggaaagaccgatgaacaactggcgcaggccttcggcaacctaatcgctgatcggaccgccgtgcctgatatggcactcagcggcagaatgctcgaaaccggtgtcctgaaagacacgaccgtagaggctgcgttgcaggtaggccacgccatttctacgcacgaggcgcgcccggaagtggactactatgtcgccgccgacgacatccccggcgatgacgcgggagcgggttatgtggacgaagcaatgtttgcgtccgcctgtttctacaagtatttctcgatccactgggagacgctggtcgaaaatctgaagggcaacgaggagttggcggcccacacggtcggcgcattcattcgcgcggcggcattggcgaatccgacaggcaagcagaacagtttcgccgcccacaatccgcccgacgcgctcctcatcgagatcaaagataccccggttagctatgccaacgccttcgccaaaccggccgcgcaaggcgaacgcgacatcatcgcgcagagcattgctcaattggcgcagtacgttcacgacctcgatgtcggatatggccagccgcgacagcgattctggttctctcccaatctccgctataccttgagcgccgtgcaggataagaaggagatcgcactttctgaaaacaaccttcgagcgctcgacgaattgattcctgccgtgattgccgcaatcggccatgactgggaggaagtccagaaggttgtcgcaaaccatgaggtggccccatgagcgctaacaccctctttcttcgcctcgaaggtcccttgcaggcatggggcgatcagcagtcgaaattcgtcatccgccggaccgccgaagcgccgaccaagtccggcgtcatcggtatgctctgcgccgcattgggcgtatcgcgcgccgatgcccccgccgagtggctgccgaagctcggcgcgctgcgcatgggagttcgcatcgatgtgccgggcattcgatggtgggactatcacacggtcggcgcgggcatggaaatgcgcattgccgaagcagagggaaagaccaaacccggcgcgatgctcacgcggcgcgaatacctctgcgacgcgtcttttctcgtcgccctgcaaggcgatcccgctctcgttgccgaactggaagcggccctgaaagcacccaagtggacgctctatcttggacggaaatgctgtccgccctcgcgtcccgtgatgcaacatccatccggttcctttgaagatctccgttccgcgctcgcgtccgtgccatggcaagcccgactcaaaggagatacaccgcctaagtgtgtcgagtgtctcgttgactgggaatccacggaggaacaacctgaagcgcccgacgatgccctcgtctggtacgacgtgccgttgacattcgaaccaccggcacatcgcccacgattcgtcattcgcgagcaattgtccgttggcattgatggcgtcctaagcattgccgagacccccgcacaacggtttacaccgccgccgccgcgtcctcgagccgattatggcaacaaggaatacaaggatcgacgtaaagcccgcctcgaacaagaccaccatctctgcgtcttctgcaagtcgcccgcaaccactgttcagcacgtcacctatcgccgtgccggtggagacgagcagatagacgatctgcgttccctctgccgcctgtgccacgacgccgtcaccatgatcgagtacggccttggcatgggcctcgaccgtatcaaccccgaagaacaacgctggcgaaacaagatcatcgagaaacgcgacgaaatcgtcaaattccgttcgctggagacaaggcggcggcgtctcagcccagaggaggtcgaataatgttcctgtcccatctcttgatcgataccggaggcaatcccgaccgcccaagacccggcaggaaatggctccgcaacgtctatcacgtccatcagcgcctgtgcatggcctttccttcaaacatgcgtgtgcaggacgatccggagttcctcaagcccttcaagggagaagatttcccgttgcgcgggaacgcgaacgcggatccgcgcaatccccggcacagtttcctgttccgcatagacaacggcatcgagagcgatgccccgcgcgccatcatcctcgtccagtccgaactgaaacccaattgggactacgccttccacaacgcgcgcgtctttctcgcggccgacccggaaacccgcgaatacaaccccgcctttaccaccggcgacacgctccgttttcgcatccgaatcaacctaagcaagaagattcagtccaatagagaaggtatcgatcttcgaaaaccgcgagtggggatagacgccaaaggacgtcaaaaagatcaaagcaagcgagtggctctcacatggaacgacgatcagaagccggaagacgtaatcgtgccgtggtttgccgagaaaggcgccaaacgaggctttgaagtgaaaggtgcggcccttcttcaacttggctggtcgtcgggatttacggcggaaaaagaaaaggggatgaaattccggtccgccctgctcgaaggcacgcttgccgtggccaatcccgtgctcttttcccaaacgctggcgtcggggattggcgcggcgaaagccttcggattcggactcttgagcgtcgcgccatgcaatgtgaacccgtgacatgcgcacacacgatctgcacgaattgccgaaagtgagagacaaactcggttatctgtacgtcgagcattgtcgcatcgatcaggaagacaaggcgatcgctttgcatgatgaaaccggcgttacctccgttccatgtgcggccctttccctgctcatgctcggacccggcaccagcattacccatgcggccatactcacgctggccgacagtgcctgtcttaccgcatggtgcggcgagcaaggcatccgatactatgcctccggctccggggcgacccgcgacgcgtatgccctgctccggcaagccgccctttgttccgatgatgccgcccggctgaaagtcgtccgaagactttacgaggcccggttcaaagggaaaatcgacccctccctgacgcttcagcaactccgtgggcgtgaaggcgttcgcgttcgcgacgcctatgcccatgccgcgcgggaaacggggattcaatggcaagggcgaaactacgatcgcggcaactggaacgccgccgatcccgtcaatcgagcgctttccgccgccaatgcctgtctctacggtatctgccaggccgccatcattgccgccggttactccacggcgctcggttttatccacacgggaaagcaactttcctttgtttacgacattgccgatctttacaaatgcgacatgaccgttccactcgcttttcatgtcgcggccggccatcccatcaacttggagcgggaagtccgaatacaatgccgcgacgtgttcgcggaacaacgccttcttcaacggatcgttgacgatatcgcccagatcctcgatatcccacctgacgaagatacgcgtttggatgaggatccggccctgcccggcgcactctgggatccccggcaaggatcatgtccgggcggcatacaatacggtgctgatgactccggagatattggacatggtgatcatgattcttgaatccgtctcgccatcccttcgtggacaactcacgcggtggctgctcgaaccaaaatcaggcgtctttgtcggatccatttcggccatggtccgccaaaaactttgggaaaaggtttgcaaggaagcacgagatggcggcgccatcctcatcttttccgccaagaacgaacaaggtttcagaatagacttctggggaaaaacaacccgatggattacaaattgggaaggacttcaactagttaccaaaccaaaatgccaataaattcaatgggtattccccacgcacgtgggggtgaaccggatcgcaagaatgaggcggcgcagcaccgaatgtattccccacgcacgtgggggtgaaccggcggagatggtaagggagaaaataaaagaggggtattccccacgcacgtgggggtgaaccgagcaatgccgcgtatgaacaggccgcgcacaagtattccccacgcacgtgggggtgaaccgatccgccggtggccgcgccaagcgcgaatccggtattccccacgcacgtgggggtgaaccaagccgcccgactgatcgccgaggcgcgggcgcgtattccccacgcacgtgggggtgaaccgatttttgggatgctgttggtgccaaagtagtagtattccccacgcacgtgggggtgaaccgacgtattataactcgcccgcgggccgaggtacgtattccccacgcacgtgggggtgaaccagatgcaaaagagatggcggcgactaccacggcgtattccccacgcacgtgggggtgaaccgtatgtctcggaagaacagaaaacggccatagcgtattccccacgcacgtgggggtgaaccgaccgcgagtacattgaagaacatgccacagaagtattccccacgcacgtgggggtgaaccgtaacaaataaagcgtaaagagaaagcaaatacgtattccccacgcacgtgggggtgaaccggttcttgctgttgaagtgtgtggaacggtgacgtattccccacgcacgtgggggtgaaccgtttccatgatcttttcataatcgggatcttttgtattccccacgcacgtgggggtgaaccgagcattgaggtttcgccgcaaagcggcgaaacgtattccccacgcacgtgggggtgaaccgatcgaatcagggaaatgacacacacagatgatgtattccccacgcacgtgggggtgaaccgtcaacctcacgcgcatataacaggatccgcacgtattccccacgcacgtgggggtgaaccggaattggcgcgcagaataatgcggtccaatcggtattccccacgcacgtgggggtgaaccgtcaatccccgcgcgcatgcggggcttttacctgttggagccgcgagccgcaaaggcgcaaattttttggtgttattccctttttcatgatagtcctgaattttcgaacgttgttacaggcagccattactgaaaaaagttgttttttccggttgaatgggttacagaatcgttttgaggcattgaaggcggagtttcaccgggagccgaaatcggggcaagtgtgtgggacaggctgtccagcctgtccgtccacggacagggtgtgggttcggaagcggcaaggatgctgtgtttaccgtagaagcggcctgttgccgcttttccgtttgttggagggcgtgcgatttcgtcatgtggcgtcgaattccgattgggcccacagggtatgcgcaatcgggtgtggcaggaaaagcggagcaatgaatgggcgcgcctcccggaaaaaataaaggacgcctcactgggaggcgcccagggcatcccgtaggatggcgcccgcggatcgaaagatccttactatgatttgaaggtcaatcgccgctcaggtatactaaactatattataaacattccttccgggaatgtcaagtttttggttttcgggtgttgttcagatggggaggcctgtcatgaaaaaggcaaatgaatcgctggtgctgggactggaccttggaaccaactcgatcggctgggcgctgttcggatttgacggcgataatcccgtccgccttgtcggcatgggatcgcgcattttcgaggccggaaccgagggcgatatcgaggcgggaaaagacgaatcacgcggcgtggcacgccgaatggcgaggcaaatccgccggcagggcgaacggcgtgcaaggcggcaatccaaggtgggccgtgtgctgcaagccatgggactcctgcccgaaggggatatcgatcattcacaagcccgtcacgaatatttcgtgacactcgaccggacattgcgtgcccgccacaagaaggttaatttggaagcactgccgcatgtctttccgtattggctgagagcccgcgcactggacaatccactcgaacgggacgaactcggacgggccttctaccatctcggacaacggcgcggatttttaagcaaccgcaaggcctccggaaagaaggatgaggaaaagagcgtcgtgaaacagggcatcgccgaattggccgcggcaatacatgaaaccggcgcgcgcaccctcggcgaatacctcagccgtatagacccttcggatcccgaacagcgccgcatccgcgaacgctggaccgcccgccaaatgtacgaagacgaattcaacgccatttgggacgcccaatcgaaacatcatcccgaagtgcttacaccggaatggcggaaaatccttcataacgccctcttccggcagcgaccactcaaactccagcacgatctgatcggggcatgtccgcttgaaccggatcgcaaacgggcgcccatggccctgcccgccgcccagcgatttcgtgtacttcaaaaggtcaatgacctccgcgtcatcgcgcccgactattccgaacgcccgctcaatcccgaagaacgcaccctactgctcgacgccctcgaccgccaagaggaaatgaccttcggcaagctccgcaaactgctgaacctcaaagcgtacgtcttcaatctcgaaaacggcggcgaagaaaagctcattggcaatcgcacatccgccaagatgtacggcattttcggcgaacgctggttccggttcacgcccgcccaacgcgaggccgtcattcaagacatccgttgtttcgaaaaagacgccgcccttgctaagcgcgggcgcgagcactacggactcgatgaagagacggcaaaacgtttcggggaaatcgaactcgaagacgggtattgttcgctctcccggcaagctatcgaaaagctcttgccgctcatggagaaggggatcgcctataagacggccgaaaaagaagtctatggcgatccgggaccggccatcgctgtcgaaatgcttccgagtgtggccgaggccgtccgccagcaactcatgcccgtcctgcgcaatcccgtcgtcaatcgtgttctgaccgaactgcgcaaagtggtcaatgcgatcatcaacaagtacggcaagccggacaagattcggatcgaaatcgcgcgcgacatgaaaaaaccacggcaggagcgcatgaaaatcagccgaaaaatgcgggacaacgaaaaatcccggcaaaaggcggccaagcgcatttttgaggaaataggcgtgcagaatccctcccgcgacgatatcgaaaaggttctgctggccgaggaatgcgaatggcgatgcccctataccggcaagacaatcagcatgcgcaccctgttgggcgatgcgccgcaattcgatgttgaacacatcatcccgttcagccggtgcttggacaattccttcaacaacaagacgctctgctaccacgaggagaaccggagcgtcaaacgcaatcgcacaccgcacgaggcctatggcggcgatcccgcacgctatcaggagatcctcgatcgtgtcgctaaattcaagggtgaaggccgcgatgccaaactccgccgcttccagatggcggacctcgaggatttcgaggatttttccacccgcatgctcaacgacacccgctacgcctcgacgctggccgcgaaatatctcggactgctctacggcgccgagtaccgaaaacacatccaagtcagcaccggcgtcatcaccaagtacctgcgcgactgctgggggctcaacaaggtcctcggcgacggcggcgagaagaaccgcgaagatcaccgccaccacgccgtggacgccgtcgccatcgcgctgaccagcccgaaaaccgtcaagatgctcagcgacgccgccaagcacgccaccgaggaacgccgccgccagttcggaaaggtcccgcctccgtgggaccgtttccttcaggacattcaggaagccgccggtcaaatcgtcgtttcgcaccgcgtcgcacgcaaagtcaacggccgcatgcacgaggatacattctacagcccgcaaccctcttccgatccggccaaaccgtgcgtccatgtccgtaaacgcgtcgaggcactgtccaagggagaaatcgaggccatcgttgatcccatcgtgcggcgacaggtcaaacaacggctcgacgaactggacagcgacgatcccaagaaggcattcgccacagccgaaaaacatcccttcatcgaaaccggcgatggacgccgcctgcccattcacaaggtccgcatccgcaagaatgccgccacattcaagatcggcaaagagcatcgggtgcgccatgtcaccaccgattccaatcatcatgtcgaaatcatcgaaacgacggacaagcgcggaaatgtgaagtgggagggatccgttgtaagccggtacgaagccatgcgacgactccaaaaccgcgaacctgtcatcaagcgtgatcacggcaacggaagaaagttcctcttttcgctggcgttgaatgaagtcgtgcagatgaaggacacggaaggcgttgtacggcaatacagggtagcaggtgtgtcacagttctcaaccggccaaatagtaattgatgtccgcgagcttagcgatgcgcgtcgtgcggttgatgttcctcgtgaaggacgtacccgttcgccggacacgctccgtaagtctgaatctatcaagttttgcgcaaccccccttggggagcttcgtcgggcgaatgattgagcggatcatagacttgagcacggatgccgtccggctgtccgtgaacatggagcggctgctgatcgagcggcacaattccgattcgatcacgatgtccgccgagccggttacggttccgctagacgaggtggcggccgtcgtggcgtcgcaccggcaggtcgtcttcacgcagcctgcgctagcggggattgccgcgcatggcggggcggtcgtcgtgtgcgacggcaagatgatgccggtcggcatgatgctgcccatcgaacagcatcatctccaggccgaacggttcgtcaagcaagccgaagcggcgcttcccgtcaagaaacagatctggcgtcagattgtccaggcgaaaatcgccgcgcaggggcgcacgctcctcgacttccgcaagagcgatttcggatttttcgagatggccaaacgcgtcaagtcgggcgacacggacaatatcgaagcccacgccgcgcggcgctactggccgctgttgttcgacgatccggcattcaagcgcgaacgggaagcgccggaccagaaccgctttctcaactatggctacacggtcctgcgcgcgatggttgcccgcgcgatttgcgccaccggcctccacccatcccttggcgtccatcatcacaaccgctacgacgcgttttgtctcgccgacgaccttatggaacccttccggcccgtcgtggaccgcgccgtcgtccatatcgtctattcgcgcggcaaggaagcgcccatggacaaggaaaccaaggccgcactaatcggcgcggtgaccgggcgctatcggctcgatggtgagtctcgcaccctgttcgatattctttcccgcaccgccgcgtcgctggcgaaaatctttaccggcgaaggcaaggaactcgccttgccggtgatttaggtgattcaccacgaaggacacgaaggacacgaagaagaagtcggagttgatagacaaagttgaacattgtgcggtaggatttttttgctgcaagaggaccgcgcatgcacgaattgccggatgcgcggaagacatggaaatgaaagcaatttcgtgggccgagccgtcgtcttgattggtttcttgttccttctcttccggttcgtcttcgtgcttttcgtgttcttcgtggtgaagataccaatcaaccgaaacaaggagatgacaccatggaattcgatgccctgagcaatcgggtcatcggctgcgccatcgaggcacaccgcgaactcggtcccggcctgctcgaatccacctatgaaaaatgtctcgcatatgaactgtccacgcatggcatgaccgtggccacgcaggtcgaattgcccgtacgctacaagggggtcctcctcgattgcggctatcgcatagacgtgctggttgatgaccagatcatcatcgaagtcaagtccgtggacaaagtgattccgattcacgaggcccaattgctgacctatctcaagctcgcaaagaagcgcatcggactgctcatgaatttcaacacggtccgattgaaagacggtatccgccgatttgtaatgtgaagattcaccacgaagagcacgaagggcacgaagaaagaaagagaatgccgggtggtaaatggataacaatagggttggtggtgttttgtggttgaaaaagtcggttgtgtgtgtctgaaacttgaaaaatacaatgaatatgcacactctaatttatctggacc

SEQ ID NO: 520 - DNA, 95964 bp, Artificial Sequence
  Synthetic Oligonucleotide
ccggtgaggacccatcattggtccggtgtcgggacctgtctgaagaattacatcatgtttgtccccgatccatcctcttaccacgatgagggttgttcgcccctgggtaaaatatggacctatcccattgtaaagggaaagacccgcctgaacattctcagtgcccttaccccccagttttatggaaggggagccagtttctttgaccgaagatatgtctggccctacgggggccttattgtgggaaccgatccagtagcagtagacgccataggcgctcatctgcttcaggcaaagcggatcgcctttttcggcgaagaccgggctctggatgttccccccacccatattatggtggctgataaaacatatcacctcgggatcagtgacctgagccgcattcagcttatcaaattaggctgggcggatgaattactgatctaagcctcggggagcacggcgcctttgggggacgctcgtccatcgactgcgacccactgtttgggaatacggagggacgtatttgtctcctagccatataagtattttgacagaagacctgttaatgggcgaccccatgaactgatgagatcaataggggcgctgagaaggccaccgggaacccactttttatgtaaaaagccggttcccggcccctccgacaaaaactctaatattttcatgatcaactgtgaatctgttgatccacctcacgcagacgccccaactcctgcggcgtaacgaaaaaatgggaggtttcgagatttcctgaaaatcctttctacaaaaagcgccttgccgtgcactctttccttctatcccagtctaaaatagagcaatcaggcggcgcccgaaaattcaggggtaggtcgggccgtgcccgacaacgcttttatgacctgagattggtagcggccggcgtccatgccaggtcggatattcattccgggaaatcccggtgggtttaggtcgttcatacatcttttctctgtgcgttctccacggtgaatttcccttttcaagggcagatccaccggcgccacccgagaaacgtaccggcaagggcgaagaaggtacgcaacacggttgtgcctcagcagggcgccaataattgtttcctcgccaggagaagtgttttcctcgatagagggcctcttaacgggtgaccccgtaagacgcaactcgtaagagtgaacatacccaagtcctggtgtaggtttccatcgctctaatccggaactttagccctgtacctcggtttacatacagatagaaatttatacatgtatgaagctatttgaggttgctcattaattccggcaggttgacaattgcaaagccggaggccatatcgctgattccgtatggtattaccagcatatcacgatgaataagcgcgccgcaggaatataccacgttgggtacgtagccgcttcgttcttcctcgataggactcataagaggttcctttaatcgcgccaatacttttgaagggtcgttcaaatccagaaggacagctcctatgcaatatttcctcatcggcccaacgccgtgagtaagcagcagccatccttcttccgtcaacagcggggagccgcagtttcccatctgtacgaattcccagtcgtattttggctcaattatccattttgcgttgtcccaggcatgtattgaatcggatttcaggagaaatagattttcgttgtcgattcgtcctatcagcgcatactggccgtcgattcgctttgggaaaaaggccattcctttattcttggcgaatttcccccacataatacgcaccacggcatactcttccggtgaaacttccagaacctgcggcacaatctcccggccgttgtacgcggtgtatgttccgtagaaccttactgtcctgtcttcctcttcgaaccggaccagcctcatatcttccatcccgtgcgattctctggcgcttattggaaaaagcaccatatcttccaggtcgaaaggctgttggacgctgatttcatactcagtttcggccaccgttctcagcagcctcgatattttgtcgtatgatttcaggttttcgtattttggagcaaggcgttcgattgtttcttcgagcatggcaaaagaaaacgtatcgggcagttcggacaataccgcttccgtaaattcattctttatggccaagttgtcgagctcttcgtgagcagcggcctttttaaatttgcggtctttttctcttttgaaaggtcgtgcccgcagagtggcgggatgaattttgatattgcctttctcgtcgattgagcctctccggaaaataatggaggaaatgtggccttcgccgaccgctctcaaactcattataaatgcaagtgaaccgtccggcgcattggactggtcataagccggaaccatcgacggattaaaaagcgccactgattcaaaagcatattccattgaaaaataggcgccaatcagcattcggacatcgctgtcgttttcatcgacaaggccgacgtgctcggcagccatttcatagttttcaatcagaatctcctttagcagcggcttgttaggcgagaattgattgaggaggtccttcagaagcccggagactttatccggtgataatcgtttgactcgcttgattatttttttcgctcgttccgcgccgggccagaaaaatcgggttatcgttcttctcgagtcaggcataagtcggatcggaagccgccttacattgatagattctttagtcatttggtgctttttagcccctgcaaggccgaaagttgtgatggattggtcgagtcgagcggaggcgcgaccggtttagccggaattatgcggcggtcttgtcattctggggcgtttaccccggaatcccgtctcggcagtgtccccctgacgccgaaagagccccgggatgattcctcaagacacaggaggacggcaaaaccgtcgtagcgttaatgaaaaagtcccttttgacccggttctgagcgtacctccccgtatgcccctcagtcaagcgcaatgtccttgtcgccctcacccgaacacagcttggtagtatcgggacaaggcgaaggtggatcctacatgaacttcccacctccaaccgtgatacgcgactttcgctccgaccttcatggtagagccagtgggatcaggtcgttcatccggagctcccgctcgatcccctctattcgcctccgcaggctcgcatcttccctgatctcattgttcatgcgagaaaccacgctgctcacactgccgtgccagtagtctcagttctgttctcggtccaaacaatgagtcaagagcagatctgaccccttgcacaatccttgcacaatcaagaatgatttttccggcatgtgattatccacgccgagcattagtatggcttgtgcgagtttcccggctgggatataagtgcaacaccccgtctgtcacggcaaggtcgtacgtgcaggttgaataaatgaagatcagtgaggtcaccaggcgagacatctttgatgcgctatttgtaactgggggccattgggctggtcggttggagaacctcgaatttttgtcccgagtttacgatctggaaagtcttccttcccatgaccaccgtttcgataatgcttactctgacatttggcaacatacggtcaataacgatgactggccgggggactggatcctctatgatagccggttcaatctgctgggttgcgaagatgagagcctgctacgatttctttgcgaaaccattcatccggtcgttagaccagacacccatgaggcggaaggccttcttcaaatctacaacagttacctcaaaaatgatggatttcaaatagttgaaaaatcgcgcatttcggggaagcctgtctttgtagggaactatgtcggcgttgtagcaactcctggactcgcagcggttcgcggcgtagccttagtggcggaccaggcttacgtggctaagcagataacccgtatggagtcggccgtggacagtgatccggctctagctatcgggaccgcaaaagagctcgtcgagacttgttgcaagacgatattgaatgactgtgatgttgtagtaccagataagcctgatctggcgaagctagtcaaattaacaacaaagcaactcaaattgacccccgaggatattccggatcgagccaaagccggggaaacaatcaaacgcctgttgagcaatcttgcgagcattactcagggaattacagagttgcggaaccattatggcacgggccatgggaaacatgcaaaaagcaagggactcgaaccgaggcacgcgaagcttgctgttggtgctgcttccactctcgctgtatttcttgtagaaactcacaatgcccgtagaccggacaaaccttgacgccaaaccccttttattcattgttcgtatcagatatccgggttacttcagtaacggcaatgtcaacggccgaatactcattctttgctgaggtgttttgaaattgtgggtcaggtcttgaaatgacacgacctcggttactagaatagagcgatcgtggccgactgaagatccattaaagtattgataaactgatttcgggaacagccaatggtgagaccccgtttttcaagagatgaccgcatacacccctgaccccatacatgtatccttttgcatgaagcagaatctgtcactggaacgattccatcagagactcaaaccgggaatccgtctttgaggggtctggcgagcgtgatttggaaacactctcatgacgtcagacgataatcagatcttgtccactgattcgagacgctccgtcatagggacacctacccaattcaacactgaaatagtgtcctgtctgacaacgtgacaggtgcatgggtattgctttgaataattctatgacgacaattggcggttgcgtccttaagagtatcggatcaagcggtgcaattggtggaagcccgacaagatatgctttgatcactttctcgccattatctgcaagaccgttcagatatcttgtgagttggagcacgtctttagtcttcagcggcgttttcttgcattcgacgattacaatgccgtcgcacgtctcaaaatcaatgtcaatgcgtccccccctgatcgtgcgttctgtccggccggagttaaacaggtccttgtccaatagataaggatggtaccggataagtgtctgtatttgtttctccagcatcgatctctcggtctggttcaatagtgttctgacaatttaacttgctgaatttgtgacacaagttggtccaaagcctttctatttctcgagactaggccactgcctgtccttggggccgtaaaaccatttgcgtctgccagcaaagtgaggtctttggcagtcatagtgcccagagcatttctgattgaagccgcgtccaaactgcgcagctggtcgaaaaggtctctgcctctcttattcgggtccaactcgttcttcaggtctattaataatcctcccctagccacttgcttcaaaaattcagcacgagaccttctgttcgctcgtggcacagtaaatttcagttttagcctagtcctgcaaaacttctccatgaatttcggattcgcgatagtcctgccgtctccctccagcaaagcggcaacctcggcataggctggcaattgttccaaacgcaagtcttccgctttggcaaggaattttcccaaagccgtttccaaggatttcagaggtgcagcaaggtcactggatgtcccaagttttgggtatttttttaaaaactctgccgcttcgctcaattgcagtaccagattattcattagtcccccttgaacttgtctcgaatcaaaatagcaaggtttcggtaatcacccaacaggtccttgtttttcactcccttagcaaaaagaagaggtctgtactcaaaagaaccagtgcgaaagtccgctgcatgtctaatacttgcaggaaatacttcggcgtcgggagccgtcaatctctgcacctttaggtcttctaacttgcttctgagaacagtttccgaatacctgttcgctttttgttccgtcacgggcttattattgatcaatatcccggagatttccggctgctgttcaccagggcggtgctggtagtgagccccctgcgtcctgtgcttaaactcgcgaaccttgcgggctagtaaggatagaccgatagctgagagactatcaggattacatgggaccaagatatggtgggaggagaaaatggcacactgggtcactctatacaggttcggcggacaatcaatcaagatgaagtcgtatgcatttaagcatcccataatctcttcccaaaatcggatataaggcggatcgccagccatcggcactgcaccatcctcaaaatccataagttcgtagcaggaaggtagcaaatggagtttcgggacctggacaacgccatcttctttaatcgcatccttgaccagacagggcccgatagcgtgcttctttgttaagaggccataaacagtgcgtgtagggtcaccacgcgcccgggcatcccactggtccggtcccatgacactaatgctcgcattactttgtgggtccagatcgataagaagcacatgttcgcctagttggctggccaaagacgttgctaggtttaccgctaatgcggtcttccccactccgcctttgaaattgacgaagctgatgattctagcttccatttaaggcctttttcctcgatgcccgctataagtttatgtctaattgcggacggaggcagtcccagaaatttggaagatcacagagagtagaactgcattttactcttcgaggataacggcggcaagggtttctcttcggaaagtcctcgcaaaaaatggtgagcttgagatgcggtcagcctcaatctcttcaggtaaggactaacaaaaatgaaaattttgggatcaggtcttgagatgacagggcctcgtgactgaatagagtaatcgggggggcggctgaaaattcacggagtgacgtcaatgaagtcagccgatccctggcggaatcctggcgtgcccttggcgccctaccattacttacattcacctttgatgtgcctaaagctggtttccttgttcgagaacgaccccgcgaatcgcggggaggccggccgctaccggaattcgaattgggcgcccgtgttgagccacctttgatacaccgccagccaattggagtttttgccggaggggccgggaaccggctttttacacaaaaagcgggttcccggtggccttctcagcgcccctttccagttcgatataacgttaaactgtcttggcgttctcgaggagcgctctactttttttccgccggggcagctagggcctttatgcccatcagttctatcagcttgttgatatctgtggtcttgaggttcattccgccctccgacatcggcaacaacacgatctttttgccctggagcgcctcggcaatcctcagttttaccaaggcctctccgccagacccggtaagggccttgttcatttttcggataccttcggcctgtgcaactccttcggctttgatagcctgggccaagagcgactgtttttcaaaataggcgtcagcctcgatcttggctctccgatactcaccatcgacgttggccaccaacttgttaacctcacccttcgcgtcttcgagctttcgcttgtactcttccaaggccgcgtgctgggccgatctgttcttttcgactcgttggtccgcaaccttcttgtcttcaatggccttctggtattccggattgaatcggtaatctttagtcagaacacgctccacgataatgcccatagggccgagtatctcctgtagcacttctttagcgttctgcgctttggcttcccttttgtccgccacgtagaattcctcagtcttcagttctccgaaaatgtctctgggtttactccttgccacggtcctcacgaccttctcccggagcattcggtcgtttttggctacgtactggagaatatacggcgccttgctgggatcgatccggtaagcgataatcacgtccagtcctatatcgtttccgtcaatggtcttgaagagcagatcatcgcgcgcttttcgatctccacgctttgggtctaaggtcatttcctggttctgcagtttggtgtcaaatgtgtgccagtcattgacaaaaggtaagaaaaaataggttgagcccggcggatagaccttatcttcaacgcccttctgggtgaaaattccgaacttgaccgtccgtacgccgacttcggtggagccggttgtgcgcaggacacatcctgtggacatcaagcagattgcaacagtaagcgccggtaatgagaaaaaacgtctcatggctggccccctttgcgtatatcaaacagattcagggtcttgccgaggttcagtggattgacgccattggggccgtcgcttggcagaataaccgtttgcaaccccttgtacacgtcagccatttttaatccgaccatacgctcggcgccctcgccttccatagcctcattcttgagtttgacacgttcggcctctgcaagccttaccatcaggtcggcttcagcttttttctttcgggcgtacagatctctttcggcccttttcttggtgacgtacgcctgcccctcttccattttaacccctacgattgcttctccctcctgtacgatcttcttcaagatagcctcttccatggaagcccgcgcttctgcctgatttttgaagaccaactggtccttgagttttttctcttcgatgttcttctgaatttcgctactgtaaatgaaatagcgcaccatgacttgttcgatgttgatccccttcggattcaattcccggttcaatatctccttggcggcgtcggctttcttaactcgccgcgggctgttgtaaaattcttccgtggtcagctccccaagcgtcacctttagcacgggttcggctttgggaataattccattgtcttcgaacagggtccccggaccgatcatggtaaaaaccaggtatgggtcggaaatccgataaattatggagacatcgacgttaacaaaaaagccgtcggacgtttgaatgtgggccgccttttctcgtcgtgaagagagcgccgccgtttggggagtgttggtcagttccaatacctggactcccttcgggagccggtgcatctcatgcatgcccggaactatgaaatacaaaccgggtccatatacctctttttgtaccccgcggtgagttccgagtcgcaccagcttgatgccgaattcgtcaggggcaacatagaccagacaaagtccatacaagatgatgataacggcgaggatcgctatcacgacctttcctttgaaagggaattttggaagggtgtagctgctcctgaatttctcaagccgaactgagagcgccttctgtggttcgtccatcagtctcctcctccatcagttggttgttgcgaattcggatctccttttattgtattctgtgacctcgggatcagccacgaatgcgccgacgatcaagtatagctaaaattcatgggaagaaataagcggtttttttcccccggtccaaagcgcccatgccgtctatatgacaacctttgcgtgccctgcatgtcaatgtttttttatccctttgtgtgtttccgctgtcaatcgatacagcaatttcgattgatggcgctggattccttgtgcaattgtgtgtaagctcggtcataacaattgtgtaaatgggggaggcaaatgaaaaagaacgggctagggctgtggatcttctcattggctgtcatatctttcggctccatatctgatgcgcaatcgcaggatgttttcagagaactggatcaggtcaagagagaggtgtctgcgctgagaaatgaagttaatgacctgaagaaccaattttattcgttaagagaggcgatattaagatcagtggcttctcaagatcaaagagcgtcaagacgagcgctgcccaaaggcgagcctgcgaaaaagcaggaagcgcccgtggatgaaaagcaactaacagactcgatatgccaggccgtaggtaagttctttgcggaagtcgacgtggctttacggatgagtgactcagccgcggcggacgacagaatgaggggagcctttcataaactaaattcaacattgcaagattattcaaggcttcacagggtttcgaaactccttggcatttatgagggcttggcttgggatacttatgtagcagtcgagttatccggaagcgtacaaggaaatgaggactttattagaaccataaataagcataagcaaaagtacaatgagacatgcccgaagagataggacatacgctccagaagatgtgattctggcgttaaagtagctctgcctgttcaaagtgattattttcaaaattgaagccggatagacaggcaggtttagccatgacgacagaatcgagttcttttagggcccaacaagatagtgatgtgattattaaacgatttcatcctattgtggctgaattcgggttcacaaaacccgtatgggattatgactcggaatcggacattgttcgagtacagttcgagaattccgggctgggtaacgctcttcagatcgaccataatttccggaacgattcttacagcgccaattactgccgcctgaagggtgactggcaaatgtgtatcgaaggaaagcctcagagactaggcatgtttaaagcgaatttgtcgcgttggatacgacaaaattgtgaagaatgccgaaccgagagggaagagcaaagtgaaaccgaattttagaacctggcctcgggttttatttactgcttgacaaaaagacctttctctttacagatttattaattgagtaattgtatatgaaccttaaactcatcaccgtgcgctaagcgggtgaggcgcgtgtttcctattcttgggacttgccgcggctctcgctcgataacaaggttccgcgagagttttttgttcttaacgattcatttattttccctgaaatttcccgttttcagggcagagacgtctgcgaatggctgaaccgcctgagccaaatcggttatttgcgggtttcagtagagggctctcttgcgaccagataaatgccgcagttcaaagtggctggcgctggcgccataaccgtgggagatgttgtcttcatggcaaattcaatcctgaccggcacatcttcggtggtcgaaaaatgagaacagaagggaggcaaagccttgcatgaattgaaatacgacgaggctgtttgcgagaaatgcgaaagtgtggactgtctggtgaagtgccgatacatggggctggatttgaaatcagccaaggaagagaggctgcggctgattcgaggtgagagcagcagggcgctcaaggattgcataacctgttatgcgtgcgaagaatactgccctcatggcaatcatcctttctacctgctggtggaccgtcaagaacaatccggaatttggcctgtccccatcccattgaccaagcaacaaatcaaaatgatggcgccgaaggggaggataacccgagagaaggttcacccgccggttttgaacatgtgctactttcccatgctcaagggatgcattcaggggaagcttttcgatggggtatccacaatcgtcggaagcgacatcttttgcaacataatgtggctacattttgccaagaactcgactatccgagagcgcctgcctcaaatgatcgacaacatatggcaatactatcttaaagatagcgggaccgatgaactgatctgctatcacgatgaatgctacgggacctacacgcaacttgcgcccgcattcgacattgatgtgccgttcaaatcgattcatctgttcgagtttctgacaaagagacttgaggaattaaaggaccaggtccgccctctcggcatgaaagtggcttatcagcggccatgttcaaataggcttgtcccggatactcagcgctgggttgacgagattttcaagcgtatcggcgttcacagggtagatcgtgaatacgatagagagaatgcgctctgctgcggaggagtcctaaggcttcaacagcgagacgacctggccgacgacctggttaacagaaatctcaatgacatgttggctgctggagcgaacgtttgcgtgttcaactgtcctgcttgctttttcacgatgggtcaggccgccgcggagcgtggtctgatgcccatactcatgagcgatctgtgtcgggccgcccttggcgaaaaattgacaggggtgttctgatggaagaaatctacaaagaactcgcggcaatcgtaggcgaacggtacgtttcaaatcaacctgaagagaagttcatctactccagagacccagggacaatggagccgtccgatccggattttgttgtcatgcccaatagcacagaggaggttcagcagatactccttctggccaaccgcaaaagccttccagtagtcccaatgggtggtggtcttgttctttcgggccttaccaggcccctgaagggcgggattgtcgttgatatgaagaggatgaaccgtattatcgaggttaatgagaaaagtcgttacgcaattgtcgaggccgggacgtctcagggcatgctccaggcgtatctgaagaagcatcatcccaacctcaagcattccgtgcccgacgccccgcccattgccactgttggcgggaatgttctcattcatggttcggggcatctgtctcacgcggccggttttcactcggaaatgctcaacggaatggaggtcgtcctgcccacgggagagattgctcggctggggtcttgctcaaccagcccttattggttttcgcgggctcctctcccggacttggtcgggctgttcttgggttgggccgggacaacggggattgcaaccaaactggcaataaagctatttcccaaccgagctttgaatgatgtggccgttttcgtggtcgaagacgctgaactggcccccgacataattcatcgaatcacaggggttgggcttgccgaggacgtgaccgcctggatgacaccgaagccggactgggctgaaggctttgttcatataaacatcaactactctgcggatagcaaagatgagcttgcctggaagaagaacctacttcgcgctcccctcaagaaatatatggacgagaagatcgggggttttatgatgctcccggcgccaatgaaaaagccctttctcgaagccccggcgtcgcaactgacccgcttcgcggacaccaggaagggagggggattcgagtacgttggggccatcatgcctgttgcgcttttccccagagcccatcaagtcggcctggagatagccgaaagatgcggaacaacttattccacaggagccaggattctgggcgcggggcactgcatgatgttcttctacgcgtatcctttcaaccgagccgacgcttcagatgtaaaacgggcccaggttgctctggaagaaacgaaccgcgcagcgcttgaaatgggcggtattccctggaaagcggaagctccggcccaaaaggagattatcaagaggatggacgagaacacctttgaccttatgaaccgcattcgcggaatcttggaccccaataggatcatgaaccccggcaactgggaggcggactgatggagcattctgaaattcttcaccgatgttttcggtgcggatattgcaaattcccgtccaattacattgacttgaactgcccgtcctacttgaacgcccgttttgagacctattcaccgggagggcgaatgtggctcttacgcgcttggctgcaaggagaaataaagacgagtccacgatttgcggaaattttgtattcgtgcgccgcctgcggaaactgtgtcgaacactgtgtgtttcccaaattcaaggacgatctcttgaatgcgtttatcgccggtcgcgaagaacttgtgacgacaggcgctgtgccgccggctgtcagagactattttaagagcatccacttacacggcaacccttacaaggcgcccgaggccgaccgcgggaaatgggccgaggggcttggcctggagccatattcggggcacgagtatctgctatatatcggatgcgtaggctctttcgacgaacgcggtcaaaacatggcccggtcagttgccggactcttaagcaacctcggaatatcattcgggatattaggtcgagaagagttttgcgacggcaacgatgtcagagccatgggggagagaggattgtttgaacatatagcgcgaatgaacatccgcaagtatcaagatctgggagtcaagaagatcgtcacactttcgccacatgcttatcatgctttcaagaacgaatacccggggctcggaggcaattttgaagcgctccactatagccagcttctggcgcctgtaatcagaaaggctccgttcaagaggtcggaaggcccgacaagagtaacttttcacgacccttgttacctgggaagacacaacaaggaatacagagcgcccagaaagatcctgaccgcggcgccaggcgttcaattgaaagaaatggagcgatctgagaatgatgccctctgttgcggtggaggaggcggaaacatgttcactgacatattgggtggcgggcctgacagtccggcgcgagtaagagtccgcgaagccgcccgcactggggctcaagtcttggccgtggcttgcccgggttgttcgaggatgctcagcgacgctgtcgccgcggaatctttgcaggaggttcttgaagttgtggacctcgcagagttcgttaacagaaggcttgcctttcattgaggccgtgtgttatccgggcttttcgggttcaaaaagcaaaatgaacctaactacggccgttcagcattttgtatcgacatcttatgaaatcatgttgtatatctttgcgcgacgacatttggggccgcttgcaagagtagatcggcaaaataactgaactcaggaattcagagatattccaagggggtgtcttatgtttagaatatcaattttgttggtggcatttgttttggctttctcgatggtaacacatacatacggcgcttccgaaaccgataccatcaaaacatctcagggggatctcaaaataaccttcgttgggcacggcaccctcatgttcgagtatgggggcaaggtcatccatgtggatccgtggggaaagcttgccgactactcaaaactccccaaagcggatttgattcttatcacgcacgaacatcaagatcacctggatctaggtaccattaagaaaatcaaaacggacaaaacagttgtgatcttaaccaaaaattgcattagcaagggagcaaccggcgaggttatgagcaacggagatacgaaaacagtagccggaatcaagatagaagctgtgccggcttataatctggtccacaaacgaccggaatccggtcagccatttcatcccaaaggcgaaggcaacggctacgtcctcacatttggcgccaaaagggtatacgtggccggtgataccgaaaacacccctgaaataaaagccctgaaaggaatcgacatagccttcttgcccatgaatttgccctataccatgacgcccgagatggtggctgacgccgccaaggcgttcaagcccaaaattctctatccgtaccacaccggggacacggacctctccaagcttacagctctgatgaaaggcgtcgacggagtggaagtcagactgcgcaaaatgaaataatacgggagcgttttagaaagatattccagggggaccttttttgcagaaaaagggttccccggcgccctccccaacaaaatcttgcattgttgtacgttaaaccgcgtggcagcccagcggcgggcttgctgatgagcaatattactggtccctctcatacgcggcggtggaatagagatcggggtagagtttcttggcgcaatccgggcagatgctgtgcgtaaaatcagcttcggtgtgatctcggacatatacttcgacctgagtccaataaccgctgtcatcccgaatcttcttgcatgaagcgcagataggaagaaggccgcttaaggtcttcacttttttaagcgcgtcctgaagttcgtccacgagttctcccagtttctcttccgttttctttctctcatcgatctccagtttcaatcgctcgttagcattcatcaatgctgccgttctcgacctgactctttcttccaacttgtcacgagccgccctgagcaccgcttcggattcttttcgctgagtaatatcttgtcgcatagtccagaggccgacgagatatccatttttgacgttgcctaccaatgtgatctcataataccgattctttccattcccggagggttctttggtttcaaaggatcgtatcgggaaacaattggcgccccatgaacggtaaagtcgctcaaaattgcctttaaacggcagtaattcactcagaggggtcccctttagtctgtctataattcgatgaccgtgcattcttgcaaattctcggtttccgcccaccaatttagcttctgatagtaaggacagagcgtcttccggcagagcacggacaggaatgggacggcccaaaatgaattccgctattccgatcgggaaaacctgcactagctgctgatatttttcactgatgatgagttgctttttctcagcggtcagatcttctattagagcaagaaccatcctctccgtcttgaaccgtacggaacgcaaatgaatgcggcaccatagcgttctgccgctcaccaatagagaactctcgaacacatgcgtctttcggtcgtgcaaaaccttgctcagcgctgacaagacctcggctttgtccgttgggcctgtaaataaagaagaaaaaggagagccggatatatgagccgattcatcctctattttcaagaaggccttgttgaaaaagactatgttaaaagacccgtccacaagaactgtaggaataggaatggattccaataacttaccgaatgagacatccctaatccatcgcaaatcatgactgcccgaatcagtaagctcacgtgggaacagcgggtcaatttcgatactaagagtcgtaatttcaggtctctgcattaaggccggctcagaagcatgagcccgcgatccgtgttcataggcgatgacttcggtatcggttgacatcagagcattctccttgcgcaatgcacaacggaatgtggaaaatctatggttcagatctactcagagcggccttggatcaaacgtgcccaaatttttttagaattttccgtaagctccttgaaattatgatgcccgcttacaggatcgctcgaatcgcccccccggaaattgcgctctcttccatttcgtaaacacagaaacaatacacagcaagcccgttttgacggctcaaaacatatagacacccgatgaaggtttcggttttataactcaacatagcgcaggaaatcaatcccccaagaaatcgggcaaaacaggcggttttccacagaaacaggtgatgacggactcgacagaatcccgcctgcccgaaattgcgatttttctaagaaactcccctgcttcaggcgtgcggaaccagctttctccgtagcgcttttcgagaaaaccgcgcagcacatgcgcggcagcccatgcattcaggtaatctagagcataaaaatcgggctccatgtctatcaaataggcctcgggttcatacatgaatccggtggccttgttaagatgattgcaatacggttgtgaattctttatgtcgcctttttcgtagaattccttttcagctaagaattttcctatatagcgcctgataagacatagtcgcttcgagcgaaagagccggatcaacacgtccgcatccggcggggacatagacgccacttcggtcaaccacaagcgattgtcaataagctccatgaaaagaaaagcaaaagtttcgtcaagagcgggcgaacggtaaagtcgcctgtactctatcggcagattcggatcgaaatggctcaagaagaaagcgtgacccatttcgtgcatgagggcttccacatcgatcaatccacccaccggtttcatgaggacaaagatccggcccgggatctctacccctatacagatgccgtccggattcttggccggatcacctgaagtatcgaggatgacatcattacgcgatgacaaatccaacccaagcggcttgaatgttttcagggcaagctcgttgagacgagaagccggaaaaattccatcgaatcggctgatacgaaggagatgcaatgcgtggtatcggctgagattttcgaaggaccgcccgatcttttccgagacccaaggagttattcgccgcaaataagtttcagcggtgtcatccaggtactgctcaaagattcgggcgtagcccgcaaaagagaccccctttttcgcctcgtaatattttgtgtaattatcaaagccaaatttctcggttacagctcgtatagagagttcggtcatgccgagaagtatcggatttataatccctttcaaatatatggtcatctcttttcggatttcttctcttttattaaaatccgactgagcttgaagccagtttactacttccagggcaggaattttctcagatcccacgtgcattctgcctcgttccatgtagaatctcagcatgtcgccgagcgaagccgtctcttgcacgagggccaggtccatgcaaccgaacagtatccgctcgatccgcgccttctcatcagctgtgtcagccttcaccaaggcttccctcaagaaggtctcagtgccttcggcgccaggaagtggatgcaactgaaggatgtcactggtcttgagagctgacggagtcccctgaagctgatccacagatagtttggctagatcgcgatgaattgcgtcgatctgttcaacaattttttctaccgttaactgattcaagatattgcctttcgggatttgattggtctcaagttatccgtcaattagagcttatgaggcggtaatttgcaagtgcacgaatgctcacttgacatggcaattgcgggattctaagttgacttcatgccaccacaacttatgagcgttatcggaatatttatcatcctggcattttgtttcgccatttcccgagaccggcgacgtatcagttggagattggtattctggggtctggccctgcaatactttttcgcgttcctaatattgaaaacctggcctgaccagatcttcgcgacggcgcaagcaatttttaacggaattgacttcttttccaggcaaggcgccaagtttctgttcggttcgctcacagaaaaccaggattttgtcatcctgagcatgggttcggtcataattttcgtcagctcaatgatggcgatactgaattatctgagggtgcttcccgctatcatgtatgcgctggcccgtctgatgcaatggacgatgcgcacgtccggagctgaaacgctgtccgttgccatgcagatcctgatgggcatcgaagctgtcaccggcttgaagatggttatcggtcggatgactcgttcggagcttttcacggtcatgacgtcttttatggccaatctcgcgggatcggtaatggctgtgtatgtcggagtgtacggcgccagcgcaggccacattttggctgccagcgtgatgagcgctcccggcgctctgatgctgtcgaaaataatgattcccgaaaccgaggctccggagaccggcgaaaagatagaatggaatgtcttattaccgcctgaaaaggggatcgtcgaggcggcggccaacggggctatggacgggctgaaattggctgcgtcaattgcctgcatcctgttggcgtttgtttccataatccacatgctcaatgcgttcctcggaattttcggtacttctttcggacacttgggtggctatttgttcgctccggtcgcttacatccttggcgtcccgtgggaagactgcatgaaggcaggcaacttgttggccacgaaaaccgtcttcaatgaatggctcgcttacagccgcatgaaagagatggtcgatgccggagaattgtcaagcagagctgtgatgatagtgacatatgcgctatgtaattttgcgaattttggtagcttagccattcttattggcggtatgtcagcgctcgcgccggaacgcaaagaagaaataacacacttgggaatgctggcgctgttatcgggcctcctctcaggattcatgaccgcagccgtcgccggaaccctaagctcaggctgagtctggggagaagtaagagttactcaggaggaaaactcttttgcaaaagagttttcctcctgaaacctcctttcagaaaactcttatatggctgcggtgaagtgaggaagtgtactagtgaatcggagcaatacggcttaatgttcaataagtttagagttttttgggaagggttcgggaaacccttttttgcacaaaaaagggtttcccgtgagattttatcttctcttccctcctacctcccccgcaaatttcagcgcatacatttggagcttactaacaagtgcaacttttcgtgcgcattctgtcctgactgtgtgatgacgcgggaccgcgggatcatggaagaggacctcgcgcgatccgctctggatcagattgcggacctggaccttgcggaaaaggtaaccttccacgtgatgggagaacccctgctgcatccacgctttttcgagattctggaccacgcggcgagtcgcaagctcgcggtgggtctgactacgaatggcgcgttgctgactccgtcgatcgttcagcgattggcggagagagacctttatcaaatagacatttcgctgcaaacgccggatcgagagagtttcctcgccacccgggggactcgcatggatttcgacaaatacatagatagattgctggagctgcttgcggcttgcgcggctcggcctgagcctccgatctttaagatacgaatgatgacaacccgctttgcgtccgagttccgtgagaaacggggaatccccaattttatgggcagttcagacaaactgcgcgaaaccgttctccaatggaccgagcttgtccatcagcggctcgggattcggccggtagagcgggaagagctgatcaagagagtcaacaagataagcatacacggttggaatgtgatcgagatcagccccaaggtattcatcgaaacctacatactcaccgattggggaaatgcgttcgcgggcgatgaaatcgtagaaaaccgccacggatattgcttcggcatgagggaccatttcgcgattctatattccggagacgtggcgctttgctgcgtggatttcgacggcaaaacagcggtaggcaatctgaaagactcttctctgctcgacatcctcaagggcccggagttggagcgcattgtcaagggcttccgtcgaggtcttctgctggacccacattgccgccgttgcctcgggagcggctcccgcctcggctcctggatcaaacccgccgcgtcaattatcggattgaagctgttgaagccgttcttctaccggaaatacaagttgtttgattagagctcggcttacagcgcaggtcccttctccctgaccgatgcctatcgctcgtcaccaattgaaggcttgtccccgtgaaaacggggaccggggtccagtcggctttcaagattcggctttagtgaaatgatgacagaccggtaatcatctagatcagaaaaggtttatcgcactaggtccgtttgtggaagaagaaatgactttcagaaagtggactgccagggggaaaacccttttgcaaaagggttttccccctggaccctctttccgaaaactcctaaatggttgcagagtcgccgtgagacagtgataagcttgtcacccgcacacgactgaaaactcatatttaggagtttttgccggagagggtggggggaatccggctttttgcaaaaagcgggttcccccgcatttttcgcttcttttccgccctcgctgcggagcaaaataaacaatccttcgccgaataacaatcaatctcctggatcaaaaattccaagcctgctcattaacttgttttttggttcctatctaaatggatttgtggtataggaagctatcctactcataattcttttcagcgccattcgagtgcattttcggggtccgtgctctgcttcgcagaccaagacggatccgtaagaaaaggggggaaatcagcatgacgtccccgcaatttcctcactcagcccccaattcaagattggagcgcatacatggagtacaacctgcttgagaaggagtggattcccgttctgtggaacgatgggaagttcggtcgtgtcggcatcaggacagcattaacggaggcgggccgtatccgccagatagccgcgagcaacccgatggacaacgtagcgctgctgcgacttctccttgcggtgctgtggtggtgtaagtcaaacctgaccgacgaggaacgaaacacgctggaaagtgccgacggcatcaaagatgattggctcgaaaagatggatctacacaaggagaagttcgatttgctcggcgatccctaccgcttctatcaggatcgacaacttttggacgacattctgaaggccaagcagagtgactgggacaagaaacaagaaaaacgcaaaagctcgaaaccatccaagactcctcgcccagcggcattgacagacgatgattaccgtccgattggcgacctactccaggagcttccgaccgagacccagatcgcacatttccgacacgtccgagacgggaactatggcctctgcccgtcctgctgtgcgataggcatagtccgtctctccgcttttgccaatgcctacgggcatggcaagtacactgcagccgttaacggtcccacaccagcgtatgcgattccagagggatggactcttttgcaaacgcttatgctgaattggcctgaaaagatcactataaggcgtgaacccccgtggatatggaaccaaccacctagccaggaggaattggatgaaataaccgtattcgcttggcggtctcgtcgcctttggctgggtaaccgcggcagcctggatgagccttgcgcgtactgtggcgagcgagcgcatcttatcaggaaaatggcctttagcgggaactggaggccacctatccaaactaaaggaacgcagaagaagttctggaatcaggacccccacctcattctcgagcagatgtcaagtaagaacaagggagcggaggattctgacgacgaagacaaagatcaagagactaaggtgcttagtgagtcttcgacgagcactagcaggacagttactaccctgggatttcccattccagcttctcgtgtcacggcccacacgcgattctggagacgagcacactcagccatcctatcgcacgctcatccccgtcgtttccgcaccatgcccctgcggatcaacattgccgggcctgcggcgaacaaagggctgtaccaggatgccaccaatatttctttgcctgcgaattcagccgattcggaggcgcaagcgagagttgtcctggatttgatagctgggatcacaagccaattgatcaagcttctgagacagagtacgccaaacaaggatcgccagcatcccaatcgacgagctgctcttgatgccttgtcccctgcccttgaaaagcgcttaagtcaagtcttctataattttgcaaagagtccgacatcagcgtcaggggtcgcacaagttcctaccgaatcatggtgctctgaattgatccagcaattgactccaatcattgatgcggtggtagtgacatccactcccgggtctcccctgcgccgccgcgaagccgcggaattggcaagaacgctacttgatcgagaaatccggaacttggttaaggaaatacaaaaacagatcgcattcgccaagaataaacaaacataggactactacagaaggggaaggggatgactcgaactgaagaattcattggacggctccaagcgctcaaggaaggtgaccgctcgcgactacgcaagctcgcgggaaaacccttggacgagtcagtacagggctttgatctgttcaccggcctctggtggccgttacggcgaaacagtccacgagcgccagagcgccgaagcgcctggctggtggcgattctttatggcgccttcccgttgccggacgtgcggcatgaggagaaccagctagcgcggttgctaggagggcgcgagaaggccatggcaaacgatttcgaccgcgaacgattccgcctacggtttgacgtcctgctgcaattacagctgtcccgcttggaacctcaccttggctgggctttgtccgtcatacacaaagcggtcggtcagaaccacgtcaacggacttgattgggttcgactgctggatgatcttcggctctgggtaacaggagttgatagccaagatagagaccagaagcgtagcgagcgtgacatacgcgatatctgggccgaggattacttgaatgctgttcaccaatccgaaaggaggaaataaacatgctcattgaaattcacatgatccagaaccatagcccgtcgaacctgaatcgggacgatttgggcgcgcccaagacgtgcattttcggcggtgtcacgcgggctcgaatttccagccagtgcctcaagcgtagcatacgcaatccagccaacccggatgacgctcacaaacataatggcgcgtcgttcgccgaagccctcgcggggcacacaggctggcggaccaaattctttcctcatttagttggcgagcagctcaaggcacaggaaaagctcggtattgtgcagaccgagcgaatcccagaggatgaatgggccgccattgtagccgcctgcacagtagtcgcccagaaagccggcagggaaactaaagaagagactgcaaaggaagacgccgatccccgctatgcgacgaagcagcttatttttctcagtccgcgtcatgcggctgagtttgtcaagaagcttaccaagcttcgcggatcagacatagagagctacaactactttcaagatcctcgagtggtctttaccacgctgctggaagaggaactgggcaagaccgtgcccgatgacgaatatcgcaagagggcagctaagaatggatggctaattgtcaaatatccgcatcggtggcaaaccctaaatgaatgggttagcaaacaggcgattaggccatccgacagcgatgagacaaagtcagagggtgacaacactgaaaccccgcaacgtaaggagagaccgggtcaagagcaagccaagttcttggcgcagactctaagtgacatgatatcacaggcacagggtgacaaggctactagagagctccttgacgatcttctgaaggccaaggcacaaaaaaacaagaaatggcgaggaagatatttggaaggtccaatcgaagatgaacgcaagaaaccagatcactatcaagactttcagcgagagctgcggtctgcgactggtcccacagctgttgacattgctctttttggctgcatgaccacatctgactatttcgaagatgtcgaggcagccatgcaagttgctcacgcgatttccacccacgcagtggtcaatgagagcgattactggacggcagtggacgacttggccagaacccaagccagtgcgcatctcggcgagacgatattcaattccgcgtgcttttacaagtacttctgcctcgattgggatcaatttgtgcgcaaccaagcaagacgacagtgaagacatgctggagtggaagaagaaccacaacgactggtctgacaaactcaagccgaacgccgagaaacttgccgcgtgcacagttgggtatttcatccgcgctgccgccctgagcacgcccagcggaaagcagaacagcttcgctgccaacaacgagccgtgtggcattctcgtcgagataaagaaagacgcgaagataccgaccaactacgccaacgcgttcgccgagcccgtcgagcggattggtaaaccggatgacgatgcggccgacgagaaaagcatcgaaggacgcagcgtcgcttgtttggcggaccacgtgcgtgcggtcaggaatgcttacggcatcgaatcaagattgctctggtacagccctaagctctggcgattccctctccagtattgggagcggtccacggatggcaagaaaaccaatgcgaagctcctgacaggagatcgattcgagttcctgggcggggaaggcggacagccgaaaagcttggtcaacgcagttgtggaagctattggcttcgaatggtcgaagattatacacgtcggcaagagctcaacaaaggagtctccaagatgagcggcagcgacaatacaaccttgttcttgcgcctggagggtccacttcaggcttggggtgacaattcgaagtacgtcgtacgccgaacactggaagccccaacgaaatccggcatcgtcgggttgatctgttgcgctatggggctcaatcgtcaagaaaccgttcgggaacccatcgcgtcgaccgccttgcgaacgctggccgaacgacttgtgccggaaaaggatgtcgatgacaaaaagatcgaccggacagtcctacggcttttaaacaagctgcaaatgggcgtccgcatcgatcgagccggggtgcggtggtgggattatcacaccgtcggcgccaaggtcggattgctacaggctaaaggaggtatcaagcgcacaggtggatcaaacggaccgattgaaacgctcatcagccgccgagagtacctgtgtgacgcaagcttcttagtcgcgcttcgaggcgacggaggccctatcagtgaagtggccaacgcgttggcgaagccaaagtggtctctttttctgggacgcaggtcctgccccccatgtgtaccgatactcgtcacgaaaagaaataatggcaaccgcaaagccgacatagaagacttcaagagcctagaattggcgttggagtcgcgggcctggtacccgcgcactaagagggacacgccacgcgatgaaaaacggaaaccgctgaagaagttagccttaaattgccttgtcgaatggccaccgcgcaacggtgaaatcgcccccgccgatgccgaggtctggtacgatgcgccagcatcgttcaaccccccggtccatgaacctcggctagtgcagcgcaagcacattcaagttctggtcggcgtcccaatccagaataggacgctgcctccaccgcgtccgcgggccgactacaacaacacggaatacaagaaacgccgccagcagcgcttggagtctgattacggcctctgcgttttttgcaagtcgcctgccacgacggtgcaacacgttacgtatcgccgggcaggcggcaatgaagaaccggaagatctgcgtgggctctgtcggctctgccacgactctgtgaccatgatcgaatacggcctgggtatgggtatggatcggattaacccggaagagccgtgctggcgcagccagatcattcgcaaacgccaggaaataatcgatttccgctcgctggaaacccgacgtcgacacctgaaacccgaggaggtggaatgatgtatctttcaacgctgctcattaacgtcggcaacaaccccgaccgaccgaggccgggccgattgtggctacgcaatcgctaccgggttcaccaacgactcgcgatggcctttccagccgatgaacgaaaagatagcgatcctggattcctaacaccttatgagcccggacactttcccgaacaacgtcacatggccgatgcattttgctatctgcctgaaagatgtgaaaccgcggctgatgctgctcatctggcgcaggtccacacccagcgcagcgccggtgctggattcttgtttcgtgtggacccgatgccaggtgggcgagcaatgattttggttctttcccatctgaaacccgattggcactacgcatttgggctgattccgggaggagccgatttactgaccggatcacccatcggaaatgccggctatctcttggctgctccgcctgacgaaccgcggcctcttcagatctcattgagtttgggtgcgaggtttcgtttccgcctcacggccaatccgaccaaaaaaacaggtacgcctgcgaaacacgaacgcataatgatggaggaacagggaacaaaagatcctaagagaaatgggcgacgcgttccggttcgtcccgaagcttacggtcaatggcttgtcacccgaagcgaaatccatggatttgggcttgtagagcctcttgaagacacccttcttactgaggccggatatgtgtacgtcaacaaaactcacgattccggcaaaggccaacgtctgcgaagcgtgaactacgagggtcttttggaaattgtcgacgtggagcggttccgaagtgccctcctctccggcattggccctgcgaaggcgttcggatttgggcttctctctatagcgcctgttaactcctgatccaaggagaggcatatgagaattcaagatctgcacatcttgccgaaattcagggattgttggagctatctgtacgtcgagcactgcatcatcgaacaggaagacaaggccatcgcgatcatggacgcgagcgggaaggttccggtcccgtgcgccacgctttgtctgctgatgctcggaccgggcacgaaaatcactcacgcggcgatcacggcgctcgctgataacggttgtctggtctactggtgcggcgaagagggcgtccgattctatgcgtgcggaaatgggaaaactcgaaacgcggataatctcatgcggcaagccaaactctgggctgacagccgctcacgcctggatgtggtcatgaagatgtatcggatgcgcttcgatgagacgctggatgaatcgctcgaattgccgcaaatacgcgggaaagaaggcatccgagtgcgagaagcctatgctcgggccagccgtgagacaggagttgaatggaagggacgctcatatagtcgagattcctggcattcctcagacccggtgaatagagcgctctccgccgcaaacagttgcctgtacggcatttgccaggccgcgattctggcgctgggcctgtcgcctgcgctcgggttcatccacacgggcaaaatgctgtcgtttgtttacgatgtggccgatctgtacaagactgatgtgtccatacctgtggcctttcgagtggtgtccgaagagtctgatcatccggagaccagggctcgtaaaggttgtcgggacatattcagagaccgacaaatgctcaagaagatggtctccgacattcagtttgtcctggaccttcagaaggacaagcgtttggaccagagctgccttttcgattctgacgcggcgctgccgggagcgctgtgggacccggttgaaggctcggtggacggaggtcaaaatttcggcgtgttggccacggatggagacggaaatggtagtcctgatacttgagaaggtcccgacgggcctgagaggtgagctttcgcgctggatgctcgaaccgaaggccggagtgttcgtgggcagcatgtccgctatggtccgtgatcggttatgggagaaggtttgcaaggattgccggggcgggagttgcgtgatgattcatgattcaaataaagagcaggggtttgccattagaacggaaggcgaggccaggcgcggagtagaagacttcgagggtctttttctgatccgagtgccgtaatgacgctagtttcgtcagtattgtccccacgcacgtgggggtgaaccaggctggtgagtagttcccagtagggcagtttctattgtccccacgtacgtgggggtgaaccagtgcagaaggctgtgggccatgtcctggaagaattgtccccacgcacgtgggggtgaaccgtcgatccgataccatcgagcgagctgtacgcgattgtccccacgcacgtgggggtgaaccgactctccgtcctcgagcatctgagtcgctgtttctaggcgccgtttccggcgggtctccagagcgaagtcaggctgcgccgttcgtagcggaggagatccgccggaaacgtagaggcgtctcgctgcctaccacaacaaccttttatgccatgtagggatcaggcgagatgaggaatttcacagctgcagtggaaaggcgcgccgatagcgggttgtggttggttacgcgccaggatttccgggagcgcactcgcaagccgtgaccttggatgaacttaatgaaaatctcagggaagtcatagagacgcttctagaagagggtggaccccggaatatatagatcaaaaagttacgagcgtcccctaatcttggacgaaccagtcacgtggttcgcccgcctcttctccatgaggctgaattaacctcctaacaatgcgaatatggtatcttcatcgaaaaggacgggtcctccacctggcggccctccgatttccgcatgcccccaccgcaaatcgcggcatccttgaattccggtgaactgcaaacaacgcgttttacgtcctctttgtgaaatgacacaaatcgggtgaaatcatcatccaggttgccctgcacggggcttggctcgtgctgacggcgtcgtatatcgtgctcgtccaagaattttttcatgggtcggtcctctcttatcgtctgaatttgtcttgaaagcccataatttcaagtccattttgctgagctttcaatatattcggatgcaaaatcagcgcgggggattcgcgattcaagatttctcgcgcagaggaccctggtttgatgataattagtattggagttttgggggagagagtgtggacttttattacagaaaaagaggtccctcggaacatctttcaattaccagcgcttccgatacagtcaatttctctgtgcgcctgccgcgagcccgaaccgcctctatttccatggcggccatctctcgataaaataccgatctatcaattttcgcttcaggattttgtccgctaaaggtttcctcgaacttgttgcatcctccgctttgcgcttcagaaccgtccggtcgcgtaaagacatgtggtatcccggctaatcggcagatcatgggccggtattcatacagtatgcacgcgcccgcgaaattcagggcgcagacagcggtcctgtaacgatcgccgtgaggcgcttcgcgcttggcgtcaacaatccaccgggatcttgtcagaatctcggattgcagagaaggttccagcatcttgaaaccgaatcttacataagagatctcgatgaaagtatgaagggttaggtccacggagcagcaaatgacaccattacagccctcacaggtcaagccaatcttttccgcggccgcggcataggcggaatcaattttgcgataaagctccctgatacgaggtaccaaattttccccagtgaacattaattgcagctccgtcggacaataagggcgtttcaaaaagtagaggcgcttcgcgaagtaggggcggttcgcgaaccgcccctactctccgtcttacatcgttttggatctcgatcactgccagcttatggcctcttccgggcacgtatcgatagcctcctggatttggtcctcggagcaagcggtttggcttgtcacatgggccttttccgtttcctccttcagctcgaaacagtcttcggctatggccgcgcatgtaccgcagccggtgcatttttcttcgtcgacagctactgtctttgccatagtctctcctttcgatccggttgcgcgattttcgcgcgcagaattcagcgtgttgatcatgtgaccattacatcttcccgttttttcagtcaacccctattgttaggtaccgctgggtcctttagctggacagggtgaaagtaaatgaaccaaacgtgagacaattgtggggcaggctttccagcctgccttttcttaagtgttcgtgacggcaggctggaaagcctgccccacaaaagcagtttgcacggtgacagacaggtctgattcttcctgaaaattttgagatgcgcgtgcgcagacttttttgctatagtggcgctaatcgaggatttgcttgctttggcgctgaatgttatatttctttttgcgtaaccgggaaccgcggggaagcttatgttcattataggaaactttatttcagcagtggccggagtgctggacattgtgctcacgatttatatgtggatagtcataatagctgcgctcatttcatgggtgaaccccgatccgtataatcctatagttcgctttctatacagcgtgaccgagccggttttcggtatggtgaggcgtcgccttcctttccctcctatgggcattgatttttcaccgctgatagtccttttggccatactcttcctgcagttgttcctcgtgaaaacattgcatcaaatagccgtgagtttgcagtaagaacatattcaataagctttggggattgcatgtggggcaggctttccagcctgccgtttcttaagtgtttatgatggcaggctggaaagcctgccccacaatctaaagaatgctccggcatgtatatcgaagaacaagaaggcggcgtaatcctcacggtaaaggtgattccgggctcgtcgaggaacgcgctcatacagggcgccggcgacaagttagtcataaagctgacctctccacccgttgaaggtaaggcaaacaaacaactgatgaaattcctgagcaagaaattgggagtcccgccttcgtcgatcagcatcatgcgcggaggcgcgtcgcgggagaagattttgttcatagccggcgccgatggagcggcggtgaggaagaaactggaatcagagtggaaatagttgatagaggagaggtctgttgtggcccggttccaagagtcgacggcgctttcagtccccctttatgaaagggggatacagggggattttatgaggcttccttacagcaaaggactcaaaccttttgcgagggaacttcgcaagaacatgaccgacgcggaaaggcgcgtatggggcagaattcgaagaaagcaactgaatagccgtcaattctacagacagaagaacattggcaactatatagtggacttctactgtcccgcagcaaagttgattgtagaaattgatggtggacaacattattcggaagacgggcttcggaaagacaaggacagagataaccgtctgacgagtctagggcttagaatcttgcggttcagtgacagagaagtcttcgaaaacattgaaggggtcctcgaaactatttgtgagtatttgtgattgaaaatcctcctgtacttaaacattaaagcaaaaatccccctgtatccccctttataaaagggggacaaagccgcctttaaaaagtgggacttttcaaatcctccctttgctaaaggggcgcctcgtcatagccccccttagtaaaggggggtatggggggatttgtccctaacgctggaaaaacgctcacttagaataaggactttgaattctttccgcgtggtctgccttctctgcggtgatggtttttctatccgcctatccgacattttttcttccctccgaaacttttctcaggtatgcttcacgaaaattccatctcagtggaaactaaagagacggctttgcatcctctaaatctccctttgttaaagggggatttaggtggcttttcaatatgttgaaacaaatccccccgtaccccccttttagaaaaggggggaaagtggaggggccttggcgcatggggatttgaaaagtccccctttgttaaaggacgacttaaggggtttatcaatatggccgtgtgtgggtcttacataggaacgaaggcagtgttcgagttccgcaatttaggctgcgttttgggacgcagatttttcttgacactgcctgtcggctgatgttacaaggatgtaaccaaagaagtctgtaaaagacgaaaaggctgtgataggccgcacgggaatgaggccaaagcgccccttgatctctaacggatccaggagattgaggggggcagggcttgtacgcggcaaaggttattgacagaagtctgaactgccttcgggcgatgttttgatgattctatgtggattgggaggaagagatgaaaaaagttaggatggttttgttggcagggctgctgatcgcagcgctttgcgcgcccgcccacgcatgggaattcgccatgacgggtaactatgagtgggattatttctaccattcccagggacccaatgggttcttcggcgcgcagggtgtgctgaacccggcgctcgcaggtaccgcattgaattggtggggcgcgaatttctgggcaggcgccagactgcttagtggcgaccagttggggcttgtcaccgggttggacgcgaacgcccagttcatgaggcagacgttcaatcctgagatacgcgtcaaccccgccgtcaggctcaggggccagtatattataggctcctggcagcaatacagcggcggtcctgcggcttttggaggcaacctggcccatgcgagttcattctatttgaatcagcagacgggctccgccattaccaggccgatagacaccggtttctggaacctgtggtgggcgactgcccaaactccttggggcattcttgttatcggcaaaaggccgtttgcatttggcacgggctcgatggccgacggcgagcacacggtgtgctcggaaagtttagccatcgtcgcgccgtacggcccgctgcgtatcggagtctttgcttatccttggagacaaaacgtctttattgacagtcaacgaaacctcacaggcgccggcgtaaatcagctcgggcaaatcgccacgaatacgagcggcggagggggccccaagttgtgggatacgagtggtgtcaggctgcaattgccgcagatgggcgcattcgttacgtactctaacggtcctctggatgcgggaataagctacgagcatttccagaaccataatgggcctgggatgtcggctgccaatcaatctatagcggccatcggcgtacccacgatcgacgcgtcgatcgaggacggcctgctctttgcgaagtacaacaacggcagatttttctttaacggtcagttggcctggtggcggtggatgaatcgcttccagcctccgcctattggtcagcggacggcttccgctctcaccgctctcggcctcggcgatccttatcagccgaccaacacagagggatgggaatttgataccgagttcggtttgctgtgcggccccagcaaggtcagcttcctttatgcctttttccccggtccggatcggcgaaacggcatctggatcagccgcagcgactggaataacatcgctctcggtcatgtgcccggcaactgggccctattcctgccgtacagctacctgatgggttatacgtacggttccggtctgcagttcgtgaatggtcgcggcgaaggcggcttcactgacgcaaccgttgtggcctcgagactcgattacgcagtggcggccaacctgaatttcagcgcgtcattcatatgggcgtggaggaattcgggcgcctggccgtggggcaccttgagcatcacaggtggtaatgccgccgccaatgcggcgctgccgttcgggctgccaaacttggccccggtagtaggaataccatttgccggactcggagttggtccccagaacgcaggagctgtcagggctccgaacatcccggacaacaacctgggttgggaagtcactacaggtgtggactggaagctgctcgagggattgaccatgaacctgaggggcgcatattggcagcctggtgagtggttcaagtttgcttgcgttgacaaggcccttgttacgacagtagttggtacgacgctcgttccagcccttggggacggagccgccatcggctcagcttgggccgtgaatcccgcgaaaacgattgacccgatctgggccttcaccggggccttgaatgtagatttctaatcaataatcaagataaaccgcaaaaaacccggagggctaaggccttccgggttttttttcgtccgatggtctttgttccgacttttgttaaaacagagggaagaccgtatgcttcaaaatgactctttgtggtctgaaggatgtgaactcccccttttctaaagggggatacagggggatttatgcgtcttccctacaacaaagaactcaaacattttgccagggaactccggaagaatatgactgacgcggaaaggcgcgtatggatgcgaatcagactgaagcaactgaagggccgtcaattttacaggcagaagaacattggaaactacattgtggatttttactgcccagcagcaaggctgatcattgaaatcgacggtggccaacattactcgaaagacgggcttcggagggataatgttagagatgcgtatttggcaagtcttgggttcagaaccatcaggtttactgaccgagaggtttttgagaacattgagggggttctcgaaacgatttgtgagtatttgtaatcaaaatccccctgtatccccctttagaaaagggggacttattacgccctatttcaaaggaaggcatgggggattttgaatcgcttcttggcgcctgagcgatggtggtccagtgcccgccattatgctggcacgtcgacggagtcgagcccggggttgccagcggtctgtcctctgagtgaagcgctgttcatatctgaaaatgtgagccgaaacgaggccacgcactgctggacaagccagcagtggcgcccaaccagtggcatggccaattaatgttgggtattgttagccgctcttcaaagcctgtggcgacggctggtcgaggggaaagaacacggccggaagcgttggtgtgtgccactgctggcttgtccagcagtgcgacacctggcctccggccggacaggatgtggggagctgcggccgaggtctagaggtcgtcgaaatcgaattcaacctcgccgtcgcaaaaatcgtcttccaagtcgagggaggataacaaatcggcggatcggccctccagagggtcctcaaagtcagcgagcgcatcggccagggattcgtcgtccattcggccgatataataattaatattgtgtgagtgaggcatgcgaactcctcccggtttgggtttggcgccatcgcttggcaactgaaaatactaaaacataacaaaagactattgtcaatacttaaagtaatacattaggaaaatgatggagccaaacaccgagggaggtagcgccggctggaaaatccccctaaatccccctttatagaaggggacatctgaaatcccccctttactaaaaggttcgggcagattttgggccgtgtggcgccctcgcaatgacagagaactctcctccgcgctttccgcgttctctgtgatgaagaattgatatccgctcgcgggaggggcaggaggccggtcctactcttggaggtttcccctggagaggatcaatcggaaaagtttaggggcgatggtacgagagtgttgaggattgaaattgtcatccatctctcggatttcatcgagctttacaggtcttttgaaagctctgtaccaatgaaatttgatcacgagcgcgtttcctgatttcggaggagtcccgccggtaggtggggcgcctgtgtcatcaatctcctgctcgcttacatgaggcatgtcatccccgagcttcttcacatcctccatgtaccaatctccaacccgcgcgtgaccgacggcgccgattctattcacgtagaacaacattgacaaacccttacggataccggccgcgccggctgggtcgccaacagctatggcgccttgtggcagaaatgtcggccttgtcattgatgatattccagctccgaagagggtatcctggcgatcatctgtgattggcagctcgacaatttgtatggcccttttcttctcaaaatggaacagaaggggcctttcatgtcgagcgtaaatctgtaggggataaaagagattttccaactcgtgccattccaggactcttgcgggaggatgaacgattatatcccggcccaacctggtgatcctatgccagaaaccgaaactgaagggtggcctgcattccgccctgaccctgtagctgaatccttccgcttcgttcctcaattcatagcccaatccgacgagcacctgccgaagaaaatcgatgatctcagaatgatgaatggcacggtatagaaagtgcttacagaaccttagatcgggcttgtggtcaacgccacaatcggacgcaatcccttcaaacatgaaaccgcaagcgcggaagcattccgcgaacccggaagcgactgtctccggtatgcgcgtgcttgctcttttaatgcccatttccgcccactcggttatttggcgccgcaaaaagcctgtggccgcaatccgatcagacggctcagggccgattccgaaggccagtatcctaacgtgatcagaggattcttgcttccacacgctaacacatttcacgaccttttcgatttccgctatttcgcaatttaggttttgtggcccatcagagacgcaattttccacgagatcaagtatactggcttcattatcggcccatggccggaggagatcggtaatatttgccaaatcgctattcagagcgggccggagaatcactttcatcatgatccttgcgctaaagaatgatgaatgccataaaaagctgggaggcggaaatcccgccgggaaacttaaacagttgtcgaaaattctgtccgaatgaagcaggccatcggcggtcatcgaccgtcattcccgcttccgcaggaatgacgaaacctcactctcgcaatcggacaaaacttttggcaattgcactagaccaagccctgccttatggtttgtcgaggacagggttcccgaattaacaatgcaatctcatgatattgaaaaagaagggaaagttcaacagttaagatggtaaactttctgacgtcatatcttgtggttggctccaagggaatgttgggcgctcagttgctcaagctgcttgcagaatcgcgcattgagagcgcgggagtagacattgaggaagtcgacatcacgcgattacctgccgtgctgaacgccattgaggcgctaaggccccgcatgataatcaattgtgcggcaattacagatgtggagggctgtgagtcggcccccgatctcgcttttgccgtgaacgcgcaaggccctgaacacatcgccaaagcttgcctgaagttcggttgttcgatgcttcacatgagcacggattatgtatttgacggccttaagggcggttcgtatcgagaggatgacccgatcaatcctctggggatttacgccaaatccaaagcggagggcgaggcgcgcgttcgggagcttctgccggaaacccattgcatagtaagaactcagtggctttatgggcttcacgggcgaaatttcgtcgaagccatcctgaaccaggcccggcaagagaatatcctgcatgtggtaaatgatcagcacggttcgcccacatacgcttacgatcttgcggaggccctgataaaactctgcgagatggaggcccgtgggacttttcacgtaaccaattcaggacagacgacctggcacggtttcgcgtccgccataacaaaaaaagcaggtttgggtaacgtggaagttctgccaatgagtacttcggaactgaacagacccgctccgcgtcccttattttccgcgctggacaataagagatacattgagcttaccggcgcgccgctcagacagtgggaggaggcgttgagcgaatacttgaggctgagatcaggtgggtaatgctttgaggcgtatctattcggccacgtgagggaagcagaccgtgtataaagttgtcattgcaaggaattaatggtggaacaggcttccaaaatccccccatacccccctttacaaaggggggcttgaaatcccccttttttaaagggggatacagggggatttcaaatgaccggcaagatgccggtggggccagcaatccaccaaacatggagattgcttcccccgcttttcagcgggggcgccatgacatgtggcggaccctcctcacataaccaacgaaacttaaatatgcatgaacaaaatatcaatgtgaaggtggctcctacaatgggaatgacaataacggaaaagattctggcagcgcacgcgagcctggagtcggtcaaaccgggagagcttatagaagcgcgtatagatctggcgctggccaatgacatcactcttcctctcgcattgggcccgtttcgggaagcagagggaacgcgggttttcgaccccgagaaagtggtggtggcgctggatcattttaatcctgccaaagacattcaatcggcggaaatgcttgctgaagcccgtcgattcgcccgggaggccggcctggctcatttttatgatattggggaaatggggatcgaacacgtgctgcttcccgagaaggggctggttcttcccggacagctcataataggcgcggacagccatacttgcacttatggcgcgctcgctgcgttttcgaccggagtgggcagtacggattttgctgcggctatgctcaccggggaatgctggttcaaggtccccgaaaccatgcgctttgagttgaccggtaaaccaggcgcctgggtggggggaaaggatcttattctccacattatcggagagattggcgtggacggcgccttgtacaaggccatggaattttcaggccccggagtccggaacctggggatgtctgatcgatttaccgtcactaatatggccgtggaagctggagcaaagaacggagtttttcctttcgacgacattacacgagcttttgttgcggatcatagttcgaagaagtatgtggtctatgcctcggatgatgatgcgaattatgtcgaaacacggcgaatagatcttgaccgaatagaaccactggtagccctgccgttctcgccggacaatgttcgtccggtttcagaagtaaaagggatgcgactcgaccaggtggtaatagggtcgtgcactaacggacgaatcgaagatcttcgaattgcggcttcaatactaagaggcaggaaagttgcgaagggcgtgagattaatagtcatcccggggacgccgactattatgctccaagccatgtctgaagggatagcgcaagacatacttcacgcgggtggagcaatttctacgcccacgtgcggcccatgcctgggcggtcatatggggattctggcgcgtggagagcgcgccgtttctaccacgaaccggaattttgtaggtcgaatggggcatcccgaaagtgaggtattgctggcgtcgcccgctgtagcggctgccagcgcggtggctggagttctgatggaccctggagacttatgaaaaagtaactattcgctcacgcgaggcgcggctttgtcattacgaggagtgaatggcgccacaggtgtccccgcctgtccgtcagagatgaccggcaagatggaactgtctcagacttgcggcctaggggatttacaatgtaggggcgcttcgagaagcgccctgatttcgggcggttcacgaccgcccctacaaacgatgtccagaaccacgtgttctgagacagttcaagatgccggtcccacaggcacttcccaaagcaaggagattgcttcgctccgctcgcaatggcaggtgaagcatggacactctccctgcgtaattgaagaatactaaaaaaaaatgttgcaacgcattttttttctgctatggtgaaacatcgcagtgaggccaaagtgaggcaatcgcgggaaaaaaatgacttgacttccccgaattgttctgataatcaacatgtcaatcagtttttatttgtctatgattccaaatgcggttccccggttttaggctggaggggcctaataaaaggaggatttgggtatggttaaaaagatgcttgttgtgctaagcgcggtggccttggccgtaaccatggtcggcgtgggatgcgcgtttaatccccttatggggggcatggcactttccggcgacatgattatgattcctatgaaggtgaagagcagctataccagggtgtccagcggcacggccggcggggacagcaccttcttcatggatggctgcgagcagtacaacggcggcttccgtccctggctcggatggaaggggaccacgtgcgcgatgaaagttcaagttattccgcccaagtgtgttgctcctgcttacggcggccctgtggcttggggcgctccacctagcttggcccccggcggcaaactggtcagcaacatcgaatcaactaagatcgtttcgccgggctgtgaaccttgtgtaaggcctggcctacagtatgaaatgattaagaagcaggtagtgaaataacactgcgctgctaaccatacacctgaaaaaggatcgggtcgccccgatccttttttgtttttgacggctgccggagcaaacagaccaaaatgattcggcctaatcttcccggtggaacctgaatatttcggccacgaaagagttctgccacgtgcgggaaagcggcgtttcacccgccactgcggggaataacgggggaaaggtcttccagcctgcttactcgggattaatggaaagatgccggtcattcgcaattccctttcctgaagagcgggagattgcttcgctgctgtggcaatgaccctttgctccgagtaatggaatccctactagcctacggaggctgacattggcaaattttccgtacgtcttaattctggattttggatcgcaatacacgcaacttattgcccgccgaattcgagaagcacgcgtctattgcgaaattcatccgtttaatcgtggaatggaagtagttcgaaggaataggcccgcagcaatcgttctgtcaggtggcccggcgagtatctacgatccgggggccccacaactggacccaggaatacttcagctcggcgcgcctgtgctgggcatatgttacggtttgcaggcaatagcgcatacgctgggaggcaaagttgagccagccacagaacgggaatacggacgtgccgcgcttgctcaaattaatcaggaatcagtgcttctacagggtatgtccagtgggaaccaggtctggatgagtcatggcgacaaagtggttcgccttcccccaaatttcaaaacttccgcggctactgcagatacgttcgccgctgccattgaaagcgatgatcacctcatcaccggcgtgcaattccatcccgaggtggcgcatacacacaacggaagcaggataattgcgaatttccttttttcgatcgcgaagcttaaacctgactggacaatggcttccttcatcgaagcctccgttactggtctgcggactcgaataggagattcgcatgtagtcgctgctctgtccggaggcgttgactcatccgtcatggccgcgcttcttcaccgagcaataggcgataaattgcaccccattttcgttgataacgggctgctgcgaaaagacgaagcggccgaagttgtctccacatttcgcgaacaactcggcatccaactccatcatgtcgatgccgttgatcgttttctggataaactgcgctcggtaacggacccggaattgaaaagaaagattattggtgaactattcataagagttttcgaacaagaagccctccgatttccgaatgttagattcttggcgcagggaactttgtatcctgacgtcatcgaaagtgtttccttcagaggagggccctcggtaaccataaaaagccatcacaatgtcggcggcctaccggaaaagatgcgcctggaattaatagaaccgctcagggaactgttcaaagatgaagtgaggacattagggactcaactcggcatcccggattcgattgtatggaggcaccccttccccggacccggcttggccgttcgcatacttggggaggtcaccagggagagagtagcgcttcttcaaaaggcggacgcgattgcaatggaagagattcgtaaggcgggtttatatagagacatttggcaagcgttccttgttttgttgccgatccagactgtcggcgtgatgggggacgaacggacctatgagcatgtagcggcgttaagagcagtcgaagcaactgacggcatgacggccgactggtttagaataccgccggacgtgctggccataatttcaaatcggatcataaacgaagtgcgcggcattaaccgggtcgtctatgatatatcttcaaaacctccgagtacgatagaatgggaataaccccttcgcctccctgaagattagcgaacccaaatagtcttaacaccgactctatacagcacagggatgccacggaaatatggcgccacaacaggaatctcgaagacctctgcggtaaatgattgtggaaactagggcctgccaccccacctctttataaacatttttagctcttccatcttttcaggcgggaagtcttccagaattctcttgaattcatcgtatcgaggatcatctctgagcggatggctctttggtatagtcttaattggatacggatccgtgcttctcattcagattctcctgtatcaaattttgatccgaggccgtcaaaatatggaaccgctaatagtccacttgatgaatcttgtcaatgggaaaagcgccggtgaaagccattaagtctaggttttctgctcgggccgtatctacagaaattccggaagatgctgtcatttcctaaatcctgaggtgagagagcggtgttgacctggcggcatagtcagggaatgctaacattctcctctttcgagacgttcaggtgtcctttctcctagacaacagggactatgtatcactgcctgaacctggtgtgggcatataataatgtaaattatgaattaattgtcataacatttttattttgacagataataccatatctgataattcgtaaatgagaatttgagccggggttgtggatgttttctatcatgtcaggacgctccagcgattcagtgaaattgcctaaccataccgtgctttacggtataattttgactgctcttggaatctttgtcctggtgggatcagcgacgcgactgtatgagctgcgcgaattttttcctctcaggctgcccgagcaggtaaatgagtttatcttgaattacgtgccgttcatcctaggcactttcattacgacggtggccgctctggccggattcatcgtaggtataaattggatcttgaacggtttcaggcagatgtcccggctgcacgttgtgcttcgatgggccggagattactaccaacctgaaagcgtctccctcggcctaaaggaagggaggctccgttcctacgacaagtctccttcgatactcttctcgttgttggctcggttctggggtaacgcgaggtttatttctgaaattcccgctgaaattgtccgatggaacgtaagatttctttggaaggcgttattcattgggatcgctatccatcttctgttccgtctattgaacttggccccgtcatatttatgtgggctcgggctgggaaccggttacgtggcgccttcaccgtaccctctctacaatttgcttgctgtggtgtgcgtccttcggattctgactgccttgagtctcactcctttaagaaagcctgttgttggacgagaaatggactcgatgatagtcgaagggagaggccatccttcgctctttttttccatactggaggaagggtctcgtgttttcgcccacaggggtttccccaacagaatttatcggtctaggcctgtggtttgtaacgatggtgagacgcttatcggcactctcatcgagagctttccggagcatgtgaggacctcctgccgtttcgcagcgctctttagcctgctacttggcgcgatgatgattctggtcgggtttctccaaattatttttatgcaataccccaccttttccgtaagttatgaggagtttttcagactctatcttctcagcttgcttgttgatattattatgaacgttgccatcattatctttggcaagagctttttggaacaggcccgttctttgatgtccatctatcggttcaagtccaatctcgtctatgttgaagccaaaggcgactttgacaagaagctgcccgacctgggaaaaatcgtatcaaaagaccggctttttgatcccttgtgccaatgcgcgttcaatgtgagatacttctctgctgaagccatatcggaatcggtaaatcctgaaggcgtaagggaactggtggggctcgaaacctcgggtcggctggccaaagacatcgggcgcctgaaatttctgccgtttcaagtaaagttcgtggatagatacccttcatcgtggattcagacagaggaagctcagaacgacttggaacaacaccttccggaagcctccgagaggccgatccgaaatgaaggtgaggcgatttcaccagatgttgcggcttcctcggagagttacggatgattgtgcagagcatagtttgtttttccttagcgaacatgattgttatggcggctgacgagcctcaaatgaagactgcagctctcgcgaccagcgcccgaaccgcggctatttcttcccatatgcgcttggagcgtgagaatcacgtcagagagttggaactcagacggctaagaagtgtagtctgtgcgctaggtggcaaacctcatcatgcgcccattttactgaaggctggcaaaaagttcgagattgatcctatttttctggcggcagtgactcatgtggaatccagttttaggcctcgggcacgctcgggcaaaggggcttgcggtatgatgcagcttcgtcccattgtgacaagggcttacggagtagctgatccgtgggatccgcgtcaaaacattatggggggagcggcatatttgcgtacttgtttccacagataccgcaagcattccaactcaacctttctcgctctggccgcctacaacatcgggccagggcctgcagagaagctgagcaaatcgccggccgccaaacggttcgtgaaaaaagtgctccttgtgtataatcgattcacaagcgagccaatccggataagtcgcagattttaggacaaactgttatgattgcgccgtctgcgctgttcgagtcgaatcctcataaagcgcctcgtcctgcgaaaaattgaggtgagcagatgagaccttggttaacgagaactttgctggttgccctgatggtcatgatttccggaacactgattctgagtttcgcggaggactatctggtaattaagaaaaagggtggcccaacccaaaaagtaccccttgattttcctcccgagcaaattgaatcatttcaagtggaatcctcagggccgagccacggcgcgccatcggtgaaggaacgaagtcccgctgcggaagatgaacaaactgttcaatcatctaaagagctggagaaacctgcgccaatgaggcggcctgaatcccgacctacccagataagcccaggggctccgtcgtcacagccgatggttctccggcaaaagcctgcgcccggcccgacgtacacggaacaagaattgaccaccccctcggtggaacagcaaggcccggctcagaagatgcccgaaagggcgcagccgcgtgcagaaacgccggctgcgcctgttaaaaggcctgttacaggtcctgtggccgcagtcgctcccggaggcaagggatctttttttgtaaatgtgtataagttgccggattctatcaaagccttgccggattatagcgcgcttcgtccgactgagtcattgacagcggatagagtcaatctcgacccaagcagagggcaaagtgaacctgcaggacttccggaaaacaccgacggactaggtctacgatttatgggtgtttttgaggtagccggcgagggcatctttaaatggagcgtgcaagcaaaagacggtgttcgactaaatattgatgacaaaactcttatagagaatgatgggattcacgacgcggccgtcaagacgggttacattcacttgggccaaggaacacattgcattgtcctggataacttcaactctaagagcgctcctttcttgagacttcttgtaacccctcccgtcggtcaggaacagattttctccattaagaacggtttggccgggtggaaagagcctgcaaagccctatgacgtgttctggggtcaggtttatttcgtgcccaaaggcgcctaccctcaaggaccggacttcagtcgattgagccctataggaaggatcatagctccggagttgaatatttcagggggggacggattcccgggactaccaggcagaaaggatatggtgggaatccgttacgagggatttttcaatgtccgcggtgcggggatttttgcatacaggctagtcgcggaccattttgctaggcttaccatcggcgcacataagattgcagaaatatcccaaagctcaagaggaggtcctcaggggaacgtgggttgggcttttctccaacagggaagttatccaataacattggatttcttccatccggaaggcccaccgcgcctgggattgtacgtcacagagcctacgaaagcggaggagatcttttcgccggcccagcccttggaaggatttacagcggaagagggaaaggtgaatctcatacctgcattcgtctatttcctcagtcccaatactaagaagctgccaaactataacaaactctcgccatccggaatgttcttcacgagagcaattgattatccacgggatcgaggccccagggaatttcccgggattcccaaaagggaagactggtttggaatacggttttacgtaaaattctcactcgaacagaaggaatcgggaccgtacactttccgtgtagtctgtgatgattccgcaaggctcatccttgacaaaaaaatggtcataaatgtggagagcaccgggaagaagtcggagcaaacaggaactgtaggtttggaggctgggagccacgagatgtttctggactactttcaggcgaccggccctgatggcatccagctttttctaaccccgccgggtggagaagaaaagattttcgcgtttcagtgacgccttaatgccattaagatggaaatcggccgcttccggaaaggaagcggctcattatttgccaatattcttcacccatccataaggatccggcttaagacctgtctgcatcccggtgatctcgtcaaaaagcttagcagacagttctcctgtcttgccatcggctacggtatagtcttttcctttatagcgaaacaggctcacaggagaaattaccgcagcggtccctgagccgaagatttctcgaagattcccattttcggccgcagccacaatctcctcaatggaaatagaccgttcagttaccttcatccctgtgtccgaagcaaggcgtaacaccgaatcccttgtaacaccgggcaaaatggtgccaattagggcaggcgttatgacttcatctttgatgcggaaaaaaatattcatcgtcccgacttcttctattgccattttgtcgacggcattcagccataacacttgtgtgaacccttccgcctgggccttttccgcggcaagaagcgacgcggcataattggccgcggtcttgacttcccccattcctcccctggaagcccgaacgtactcatcagtcactttgatctttacaggcgcaaaaccctccggataatacgcccccaccggggaaaggataatgaaaaacaggtattccttagagggtctcacacctaaatgaatgtctgtcgctattactgtcggtcgcacatacactgaggtgcccggagaacgaggaatccaatcccgatccattttaatcagtttgcacatctgctccataaaaagatccggatcgatagagggaatgcaaaggcgctcgcaagatctgttaaaccgtttgatgttcatgtccggacggaacagcaggatatcgtcctcattaggtccggcaaatgccttgagtccttcgaagacctgctgtccgtaatgaagcatcatggtagcggggtgaaggaccagatcttctaaaggcctaatttggggagtctgccaaccgcctttatcagccgagtaagcgattgtcagcatgtgatctgtgaatatgtctccaaacccgagcttgtcttcatcgtaacctcgggcgtcggacctgttacgtggaaccttgggcatggggcctcctgatgcagcctgtttcgacgaatactattgaataccagagggatttgttcgagtcaagcgcaggttttttcggaatgccggggccgcaaagccgccgcaaaggctccgcaacctacagaaaggccaacgaagaaaagcggccactgaaatggatttggcgggcctccgttcataatattctcatagtcccaacaaaaggatatgattacagtgccgccgccagtaatcatcaagatccaatcggtccatcgggccgtaaccggtttgcctttggattctctgcgcaacactatgactcctgcgaagatcattgtcaaagaaactattattggggccaatacggggccgacccacggaacgggaatcagaaaaagcaagtcccaggtcattaaacctggaggccaattaagaaataatttgagccacagatagaacgaaatgtcccacactccgaatgctacgacaaaatgggcccatgcttctcgacgattccgtccagccaaaatcccgatgctcatcagcatgatcagagtacataattctcgaccgagttcaatgagtaggcgcacccagtgctcattccccaaagctgttatttgctccaatgtaaggacgggaaattggaaacccccgttattaagtggataataaatggcgcgaaggtattctaccaccgcagcttccacaaagccgaaactaatcgcatacaagacgacggcggggagtttcttcaagattgtctttcaaggaagttgatgatttaccagtaatcgtcggatccgcagacttgttcgataaatcttgttcgcgaataggctgggcattcgttgcaggaaaaatcggaccagcgactcttgagggccgtgtccaagcattcgccataatggtcacaatctacttttcgatatggccggtccgtctctcgattacctttgaccaacataggtttgggttccatcctcccgattcaacctcccattttggttcctgctccatctcatccgagacggtgccggcaattgtgagaatttatccaattacgcatgttttcctaataatttcttgatatccggaaagacgccctaatttaagcccgaaaagaggccctacacccacttggcagcgcctaccttcacttgattgacatcaccaccttagatttcccacgaaaaaacaaattgttacggtatagactttttcatacccctcgaaacatgatttactaaactagtctggatccattgtcaaggggccgctcggcaaatcctccaaaaggtaatcattcatttatgcgggcttgccgaaaccactgttccggttctcaatagacaatcaaagcgcaacgtgttagtttaataaattctcaggtcggaaactcgctcggatccgcttatatcaacgcatgccggtggaaatgagcacggaaatagttgtccaactatcttatagcggggcgctggtcgccgaagtgacctacagggctggtcttcatgttgaagtccggatagaggaggagtttcagcacgaaagaatacgtttcaagctatcccattcccaaaacagagaactcgcaggaaattgggaagaagcgctggacatatatttcaatgagggcatctttgacacaaaggaccatatctttcgaggcgagatgcgtagggttggcagcgcacgagagcacaaatccctattccggcatgcggcatattcgcttttgaaggacctggaaatacacgggtatgatgtcaagatcagacacgagtagatcgcgtggaagagattctggtcccctcatcattcggaatgtccggaaataattggggaaacttgcctataaagcagtttccccgtagttcgcgtcggataacttttgttatccgagattggtagccaaaaagagcacagcacgattgcgctgcaccttcagacgaataaccttgttcgctttggctgcaacaacagcagcgttgaaggctgacacgtccgtgacaggtttgtcgtccacttccaggattacgtcgcctgccctgagtcccattttggcgccggtcccatcagatttcatgtcctttatccggacaccttcaccttccttcagtcccagtgactccgcagccccaccaggcacgctttcgatatctatcccaagctcactcgatgtttccgcggcaggagtttgtttaggcgctgccgaggcaatcgccttttctgttcgctcggctatttttacattcagatctatcgtttttttgtctctgaagacagtcaacttcgtcgaggtatccggtttttctttgcccacaagatttttcagatgcgagtgatcttttaccggctgatcgttaaattttatgatgatatcaccggctttgattccagctttttcggccgggcttccgggaatgacttgagataccaaggcgccgtcggtgctagttcttccgaaggatttggccagcgactcgtcgaccgattgaatgttcactcccaatagacctctgcgaacctttccatcttttatcagatcgtccatgatcagtttcgccgaattagagggaatggcaaaaccaataccttgatatcctccgctccgggacgctatggctgtatttatcccgatcacctctccggagatattcaccagcggtccaccggagttcccagggttgatggcagcatcggtctgtatgaaatcttcataatcgagaatacccatattggtgcgaccttgagcgctaacgatcccggaggtaaccgtctgacttagaccaaacggattaccaactgcaactacgatttcaccaacgcgcaatttggaagaatcccctattttggcaacagggaggtctttggcgtcaattttgattacggctatgtcgctttccggatcaatccctttaactttggcggaaaatgtccgcttgtcgcctaaggtaacctctatttcatcagcatcctttacaacgtgggagttggtcacgatgtatccatccttggagactatgacacctgatcccacaccaaagggccgggaacgtctgtcttcacctccgtcttttttgaatcgtttgtataactcatctccgaagaattcacgaaaagggaacgggtgattcttaaagaattgctcgaagtctccccccgtgggacctgatagcccttttttggaactcttaatattaacaactgtgggagttactttctccgctacttgcacaaaagattcacccaactgttttaaggcagggggagcatcggtttgggccgcggctatcggcgcgccagtggtaacaaccatcgtcaatcccgcgatcatcggaattaatgtggacatcaaaaaacctttttgcatagagagttctccttctgacggttcattaatcagatttgacctgtgtcctgaaatttggttctcatcataagtattaaaagcctacggaagaaaaaccggcctagccggacaaatgttaccgcgcaaacatcttgtgcgtgccggaagctgattattgtatccgttagggcatgtcaatttcgaccaggagtttctgtaaccagaaaagttccaggttcggattcagcgtcaggtttgctacggtcagggtccgtgtgaattacgatccagcgccaaacgccagaaacatcgggggtgaattcaaaagaattccgacctcgaggaactttcaaaagcacataggtgcctgaaggcctaatgaacactatatagaaacctatctcactttcacgacctgagcaggtccagcggaattctccggatttacctaattcaacagacggcagggggactaacgctggcctgcatgtcgcgctctcatcggccccgatacttgggacagcgataaccactataagcgcgatgatagacgtgagtataataatcgaggacaactgttttcccgccggatttgacaaggctgtctcctcccggaccgtccgttctccgatccgcacggtaagccaccgcagtgaaccaaggctatctcttttcgagtggtccacagcaatttaggtgcgtcatgggtgtggaagctaacccaaagctataatctttgcaagacctatcaaggctggcagtgtctatccctggccttggccccttgattttcctaaagttaattgtataaaattatatcaaataagcaataaacttgatttttattcaaacatgtattataaccgagctggcactgctcccacgaggtgacactatggacgccgcacagacttctcatgagaaacgaaccatcaatgtcaaagattttcttgaggatttccactcggatctcagtgatcagcatctgctgaaaaaatataatcttaccgaaagcggactcgagacattttaccaaatgctcgaggagcggggcatcctcgagccagatcaactccgggctcgtcaatgtggtcaacatcaaagcgctcaggttccattagatctcacggacgagaagtcctcatatatttgcccgcgctgtttggcttcacatgaaacaatgtttgacatatgccccagttgcggggtttccttccacgagttaataagtcaggaaaaaagcgtaaccgcttcaccctttaatgaagatgaaaatcgaaagattcgcgataaaactttcgaagatgaagaaactaaagaatatagcgcggtgggggctgattcgcattcccctctaatttcaaaaaatccctcgacagactcaatgcaagatatttttgctcatgatcgcattcctaaattcccatcatttgaggactccctggaagaaatagtttcaggggttcctttggagcctgctccaaccgaagttcatgcctcacaggcgccttgcgtctgttgtgagagtcaggccgaggctggaattcgtaacatttatgatcggaagagagctttgcaagcgctcatattcgcagggatctctttcgccgccggtttcttgggaatagtgtctctgagcctgtttgaggggcaatccttggccaggctcgcggtgttcttctgcacggtcgctgtgatgcttgtcggtgtaatattatccacaactggggcctttttactcctggccagagaaaaagtttatatttgtccgacatgtcatagagcatacccgaggatttgatccatagttttctgtatccctcgtcacattctttctttatcgtcgaatcggtagagacgctcgtcaaatacggcctcggatacgcatttccaccatttgtattgtgggcaagcgcttctttatgatagagggatgcagtcttcgtattatgacaagggattggagaatttggccatgaattcgcctcttgagcagcaacctcttatcaagacacaggaatccactgaggcagagaaagaactcgcagacgagaagcccagcttgaatacactgtttcccaaggacgagcgagacctcgatgctctctttcctgagcccgaggtgaagcaattattcattgacgtagctgcaaatttgaaacgcgtaggtcgcttcgtcagccgcatggaacaggacctcacctttaattcaaggctcaaaaaagataaatcaatgcgaagctgagttgcttctgcagggttctagagaattaagtgtcttctgagttcttgcttgcgcaagggcgcggagacgagtcatggatctggggcgagtatggaaagccaactaataagaaccatgtttcgaaaactgttagaggctttgcgcttcaacaaagctcctgctcaaagagaaatcgccgatcgcagtgaaagcagacgaaaggaagcattcattgtggacgtggacggtcttaagattcggggtgatatactcttcccggtggcgcgtccgtctcgcctttatccggccctgatcatttgccatgggatccccggcagtggcgccccgcggcctgcggacgatcctggatacgaaggattggctgatgactttgcctccttaggaataatcgcggtgatattcaatttcagaggctgtgggatttcggacgggaacttcgagatgatgggctgggcacgcgatctggaagcagtgctggaccgaatacttaataccccgtacgtagatccgacccgcttgatgctgttggggtttagtggaggaggagccgcagctatcaaagtagctgccgattcaccggacgtttacagcctggcggttgtgggaacaccatcgcatttcggcgccttcgaaaaggacccggatgaaatcatagtcgatttcaaaacgaggggtatcatccgagatccctcgtttccatctgatctcaatcgctggatggacgaattccgacagatcgaacctcgcagattgatagctcacttcaaaggaaagcatattttgattgtccatggggacgaagacgaactcatccccgtggaccaggcccaggaattattcagcttggcgccggcgggcatgaccgagttatctataattccgggaggggttcaccgcttgcgccttgatccccgctgtgtggatattctaaagaattggttcttgaagaccctcggctggagcgtataggcatcccagcgctcgtcttagatcttcctaattcagtattcagtcttaaacctggtaaaacttcatcctaggaagctcaacggcagtaagtttgttgccgtagacagctcccgtgtcaataccgactttaccgggagtaacgaaaggtgtttccagcgctgtgtgcccgaacacaattctcttgttccaatcatatgttgagtaaatgaattcctctcttatccagagaagatcctcctcagattgctgctccaaagggactccgtctctaagcccggcgtggacaaagatgtaatcatcagtttcatagaaaaggaccagcgagagaagaaactccagatgatcttcaggaatcacgaatgcctttcgacctatgccgccctcaacatagctcgcaatggtttcggctccgccattggcgacataaagcatttgatccttttgctggatataatagtccagaagcattttttcatgattccccttaaggaaaatgatatccccacccatcttcttaagattaaccatgaattcaactacttcccgtgattgcgggccacgatcgatgtaatccccgataaacaacaaaaggtcaccattgtcccgattccacggcaaaactttcattaacgcgcaaagtttatcataggagccatggatgtctccgacggcgaatatttttctactcatggctaagtgattaagcctcctgcatatacattgctctcaacgttttcgcatgtcaacggacgatctcgatccttgtcttcgcataattcgcacagctattttcgaaagctgaagcccgcgtgactcttaatatgctttcaattgccttcaaacgccgttcgcacaaatatatcgcacattttgaggaaattgtatgaggattgcaatcttttgtcctatctgtcaacataaacatatgccaatcacaagcctacgaggaatggaaatgaagtccttggaatataggagataatgtgtacattcgacttgaagggcccgaacacctgttggtaaagacggcgccggggtccgatggcctgccgcaagagctgattttggcgaaactgggatctgaccctgagcttaatctcttcttttcggcggaacgcggacgccgcgagcagccgggtctatgggaaggagtgactgattttcatctgctccaagccctggagaattacaaacgtcgtttgggacacctcaaaccggcattggttgcggtcaccggcaaatattcagaaacaatccaagggcatagcctggagcccagagaataatgctttggaaaagaattcttctaacttccggattactgatcattgctctgatggcggccgtcctgttgtccctacgcttcttaccggaaacggagctgataagaaaaggggttcaggacaagctaaccgaattgaccggccgacagatcgtcataggctccattaaatttaccagttctttttccaacctgattaccttaaatttggacagaatagtggtaatgtcccacgacggaggagaagtcgcgtcggtggaccgcctgattctggcgccgtcactcaaggggttgctaaacagggaattgtctatcaagtcggccaccgttacgggattgcgagctagattcgagcgtaccgccgagggcacagtcaaagatccattagggcatgtggtcgctgccgggatttcgcaagtcacaaccgaagcgaaacatcccgtggacacaaaggcgtctgctagagcggaatcggacacgagtgaatcatctgcgcttgctcgaaaagaaggcgtgaaatggtctgtgagatctctggcccttgtggactgccgtatagattggatagaccggctggctgcgcctggaaaggctatttcgctgattgacatttcaggtcacttgacgcaacaaggggcgggtgagccggtttcggtcctaatcgcttcaagattggaccccgacattagcggaacagggctgatcagattagaaggtcagattttacctatagtcgatttttcaagcctggagggggccatactgtctttggcagtggagaaggcgcccgccgacattttgcgtccatattttccaacctggtggaccgcaggaagcgacattactcaattcacactgcaaggtcgaattcgatgggaaaaaggacaatcccctaaattttccttgaccacggaaatagtcccccgttccggtccgtccgccaaaattgactgccaaggagaattgatcgccgctgatgatttgtccgacgtccgacaactccgtatttcaggcgaaaccgacgcgctacccctaaaactgatagcgacgctgcgatcgatcggctttccatttgatccggaacaagttctcataaaggccaaaattaacggcgaatggaataggaaaggcccgtggcagctcagaggaactaccactctggaaaatgttgtggcgccaggcgcgctacccggaatcggccatcctgttcgagtcgatgctgaatttagaatggatcctgacaatcttttcctcgacaagaccgagttctgggaatccggacgtttggcttcgattattggaaagatcgaacagccgttttctgccgagcgagtgttggatctgtcaggcaacgcaataatccagtcacagtggttgcccggttttggggtcaaattcccgaaggctgttgatataagaggcccaatccctgttcaggcacgtgttagaggtcgatctgacgcagcgttaattgatttaaatggagacattaccaatgcggccgttcgatgggcgccacacctggaaaaactgcccggtaacgccgcgagcgtctcgctaaaaggaaaagtgaatgcggcgccggaaaagaaagattcacgggcgagatttaatggcgaagcccattttagaatcgccggggctcgagtgggcttggccgaccatgctccacggcttgaaaaatcgacaatccattttgattccaaagtgttggttaacggcaaaacaacagacctgaagaacgcctcgttaacattgaaaggcggaccggcttcaacagaaatgctgagcgccacggcaaatgtcctggggcttggttcgactcccaaattcaacggcagcgccgtggctcagttaaattcagacattatagcgctcctgggcctgcaaatgccgacaaacatggtgttgaagggaagctctcaactaaaagccggattttcaggtgacatcaaccacgtgagctggactttggacgcgcctttgaccaagcttgatatagctacggatcgttcattcagaaaaccggcgggtgtagcaggggatgtcaaagcctcaggcaaatggtccaaggattctttggcgctcgtgagcagccgattaacgctgcccggagtgtcggtcacggcggatggggacctgcgcgataggactggaaagctaaaagacctaaagattgaactcaagaaatctaacgcgaaggacattgctcggtttgttcccgcgacggaaggattcaagctttccgggcctgtggaggccactgttcatgttcgacccggtgataaaggaatggtggccggcagtgagattcgtcttctttcggtcgattgccgaccggccaaatccacttggggcttggaaaagcttcagggaaaaatcgaaatccaagggacgaatttggtggccgacgacattacgggaagagtcaacggcgcaatggaaggaccgttgaaaataagcgcggtattgaatcacttttcatcgcctggcgccatgctcggaactgtgtctcttcacatagggacgggccgatttaaagccgaacagttgagaaatactttaaataaggcgcggatccttattggctctttgcttaacccggggatccagaacaagggcagcgacttgatggaattcgagtctttaggaggagattttgaaataaaatcagggatcgtccacacactaaatcttcgattgaaaggcccggaatatactgccgtcgcgataggcaatcttcgactggatagcctggccctcgacgcagtagccggactacatactgttacaaccgccggcgccgcattgggaaaaatccccggcgtccaaaaattcgtgaaaaaacatgaagatctgctaaaggccaccggattggaccaggagcttaagcgctttggaattcaaatccccaccgatcaagaaatgaagccagacacgcaaacgccggttaaaactcccgtcacggtgtttgtaaagctcaaagggccggcgtcatcgcctgaagcgattccggttttggaaacagctataaataaagaaattctcacacgcttgaaatctcttttatactaacgaaaagtcatttgcattcgttttcattcgactgaagaataaaacaggcgataaacctcgaaagccgggaatctaatcggccttttagcttgacactagcagtcgatttgcatagataattgatgtgtacaagtcttccctttgttcatcttcaagaaaaaatcacacattctcaacgaggaggaccccatgtcaaagaagtattgggacgagaagttcgaactcatgaacgaaagtaacatgaaggcattccagttggagaaacttaaagaaactctccaatgggcctacgatagagttccatattacaaacaggcctttgatgaaaaaggggtcaaaccgttggactttcaaaagcttgaagatctggcaaagttcccctttacggtcaaaaccgctcttcgggacaactacccttttggcttatgcgcagtgcctatatcggaagtagttcgcattcatgcgtcgtccggcacaaccggaaaacccattacgggcccgtacactgctcaagatatggaacagtggacagactgcatggctcgcggtctatgggctcaggaagtcaggccggacagtatcgctcagaatgcctatggtatgggactattcaccggggggctcggctttttacagggcgcaattcggatcggcgctgccgtagttccttcaggcgcgggcatgactgagcggcagatattattgatcaaggatttcggaactacagcgctgttttgcaccccatcttattgcctgacaattatagaacacgcggaaagaaccggtgtggatttaaagaaaaccaaactccgcacaggacacttcggagccgagccctggacggtggaaatgcgtaaagaaatcgaggctagaagtggaatacatgcgtatgagcactacggactcactgagttgatggggccaggcgtgtcattcacgtgcgagcattacaaaattcatgtcaatgaagatcatatttatcccgaaatagtagattttcaaacattagagccggttgaattgggcaaagaaggagagttggtcttcacttcactgcagcgtcgggctatgcccatgatccgatataggacacgcgacatctgcactctgcgccgagaaaaatgcgaatgtggtcgaactctcgttactatggataaaattttgggccggacggatgacatgatgatcatcggcggagttaatgtatttccctcgcaagtagaatcagttttgatggaattcgatgaagcggagccgctttaccagattcgcctcaggaaaaaaggctatcttgacgccatgatggtggaaaccgaagtgaaacccgctgtctatgaggcaggccaagccaaaatcgacgaacttgccaagagaatatcggccagaatccagcaagtcataggaataaatgtgcctgtatctattttaccgatcaattcgatcactaggagcgaaggaaaagccaaacgcatcattgacgagcggtaagaaacctgaacccggagtctgattccgaatctgtagtagtaggggcgggtttcaaacccgcccctaccgagttttccacgaatgccaaaattctttagcggtgcgcgaatactttggctcgccactcgtcctgcttggctctatccgtatggccgagtatttcgtggcatcggctacgcaaaaggtatacctctcctttatatggattgacctttgcggcccgatcaaggtcagccacggcctgcttgatatcgttcaggtcgaagtacaacttggcgcgttttagtctagcctcaaaatggttggggtcggcgctcagcgctcgagaatacgcttcgagagctcggtcaatttgagactcagccatatggatttcgcccatggtcacatatgcctcagcaaacgacggttcgattctcagggccaattcaattttatcgagagcgcccgctgtatcccctttcttgagcagcgcttcagccaaaacttggtacgctgttgggtcgttcggctccaaccggatagcttcatgcaaatcggctatagcccgatctagctgtttttcattgaaatagagactgcccctcagcaaccgggcctcttggctctcaggattcatctgaatggctctgtctagatccataagcgcccgatcccctcgcattaaatacttaaaaacttgggcgcgctttgtgaaaagccagggatcatccggccgtcgttccagcgccttgttcaaatcactgagggccggcagataactgccggtaaccatgtgcagcagcgcccggtttatgtaagaaagaggattgtcgggctctagcacgatggaccggccaagtttttcaagggcctccggatatctgcccatcgtcataaggaccgacgcatggttcataaataatattgaatccttggggtcggtttcctctgccttttgataatctttgagggccttttgaaaatcatttagcactcggtatgcatctgccctataccagtaaatttgcttcatatccggatcgatttccagggccttattgaaatcttcaagagccttggctggttgggaaacattcaggtaagcgaaccccctgcggaaaagagcctcagcattcctgggtcgaattttgaggagtcgttccatttcgtggatagtggagtcatacttcttctgttccacgtaaatggctgctcgcccgaaataagcgtcttcttcattcgggtccaacgcagtgcttctgtcaaagcacttcatagcttccggataattctccctgtaaaagcgcatcagtcccatttgtgaatatacaggcgcaggtttcgacgccacctttacagcgcgctggagagcctcgatcgcgccatccaaatcgccccttctcgcaagcaaattactctttgctatccaggcctcaagcaaatttggatcaatttccaaagctgcttcaaagtccttcagcgctgcctcatatccatgaatcctttcagtggcctgacccctcagcgtcaacgccatggcgtttcgggcatccttgcgaatcacttgatcaattatttcaatggctttgctgaattgaccttcatcaattaaccgtttcgcacgctccgttttggatgaaggcaaccaaccacatcccgagagcaagagaaatatggagcatagaattatgctgtggatcacacaaattcttttagttttcacttggaacattgtcattgatcaactgatatgagcgcaaagtggcccaaaaatctgacaagctttcggccccttccttattcaagcctaatttgagaaatcatttttgtcaaattacagcctgtcggacagttctatagaaaaaaagatttttaaatatagaccaatggagtttactattaaattcaaaatttatataattccaatattgagttgattgattggaggtttgcatgaatgccgtttcggaagccctgccctatgtgcagaattttttccaaatgaactttctcttcagcggcctcgaggtttcctccaccatgattcttactgcacgcgtgtttatgatggtggctttgggaggtggcctcttgtgggcgatcttcaaaataataatcaaattcctggactgcatccaaacattcttggctaatttgggccacatcccctgggtattctacctcctgccgctactgattatcccaggctccgcggacagtctggcagcgaaatggatagggtatgtccttctagtcttggctctgctgggtttttcatttcttggcgtaattgctctggttttgtggaagtacggagtggaccaggccctgcggttaataaacagactgaggcgctatccttcagatctctcgccgacacaatctcgtgaatcttctatgccgtcgggcaacattgtgggcagctttgcggattcgcctcaatctattcgcggctaattgtcgagccgggcgcctctctcgttttgaccgctcaaatatgctatatgaacatcacagatttgctaagagagggcatccgtgttcggaatatccatgtgggaaattgtgcttattttggtggttgctttaatcctgcttggcccaaagcaactcacagaaacagcccgagtcctgggaaaagtgtacagggaaattcagaagatggcttttgatgtccgcaattcgatagattttgatttggagccaccttcacagccgccaagccatcccaaacccgaagaagaaacagaccgtaaggtcgtggatgataaagcccttttacccccacagggagaaaaaaccgggccggatttttacgctgaactcctggaaagttccagggaagaagaaaaatctgagaccggcgaatcaagttctgaaatccttgaaaaatccgaatcacagcctgaaaaagagaaagagccttccaccaccgacaaatcatgagaaatctcctaattctcctaagtcccagatataagaagctacgccatcggattgagaagcccggggctgagagaaaacgcttggtcataatcggcttattggtggtgggtctgtgggcggttctttacgtggtctgcctgaaggctttgacctattttaccgcagaagagatgttcggaataatagcagccaccaagctcctttccatgatgttggtcactcttgcctttgtagctgtgataagcaatttgatcaccagtttttcgacgtttttcttatccgaagacctggaattgatcatggcgtcgccggcgcctagttgttcgatttacacggtccgattcattgagactctggttgagtcatcctggatggttctgctgtttgggttccccgtttttctcgcatacggccgagttttttccgcgccctggagcttctatgcgctgagtctggccggcttcttctgtctgttgatgatgatcactgccgcggccgtatttttggtccagaaccttgtgagatctttccccgtaaagaggcttcgggatctatttgtatttataggcttaatgatttttgtggcgatttatctgctcttcagaatgctgcgtcctgaggactttctcaatcccgagggattcgcgtcggtaatggactacctctccattatgtcggaatcttcttcgcccttattaccgactacgtggcttatggcgacccttcggccttatattacgggaaacggtttcggagagattcctcttttccttggtcttctcatatcaggagcagtggtagctttcaggctgggggggcacagtcatgaatggattcattttcaaggttattctcgtgccatggaatcccgcggagcccgtttcagtaaaagcaggctggtcaacctgttcggccgactgctgggccgtttcatggatcgaccaaccgtaaatcttgtaatcaaggaaagcctgcttatggccagggattggggccgcctgagtcaattatttctgcttctcgctctgatactggtctacctatataacttcagtgtgctgcccactctcgattctcctgatcttgccatgttcctgaagagttccatcgcctttcttaacattgggctggccggtttcgtactctcgtcgcttggtgtaagattcctttttcccgcgatttccggagaaggcagggccttttggattttaaaggggtcgccgatcagcttacggaaaatcctgtgggtgaaattctttttctacttggcgcctatgtttatccttggactttttctcgtgacaatgacgaatcacctgctcggaatggggcttttcatttccatagtctcaacgatcacgatcgggtttctgacagtgggaataacgtcactggccgtaaacatgggggtcatccacgcagacttaaaacaatcggatccgagtagggcattcagcggcgttgggggtcttttaaccatgatttattccgcgcttgctgtaaccgccgtgatcctactcgaagtgttccccgtctacaggatcgtaactgcggaattttatcgccgaagcttcaccagtttggattacgtgtcgattgtagtttgtttcgcggcggctcttgccgtggcgatgtatctcatcattcagccgcttcgaatgggcatgaaacgcatcactgaattggaaatatgagagattaggtcacacaatggaaagaagcgacgtatcaataccctgcggaacattgactctcgagggagtgttggaagcgcccgagatggctaaggcgccgttgcccggagcggtcatctgccatccgcatcctctgtacggcggaaacatgcacaacagtgtggtcaaggctgtacggaatgctctgattgacgaaggacttgcatgtctgagattcaatttcagaggtaccgggggcagttggggtgagcacggaaatggaatcgacgagttggaagacgtgctggccgccgtggatttccttgaagcaagatcggaagtcgacgggagaaaactggttctcgcaggctattctttcggctgctgggtcggactgaaagctgctgcgcgtgatgctcgacttggattactcataggaatttcgccccccgtcgatgagtacgatttcgattttctcaaacaggaaactcgacccaagctgctcatcacgggcgatcgcgattttgtctgctcaaaagaaaaattccggaaacttctcgatgaaattcccgaacctaagaagggagtaataattccgggagcggaccattttcacgccggcaatgaggacgtcattgttgacgagaccaaagcattcctggcccaataccagttcgatgaaagagatgattagatggggtttgcagcaagctcagtttcgattgtcagatatcgagtccgtggcgaaatagagggctctttttgggacgcagtggacgaaggcgtcaaaagaggggcttttcgcgaaattgaaaccgcgtctgacgagattggcatgggatgggcctcgatggaggatttcaccgacaccacattccgatcttcatatgtccgaggcaattatgtggcggtctctctgcgtgtcgacaatgtccgagtcccgccgcgggtgctcgaaatccagttcaaaaaggaagctcgaaagataatcgaacaaacaggggcgcatagattatcagccgctcaaagccgagacctcaaagagcatcttaaagaatcgctcaagaaacaggttttcccatccattcaggtttacgatctcatttgggatacggccaaagcggtagtctatttcggaagtcaggcgccaaaggcgcgtgaacgaatcgaacaacatttcaagaaatgtttcggcctgactttggttccgctcataccgttcatacgagctgaagaaatcttggccgaaaacccgggaagacaacgtctcgagtctttgaagccgtctatcatggccccgtgatcccaaagccggtcaaacagccatttcaccgcagagaacgcagaggccgcagagaagaaattagataacgaactattgacttagcacggctgacgtgcagacgacccttgacaacgtcattcccgtgtcaatgggaatccagaattctcctcgcgaaagcggggatctagtggttgtctcgttaccccgttgaaaaacgaggtccagtctggttcccggctttcgccgggaaaatatctggattcctgctttcgcaggaatgacagcacaaaagccggcgattaggtggcgctgagttaaggtcacaatcctccagatagttgttctccgcgtcctctgggctctcagcggtgaggtccctgatttctagcaaaaggcggttggctatgaattttttggatatacttcgagaaaaggcttttttggggcgggagttcttgacctggctctggttcaagtctgaacaaacaggcggccgaattgagcttcccggacagaaagtgattgaggtgatcttcctggaccgaatgactctggacctttccgacgcggaaactccgcagacagtcgctctaaaaggcgagcattcggagcttcgagaaggtttagccgctctaaaggaaggcaagaaaatcgaggaggctcgtatctccataaggtccggaagtgatgattttacgatggtggcgaaggccacctggttttctttcggctcatttaggactcccagagtgctccctccagaagaatcggaggaaggcatcgaaggagcgttcctggaaaaggtctctcttattgaggaaggaatggaagcgctggactcgcttttcgaatacttcgtcaagctccggatttccgatgaatgggagacaactgaactgcccgcgctgcggcattgggtaggttcggctggtgtttagatgcgtgaactctgcattgcaatgcttttgtggccgccactacgtttgccggcttcccgtgtgagactgccgcgtaccgtattagaaaggaggagagactatgaaagggctgaagattctcatggcccttgtggccatcactctcttcgccgttcctgactgggcctgctcccaggttttggtggtctgccgcagattcatagcagacaagggctgccacaagtgttctgattatttttatgtcaactcagaagatgaggctcaacagcggtgcggcaaattgggcggggacccattctatttccctggagtgggaaggatgtccttctggatgagaggccattgttcctgtgaaggcatcgaccctgcgccgtgatagcgcattttccatctctgacgcgatgttcatctaattggacaaagtgaatcggggtccaattgaggattccaattaaggcgagaatagtctgccgaggatagacgcatgatatctgctcgcgaagaaggacaactctgggcacaagccgttgtcttcctggaacagggccgtccgggtgacttggaccacactcgcgcagtggtggctaatggaagaatcctgttggcgaaggaaggcggaaaccctcgggtggttattcctgcgcttatcttgcacgatgtcggctggggccgagtcgatttctccgatttcattaacgctcctgcagaagcgaaaagggacgtagaaagtgtgcatatgcacatgcggtacggcgcgcaaattgcctctgatattctcagcaatatccgatgggatgatgaggccattcggaagatcacttcgataatcgctgttcatgacattccggaaaaggtgctagcgctggatgatctggacgccacactggtctttgaagccgattggttggacaagtatgtgccggaaagacagaacaggtatttcgatgtggtaccgaaccggacagagcttaaggaaatcaaagagtacttcaaagcaaacagatcacggtggttccgaaccaggacttcgcgcgaattgctggatcagatcatctccaggcggaagaaagcttgagcatgctccggcgccatttgaaatggctcgagaattccctccatccccagccggatttctttggtaaactgttaatttcggcttgactggcgacctcagacggcagagaataaggcttcagattctgaagacgtcgtcagaaggatagacgaatgaatccttcaacgctgcccgagggcaatggagagcttgcaaggcttccccgtaaagagcgagaaaatctgcggcaacgcgaagagatactcgatactgcgcttagactgttctcggaaaaaggctatcacaacgtctccatgcaggagatcgcaaagcaagcggagttcggagtcggaactatatataaatttttctctaataagcaggacttgtacagaattcttatcatggaaacggcggaaaaatggcaacgagctgtttttcaagccctagaacaggaacgggatccttttcaggccataaaagaatacattgccgtccaacgggaactgttttttgccaatctgcccgtcgttcgcctgtattattccgaaaccaaaggggcgtgctacagcatgaggcccggttttgaccaagacctcctcaagcttcgcgatgaacgcatcaagaaattgggctctgtttttgaggcgggcatcaaggagagagttttccgggacctcgatcctaatcacatgtcgctggcgctccacggaattatcgacgcttttctttaccggatgatggaagatcctgcgcgattccgaaaacgggatgagctgtcagacgctgccgagatttttctcggaggagtcatgaacaagtgacaaggactaatggccagaaattaggtcatccgcaacctttaatcatcgatctttacgaggtctctgatgcaacccactaaaacggtctgtgaagcgctcaaatggagtttggtcctgatggctctgccaggcagtctgctgctggatggctgcgaccgccggaagcaatctgcgtcgcctcctgttccggaagtggctacggtgacaatccagccgcaggaactcgcgctgacgaccgaattgccggggcgcacctgtccgcacctcgtatcggagatccgacctcaggtcaatggcatcattcagaagcgcatgtttacagaaggttccgatgtgaaggccggtcaggtgttgtatcagatcgaacccgctccctttcaggcagccttcgacagtgcgagggctgcccttatgaaatcagaggccaatctgagagtgactcggttaaagttcgaacgttataagggattactcgccgaaaaagcggtcagccaacaggattacgacgatagagaggctgcgctgaagcaggctgaggccgacattgaatattgcaaggcagcggttgacactgctcgcatcagtttggattacacccgtgtgacaggtccgatatccgggcgcatcggcaagtccaacgtgacagatggcgccctcgtaacggcgcatcaagccttgcctttggccaccattcagcagctggaccccatctacgtcgatgtgccccaatcgactaccgaacttctaagactaagacgtcgcctggcagacggccgcttcaatcaaaacgggacgaaccagaaaaaagtcaaactcatcctggcggacggtacagcatatcctcaagaaggaacgcttcaattccgtgacatcacggttgacccggcaaccgggtccgtgatcctgcgggtcgtcgttcccaatcctgagggacttttgctgccgggtatgttcgtccgggccgccatagaggaagggatcgctgaacaggccattctcgttccccaacagggcgtgagccgtactccaaagggaaatcccttcgcgcttgtcgtgagtaatgccgggacggtcgagcaacggatgcttgggctcggtcgcgccatcggcgacaattggctcgtctcttccggcctctccgccggagaccgagtgattgtcgaaggaagtttgaacgtgcgcccaggttcaacggtaaaggccgtttccttgatttcgaatagcccgaaggcctgcgtggaagtcgaaaatgccaagcgcccgctacaatctaattaacggaggaccgtggtgttatccaacttctttcttgaccgcccggtcttcgcgtgggtcatagccatcatcatcatgctggcaggcgggcttgcgattcacaatttgcccatctcccagtatccgcccatcgcccctccgtccatcgccatcgacgccttttaccccggggcatccgctcagacagtggaggacagtatagtccagatcatcgagcagaagatgaccggattcgacaaactattgtacatgtcagcaacgagtgatgcctccggcaccgggaggatcgagcttacctttgccccaggcgccgatcccgatcttgcctgggcccaggtacagaataagctccaacttgccatggccagcctgcccgacgtagtccaacgccagggcgtcaaggtcagcaaatcaactagaaactggctaatcattgtcggtctcacctcggaagacgacagtatggaccaggacgacctcgcggactacgctcagtctagtgtccagcaggtgctggcccgggtgccgggagtaggtgaagtggaaaccttcagtttccagtattccatgcgagtctggctcgacccggaacggctgaccgattaccacctgaccgtggaagatgtcacccgaagtcttcaagcttacaacgtggaggtttccgcgggccaattcggcggggcgccggctgccaaaggtcaacggttgaatgcctcggtcatcgtccaaaacctgctcaagacaccggaggaattcggcgccataccgttacgcaccaatcctgacgggtctgtcgtacgcgtgcgcgacataggtcggacagaactgggcaccgagaaatacgggaccaataacctgtataacggccggccggccacgtccttagccatccggttggcgcccggagccaatgcagtggagaccgccgatgctgtcaaagccaagatgaaggagctttccaggtactttccgacaggcatgaaggtcgtttatcccttggacacaactcctttcgtgaaggtggccataaaagaggtggtcaagaccctgttcgaggctattttgctggtcttccttgtcatgtatcttttccttggaaacatacgggctaccctgattccgaccatcgcggtgccggtggtgctcctggggacgttcgcgattctggggcttttcgggttctcgatcaacatgctgactatgttcgcgatggtcttggcaattggtcttcttgtggacgatgctatcgtggtggtggagaacgtggaacggatcatgtccgaggagggactcggacccaaggaagcaacccgaaagtccatgagagaaattacaagcgcattgaacggaataggtcttgttctctcggcggttttcggcccaatggcattcttcggtggctctaccggcgtgatttatcggcagttctccgtgacattgatcgcagctatgctgctctccgtggtggtggcccttatcttgaccccggttctgtgcgcgtcgcttctcaagccgatgccaaagggccatgaagcggctgaaattgccttttttctattccggccttttttacggtggttcgacagaatctttctcaggacgagagatatgtaccaggctctggtcggccacatcattttcagcaagctccgctacattttcatctacgttctgattgcggtaacgctgggattcctcttccatcgaatgcccacagcatatcttccaaatgaggatcagggcgtcatgttcatccaggtgacgctgccttccggatcgaccttggagcagaccgaccaagttatgactcaaatccgaaaccattttcttgtggatgaaaaagaagtggtgaaatcctgcttcacgcttgccggcaggggattttccggaggcgggcagaatgttgggctgggatttgtacatctcaaggactgggacctgcgccagtcggcggacatgaaagttgatgccgtggtaaagcgcgccatggccaagttttcgaagatccgcaacgcaagggtattcgcgtttccgcctccggcggtcatggaactcggtcgcgctggtggctttgatttccaattgcaagatcggagcggcctcgggcacgaaacactgatggcagcccgcaaccaattactcggtatggcttcccaggattcaagattgctccgtgtacgcccggccggattggaagatgtgccgcaataccgggtcgatgttgattgggaaaagggtggcgcgctgggggtttctatcgactcaatccacacgaccatatccgcggcgttcggcggcgcctatgtaaacgatttcatccaggggggacgagtcaagcgggtttatgttcaggccgacgccccgtatcgcatgctcccaaatgacctggaacggctctatgttcgaaataaagccgggacgatgacgcctttcgcatccttcgccacgggccactggatttacggccccccactgctggagcgtttcaatagctttccgtcgttaagcatttggggcgaaccggtaacggggaagagttcaggggaggcgatgcaggccatggaggagatcgccccaaagctgcccaagggcatcggttttgattggaccggaatctcctaccaggagcgtatggcaaaatcacaagggccgattctctacgccttttccattattgccatttttctctgcctagctgccctttatgagagctggactatcccattttcggtaatgtttatgttgccgctgggtgtcatcgggggagtggtggcttcatcgcttcggggatttcccaatgatgtttattttcagatcggactcctcaccgtgttagggttgacgaccaagaacgcgatcttgatcgtccagtttgccaaaacgaaaatggaagagggagcagagttgattccggccaccttggaaggggcgaaattgagatttcgtccgatcataatgacatctcttgctttcggtttcggggtccttcctctgacaatggccaacggggccggggccggggcgcaaacggccatcgggacaggagtcctgggagggatgcttgccgctaccttcctggcgacccccttcattccgctcttttatgttttgatttgccggatgtctgagagaacaaagcgcggccagactgaagcggcagagtcggctggcgcgaatccttaaaatagtcataggcgtctgggtgacgaaagcaggttttctatttcgccgaaccttgtggtttatgagtctgtcgcccagcgaactgcaataatggttggcgtgtgcatcactcccctagcggcgccacactttcttgatcagtccctgatgatttatcatcgaaaagcatgtgtgattcaatctcaaagcaagctccacattcgtcacagacatgggcggcagggaaattgtgaaattcgtccaaggacaccgtggcattgcattctgggcattcgatcttcatggtctgtacctctcttagtaatttagtgattcgttctgaactgactggagctgtccttatgttagttatactaatgctaataggccggacctgtcaactcttgtcaagttatatcgctataaatcagccaattactcgtccaagtgacaccggcatgaattaatttaaactaattgcggctatacttaccctctgcgaaaccgcgcaaagttcacgaacgcgggatatacccacgggcagatagatggaggtttgaggcgggagcgctgtgtcgaaaccaaagccacctgtgactaagtcgtccgaatcgaactgcgcaggatctgtctctgaataagttcctctccgtcggatgctgtcaggctatgttggagcagtgccgtaccggcgtattatgtttgacaggaactgccggagagagatacgctcaaaaactccatacgattgtcgctgccgagcaggatggttccagatcggccgccgttgagtcgcttcgggcgatgcggaagtcgaaggggcagatgaccacaggtccatcaaagcggaggccccagagggggtatgttgtggcagcgtaactaggatgacaaggcatacggaaatacaggcaaggtattcttgtgataactcgcctcagccgctacacttttttggtcactaacctgcttctggtaatatcttctacatcatgtgcttgggaatttagtattgattccgctttgttaaattttcgcttcgtctatgcttcccaggcagggtcgcagggattcttcgggcctttcaacacggacatgagttcacagggagctgattttgcctccctcaatggctggttccgacgaaggatgctctcagggtccaccgccgtcacctcatcgacacgcctcgtgatgttccccctcctgagattaaaccaggctgtctggctggcaggtacttacagggtagcgccacaaattccacaaaacgtggatccgttcttagctccggacgctgaaccaggcttctcacgcggaacatggaccaggttgtggatgacggtaaacactcccttgggcacgatctattatggaaaaagaggcttccagcagggatgtggtctccaattcagcagcgcggaagttgccgaagatgtcatagatgtcaccacgaggactgtgcagatattccaacttgaaaccgtccatggtcccttcactgtgggcgcgggattatatccgtggaggcgaggcagcttactgtactggaacctcgacgatcagaatacggcaagaacagcccatgtattaagctacgtgaggtacgccaatggacccatcgatgcgggtattggggggttctattgggtgtttgacgaaggccctgaaagccagttgagtacccaaaaacgggcctctgttccaccagccactacgtccggaaccgaaggctggatttatttcaaatatactaacggccgcctattcttaaatgccgaagccgactggtattatcggaccatacgatatcaatcttcgcaggatgggaccttttacggcgcccctgccgccccttacgcaggaggaggaagtctctttgcgccaaagtatgttgagtcatggcgatacatgttggaatttggctgtttttccggacccataaaagccagcgttctcttgtgccacatgcccggacctgacagaagacacggaatcctcatagacaggcaacctttcatccaggaaccggcaagaagcgcttacggagttttctatccttattgcctcatgatggccaaatattacagggccggagttgattcatatcttgatatgtccgcttcggatgtggttgcagggcagcttaactacatggtggccagcaaccttgacattgtcacttcgattatgatggcgcgaagagcgtctcatggatacggctatggttacataaggcctgatctcgacaagtccggagccgtgaattttgaccaccgaggaaatttttcagttccggcgccatcgataccttataacgatctgggctgggaattaaatcttggaataggatggaagctcctggaaaactggcagctcagtcttcgtggagcgtactggcagccgggaaaatggttcaacttcgcctgtatcgacaaatccgtgtccaactgggataatccttcaccgctcaacaattggggaacaaaccctaaccgggtcatagcgcctattatgggcgttgaactctacctcaacaccaagctttgaactctccctgaagagtactgatgagcgtccgattgcgtaagtgacgttccgtcattcctgcttccgcgggaatgacggcaggtgaacccgatgttctgcctcattcggacataattatagacacttgttataatgcaattcacggggaacaagttccgcaaaagtcccgcgctgacaatgctgaaaaagaaaatcccgctgcggctcatttccaaccgagcgggatgatttatcttttttggctccccgagtaggactcgaacctacaacctagtggttaacagtcacttccagaaatggaaacactaatacttccagagtcttattaggacgaaaccgttgcaagaaccagcacgaaccacgacgacacatcaccgatggacacaaaatggccacactggtctaaccaggtaaggtggcccagaagatcaggttcgtgactgggggccttctggtgtcagtggaaacgggatctattccaagaacgactctaccatccgtcctttgatcctaaagcaccccttgtactcctgcggaagctctcgctgattactcaaattctctccaacgtcgagcatcaccacctaaaaattggtcgcgaatagaacttttattcagagtcggagattggtgcggcagagttccgctccatttgaaaagacccaaggagaatcatccttatgaaagaaatacaaatttcactggaagagtttgacctggaagcattgctggaaacgacagtccaattcctcaaggaacaggtgtccccggaagtggaccctacctatgggatagtctgggttcaaagcaatgacgacgttcccgtcttcggtcccgaatccggatgggatgtcccgtctggactcaaaaaagaaggaaaaatcgtcttctttccgttcgcccgtgcagatgccgatgggaccttcacgtgtgcagacggaaacacatacggggcagcacctgacgacgaggagtctgatgactacatgctgatcggcatggaagatagcattggctttttggtccaggtgaaggacggcacggtcatcataaactcagcgattcatgcgggtggagcctgccccggccccccaccgagtatagatctgtctccagactgcggtgtcctggaaaagcctatggagaaattcattaaagatttagtacggtctgatagatcggacattgaacctctcatccaagacgagctatgttcccggtcctgggaatttacgacctgggagacaacgcgagagctttccggagaagatttagattggctgagcgccgaaagaatttttctcttggatcacagagtcgctgcaataatggaaacgaagactccgggcgctggcctgccgagtgcgttggaacgtgcagtatattactcgctgagctatcaagaaagaaccggcaacatagcaccgcttgccgtcgtgagagaccaaggccaatactcttgtctcgacattagagcgaacgcagttccgttgaatctaagtaggttccccactccaagacagctctacgagtctcttcatccagagacagaggagtttcaaggaacgcttcggtgttaccagcgagacgcggtatcccagattctcctttgcgttttctcaggccgtcgcaggatgtaccttcaaatggctggcggcactggaaaaaccataacagccgcagcagcgattgcgagactgcattccgccggactgatacagaagagtctattcttagtggacagagatgctttggctgatcaggcagtaaaaaaactcactgaccacctggtagggcgcttcaatattggacgagccgagggggctgagaaagataaggattacgatattctagtatccacggtgcagcacttggccactgggttacgatatagtggctacgatccttctcatttcgacttgatcatcattgacgagtgtcacagatcatatttcggggcttggttgcccgccttagatcacttctccgagggcggggcgattctcattggactcaccgcaacaccgtccgatagagagaccctcagcactgatgcctttttcaccgatgagggacagtatccaggtcctatcttccgttacaccacaagccagggagagaccaatcctgaagtgctggaatgggaccgactggctccatgcgagcatcacgccatctacaccgacgtggatttagaaaaagtggaagaactcggctttgactttgagcctgaccagttggggaaggcggttaatgttccgcaacgcaatcagctggttgcacagacatatttcgagaccgttctcgaaaatgggtatccagtgaagactatcgcatttgcctcatcaattgctcacgcaaaggatctgacccgtgcactcatagaggaatataaccggcgaaataacctcccactggaccacccaggcgcagagaaattcattatggcggttcaccatgagacgcccaacgctctcacgatcatcgagcaattccaagagatcatggactcttcggagcggaaggccatcatagatcaggccatgaggaacccggacatgggttctcgttctattgtgctggtcggagtcggaatgctcgatacaggcatcgatgttcctgatttggaggtacttctcatggctcgacccaccatgtcgaagatactttacgcccaaatgaagggacgtggtgcgagaaaatgcagggcaactgaaaaggcttcatacaaactcatagacttcatcgatctgcacagcatgcggtatgtggtgaccaatgacacgctactccgggaacacgagaccatcttcggaatgggcgtagccgctcagggagaagagcaggtaagaaaagctgaaggactcttcgtccgccagggccatactaagacgcttgtctacatcccggctccaaattcctttttagaattggcttctcctgaattctttggggcactgcaccgccgcctggagggtcaactcaagagacgcttggccaaagagctgctcaggtttcgatttgctcacgcgttgctgatttggcggtacttacagggaagccacaccatagacggggtttttcttactgccacaggttttgacctgatgtcacttcaagagctgtacggtatgccaggaggaacgttggaagacatcgtgtcattggcaagtcgagagctcggtttgcctttgtgatgcggggggacggctgcctggttacatcagatattatttactatttcatgaaatattgcgaaacggggatgcttaaccatggccgcctcaagaatgtggctcaggatggatttgacggcttctgagaacgaatctcgtgtgaaatgaaaaggcaatggaaggggaccaattagtagagatttgggggaatggccttttccctacacaagaggtcagaccaatgaacgcacgcaaaaagccatatgaagataatgaacaggcgatggaccttctgcgttcctacgggaaggaattcctcgtctttgacccggacgaccagccaaacgtctttacagaggccgaggagagattccctccggcccgagggggcagggtgaatccgaagcagatgaagaattggcgccatcttccacgcatgctgcaatttttgcgagaacgatatggcctctttaactccggtcgtctaattacagattgccccctgttcatcatcaagcgacggaaatcagacgacgctaaggagttcagaaggagttttcaggtaacgatctctaaaggcctcgtcaggttcggatgtcgtcgggcgcacttctgcgagcgcaagggctgtcaggcccacaataaagcttttttggacatatacgacctgatctgttggcttgatggaaataaagaccttaaccacgctagaaagcttatcactgactatttcgatgtggagattggcaactttccgaaatcatccggcactccagcccagggaaaacaaactgaaggcgctgagtggttgagatatgcggttccaaagaaagatttggaaagactatttggtcttccgcactcaggccggggcgctccgcaaagatttgctgctaaggcggtcgaagtcatcacgggagcgtcagaggttccttacgatggacacaacgctgacacgggcgatacgatcctgttcagccgaagtttcccgtgggaaaccaggctcaaggaattcagtccagctgcccggctgttcatttggttgcactggaagcaggctgagacccaacggaaactcatgctgagtaatgaggaaatcggcaaagcactgggaatccctactaggaccgtaatcgagcatgcccgaaggctcttaaaggcagggtatattgaggtttctcaaggagacaactcgaagaagtcctggtcggccaaataccgctctgaggctgggcaaacttgatgtcgtggatatttccttatatcggtcggttacgcggaatctacgtaccttgaaaagggtttttctagtatccatgaaccggttttcccgaactccacctacatatattagcccccgaccagggtcgggtggacccgtccatgccggaggcgtgggcggtgcccaggttaatctttaagaagaaggattaggaattgtagagttatggagtacggccctggaatagagagtagagtaataaatcgggaagtagatctgcggctattagtcggttccctgcatgcaaagtcattcgctatcagtcctcctatcgaggttgacaactcgttcatgatgggcttggctaatgctgatttaagcgaaggtacatgtatccatcttcctgtatcggctctttcggaggtggctacgcttctgtttaccggcagaaacagagatacacatatatatgtacattcacttaaacagcttataaattggttttataaacataatatcctaattgctaatgattatttccaggatgtgtccatcgccgcgtacctgttaaagcctccagagaaagacaagggcgaggattggcaggagttccggctgagttcgatggtacgtgatcacctcggccgggagtatccttttctgccaaggcagcttgaacaagatggatatcccgatgctctctacaatcgattaatggaagacgcttgctccgtgtgggaactcgggaagatactgattcgtcagcttcagacagatcctctactctttcgcctgtactgtgatgtggaaatgcctcttattcctgtgctggctgagatggaaagagacggtattggagttgacttgcccaagatcctccaggcttggccccgagtcgaagcggcgtgcatgctcctttgcgaacagctcaccgagtcatacggacaaacgataaatccattttctgagattcaggtaagggatttcctaatacggacatgcgggataccgctcaaaaaaaccgactcggctgatgatgacctcttgaaaggtctcagcacacggcattcccttatccacaagatcctcgcttggcgcaggctgcatcgggtgatcagattcttcaagagcatcggcgataaggatcgctgctatccaacttggtggcagactcgtacttccacgggccgcatcgtctgcactgatcctgctctgcaaagtctgcctaaagcctttcggcggtacctggtgcccggcgaaggtcgaaagttcatcaaggctgattattccgcttttcagcttcgtttgctggcccacctgtctcaagataagtctctggttaagatgttccaaaccggccgcgacccgcatgaggaaaccaagatgaggctcgaaagcaaaggaatactgatcacacgggcaaaggccaaagcagtcaattttgctatctgttacggaggaaccgcctggagtattcagggcgctttgggttgcgagctttccacagcgcaccggatcgtgagagaactttcatcaatctaccccggcattggcagatatctcgacagcgttgcggaagcccttaataatgtaccggctgcccatcggcacgtgaaatctatttatgggcgaaggcgctgtttttaccacgaggggccattgactgaccgggaaaaaagacaggccaagaatgcagtggtgcagatgcttgaggccgatgtcttcaaaattacgctgttggaactttatcgtgcctttcgggtcgaggatctgtccgttaagatagtcttgcttctccatgacggaatctggtttacatgcccagcaaagcgcgtgactgtcacgcgagttgctgaagagatcaagaaaatcatggagaattctgtgaaattatcagttccactcaaagtggagttgagttgactggatgaagctgaattgaacatcttgctattctcccgggtcgtcgacgctgtcgcgtggcagaaacttattaccttcaccgggacaggcgaccggctcaaccaaccacaataatgacctatttgatatctcaaccgattccggtcgtgtcattgcctgaaatacatgcgatggttaccaaagaattggccctatggggggcgcgtagggttatggccgattgtctatgttcggcgatgcctgacagtctcaccttcatttggagtgaagtcgacacacgagctgcttgcatgaggaaccctttctctcgcttttgacatgcctcggatttgctgtattgcctgaacagacgaggacctggaggccattctcaagaagatggagggcaccgatggcagatcatttgcctcgaactcatggcttgtcgaaggtggcccgccgcactgatgtactttactgattgcagccctggttccattctctgctctgctcgcggtgaaaatggccgtctcaccaaaagtggtctaggcaatagatttgaccatgttgatatttctttcgtcagatccgctcgcgtcccccgaatacctccgttagcagccgaaataatagacgaggaataaatctttcgtcccattgccaagagcttgagatcgggccttacaccaaagttaaggggaaatccgatgaaaaacttcatcaactttatattcaagtctactattaagatcatcatagtactgatcataaccgccttacttaaatcaaacgctgatgcagcagtgtctaccggcataaactatatgtcaaccatcggggtcataatagtgatcatttgggatggggcgacctcattctcagagtgaatcttgccccattttcgccgaatgctctgacgagggcgatgactatggtgtccccgccggtcttaggctggcgcaagttttgggaatgaagctcacttggaaaaaagcaatagcaaattggatgcactgaaactcactagcgaacgagatccacgtctcttttggcaccctttatcttgttgtgaggtgaactgatcgtaaatcgcgggctccgcaatattgtctggggagtcccttgttttgataggagggagtcatgaaaaaaatgttgtctttggctgctatattgttagcggctttcgtcctttcggcgactgccggcttcggccagtctagggatgagggcatccgtctgttcaaggaggcccaggcaatacaggataaggcgcaaaaccacacagatctgcagtcagcagcccagagatacgaacaggcccttgcgatctttgagcgcttaggggatcgctatggaatcggcgtgaccgcgaacaacctgggcggactctgcacggattgcggccagtacgacaaggccgtgctatatttggagaagtctatcgctgcaaagagagacctgaaagatcgacgcggagaagcgagtaccctggcaaatttgggcaacgttttcctttccttgcagcaacatgaaaaggcgcttgtacattatgagaagtcgcttgcagtatgccgagaattcaaagatcgaaagcttgaagcgctttgcctggacaatcttggagtagtctatagacagctggggaaatttgacaaggcaatcgaatatcacaaagaggcgcttgcgataggcaaagaggttaaagattatagcagagaggccaacgcactggcaaatctgggcgacattttccatttgcgggaccaaaatgatcaggcgatcaaatactacgaaaactctctaatcatagctaaggaactcaagaaccgcaaaggcgaatcaatgtgcctgcataaccttggtttaattttcaaggaacaaggccagcgtgacaaggcgatggaatattatgaaaaatctctagctctagctaaggagctcaagaatcggaagggtgaggcaacctgcctaaacagcctaagcctaatatttagggagcgccatcagtatgacaaagcgatggaatccagcgaaaagtctttagccatagctagggacctcagagacagaaagggcgaagcattatgcctaaacaatctaggactgattttttccgatttgagcgacgatgacaaagcggcgcaatattacgaaaagtccttagcaatatccagcgacctcaaagatcgagcgctggaatccaagacattaaacaacctgggcatagtctgtgaggaacgagatcaggatgacaaggcggaagactactacaagagatctcttgacatcaagatagagctcaaagatcgcaagggtcaagggtccaacctgaacaacctgggtttaatctattacaagcggcgacagcatgacaaggcgatggaatattgcgaaaaggcccttacgatagccagggagttcaaagatccatacgttgaagcgctggtccttaataatctgggtatagtgtataacgctcgaaagcagaatgataaggccacggagtgttacgaaaagtctattgccattaagagacagctcaaggaccgacggggggaaggggattcccttacaaacctgggaaacgtctgcaaggatcgaggtcaattctacaaggcaagggaatattatgagaaatctctggctattaggacggagaccaaagatcgcaagggtgagggccgtacgctaaatagcttgggcctaatatgctggaataaagcacagtatgacaaggccatggaatactgtgagaagtctttgggcatagcccgggaactcaaagatcggaaaggggaagcgcagaccctgaataacatgggcctggtctattggaagaagcgccagtatgatcaagcgtctcaattcttcacgaactccctcgcaattgctcgggagataaaggacttgaccggagaggagaaggccgctgagaacctcgcaaaggtgcgcgaggcgaaaaaccgatattacaccattgttacaatagttgtgtgtggacttgtatcgctggttgccatcgcggttcgcaaaagacgccggaggcgggattcgtcgaattttgggcggctggacgaagtgtttaaagacgtatccggtgggcagcttacagggccagatttgataaagaaatatgaaatcaccgaggacacccttcgccggtactgcgatcatttcatgtttagcaaaaaaatcaacgaatcagattacctccgcatcgtcggtgagccgtttgtgtttcagtcggatcactgaactgatgatctgaacacagaatacgatgcgctaagtcgcgatgcaactgccatgaggaaggggatctgccgaagattcttgaaatgaatgagaaatgcggtttccgccattcgttttgtgactggacaacagtgcggttctatcattaactttgttggtgctcgagactcacttgtgctacattgcattcgttctccatgaataaatatccttgtttccacaatcttttatgggttttagaattccaacgaataaggctggcagctgcgagctgctgcaggagcgagagaacgtcatgagacacaaaccttgcggatacgcggccttcacactttgcttgggtactctattgctgaacagccaaaacagctatggccaagctgtgtctcccagcaggatttaccaatcggccaaacccgccacagtcatagtcctcagtcacgccaaatttgaattttcggttcctgacgtcagtctcgatacgaagtctttgtcacaggcagttacatctcgcctaaaagaacgacccggggaacgagatcctgaaaagctcaggatcgcccttttgtatgagctctcggccaagccagggacgtactttcaaagacagggccaactgaggaccctgcaaggaagcgaacgccgcaccagtggttcaggtttcttggcgcactctagcggctacattgtgaccaatgcgcacatagttcaagaaagcaacgagaatatcgaagcgattctggctaaacgggttttcagggacaatttggatgccgccctgaagatcatggatcgaacttttcctgagctggttaagctgagcgcaacggaacgtgaggccctgtccgcgggcttgcgaactgcatatgcccggttttgccggttacaggggcgatgttccaccaagagagaagtcaaggtagttatgtctcccgatctatccggaaagatcgaacgcatgaaactggtttcggcagaagtcgttgtagccggacggggttggccgggtaaagatgttgctatcttgaagatccccggaaacggctacccgacagttccacttggagatgaagcaagaatcaatgtaggggatcagatctttgttataggttatccgggagcagccagcagcactgctttttccgagaccagccgctcagaagccacaatgaccagcggtttaataagcgccaagaaggcagtgcgtgaaggattcaccgcgcttcagactcaggcccctatttcaggtggaaacagcggaggtcctatctttagcgggagaggcgaggttatcggaattgctacggcaaccggcctggaccgagcaactggacacagagccgaaggtattcattttatagtgcctgccactgtcatcaaggaatacttgaatcgtgccaatgtaaaatgatgtatgaagaattgttacgaggacggaatcgggtcttggactccttgtcacgtgtgcctcaatttgattcgccggaggtaaaatccggcgaatcaaattacccgagctagattagcctgcgactctttatctgcttcttctattgatcttacgcgagctgggtccagaatccgggtagaccgtgcgccagtcgcgaggatcttgaatctcaccgtaaggcattttaaccggccgcaggggaccggaacgacgctgagtattccaatacggatttcggttgtcagggacttgcggtggtgtgtcgcttatacaatacgcaaactcacaaccaagcccccctaagaacaaacctacaaacagaattacagtgcccaaaagtctcttcttcatgattttaccctcctattcactctattttcgagcattttgctcgcattcacgcttcatcttgaagcattcgcccttcatggaagtgccatacatcgccaagcaatcttcgtaaatcttgttgcagtctctaggctgaattgcatcgccagctttgtcgcactccttgagaatggccttgacgctgtcgtacccgtcaatgtttttcacaccccggaaaacagtcctgtacgtttcgtttattttcgttaagtctctgagagcagcttcgcacatctctgttgcgtgatatttcttggggttgataaagctcctcaccggagtcccctccttgcttttcagatatgatgcgagactttcctgacagtctgccatctggccaattatgttgcctagatggagttcatgagtgcttgcgatgctcgggttttccttctgctttatatacgctatcagtgcttgtttcctctcttcgcacttttttctgaatgcctgaggagaggtgttccgagccactgtagggatggaacggaacagactgtcaaggttgttccgcacggtctgcaaaacatcttctgctaccgcggggctttgataaagaaagagtattgcgcatgcgctgaggctaatggcaagagttgtcgatttgtgtgtgcccatgattctcctcggatggtggccctcggctttcggacggcggacacgagggcctcacgtcattgcatcatgattcaagacgcacccaaagcttttcccattggtcaagcgttttcacgaatctttccagctctttcggaagcgtcggcgccttcctgagttttgcccaacttctcataaacaagggccaaattttccagggcgatggccgtcagctgaggatctgccagtgtagaattctgtagtaacacgagggccaacttataccgtttctcagccgcaacataattgccctcgctgtaatcacttatgccctccgcgatcagcttggccggtgacgggtcctgagcaggcgcaggctgtggcgtggagactggctcgcgtacacgctcgattatcacgggagcgggctcaaccggttcctcgaccggcgctggttcaacttgtgcggggccgtcgccgccgatctgaatattgatggtcgggccactgctttcgcccgccggcggcgcgggcggggtgatgttttggatagtcttgttttcttgtttcacgctcgatataagatttttcttggactggtctatgattgaagtattaccggacccttgttgtgttactgtcgcggaggtattatcactggttttgcctggcttaccgggattcttgactggatcaccgggagattgaacttgactgcctggctgtttcccaccaggtccgttgagcaggcggtcgccagcggtcttgcttgtagtggtaatattgcctgggcctggaccgttcgccagcttagttgggccaggcggtgtagaaatcggaggcttgcccgtttgtattgtttgggattgatttcccggtcctatctgaatcgtttgagactggttcttggagccggcctgaactgtctgagattgattcgcggacccagtctgaacagtttgcgattgattgcctgtccttgtttgggacattgggtattggtttcccattctagcccatgctacattgcggtccccatgagcatcactagatggtttcgatgtcttgcgatcagcatgccactgatttgatcgaccttctccctggcaaccattgcagccgatgcgaccctcatgccatgtgtttgactctcgttttgctgtctgagactgattcctggtgcctagctgaccggattggggcttatttctactgtctgtttgccctgtttgagcctgatttcgactcccgttctgaaccgtctgggattggttgccgctgcccctttgcaatgtttgactctgattgttgccaccggtttgtacggtctgagcctgattacgatttccactctgtactgtctgagattgattgaccgttcccctttgaagtgtttgtgactggttgcgggtaccgatctgaatcgtttgtgactgattgctattccagcgctgcgttatttgagcttgattgcgaccacctccgataataggcttagttgtctgccccacctgaaacccattgctcatgctcgtctgaactagattggccagccttgggtgctcggttgccctattgggattactgccggcaatcggtccacttgattgcgctgcacgtgcaggagccatgttagcgtgcctctgtagaatcatggagtgtccactcgaaaatcccgggggcagcggcctggaggcaccctgagtcacgggagaaggctttaagccatggatctgagccggagatggggtcccggggcgctgatgcgccagacctggctgcacaggctgccgaggcattgaaaccaacggcctgcttgtagtggagggtgatgtgacgacaggacccctaacaagaggtcgtgggatgggacgtggcggttgcacaggggtttgagaaatactaggccatctgtgcactgcgggtctggccaccgaagggggtcttcgtacaggattacgagaaatgcttggcggccgatatgttggagggcgagagatccttgaaggtgaatgtcgctggatcggcatagatattcgtggtgcggtcctaaccactggcctggagatgctcggagcagagcgcatgggcacccggaatcctcctccacccctgcgtgccttcggtattagaagctgctcgctatctgcatcagtagtggacaacgctcctggcatcagcttggtttcttgatctgtgacccactcggcccaagctgttgcagagcagatcattagggcaccaatcagtgcgctgagcatcgtcaacgccgttgagttcctcccattattaatcatggctgaccacctctttgatgaatcattcatgggttgtatctttttccgttttcagcgatatcctcaagagcgaccggcgaccagaagttgtcataccgaagattttgatcttcatggttcctacttctacttccccgatctggttatttatctcgtactcaccttttcatttctaaagcattggtacttaaggtttagagaatccattggggaaaggattgtggctcaccgacaaaaccgtgtttccgtccggacgacgttccatggtagtgccatcggagaacactctcttgttcggctggccttctggcgaacgagcacccggcgaattccacatcatttcctcgagtgcacttttagtaggtagtagccccgggatattccaggagccgggagacgaagcggaggcggggccaggacttgtcgtggatccagaattgggactcgacgtagagccgggagacgaacttgacatggtatcacgatacttatcagaccaaaaggtgtcatctttgggcgcactgatgggcggcgtgttgggagcagaggagccgacagacggtcccacccttgaaccgtctggcattacggtcggtatgggttcaagagtcggtgcggacgtgtagccaggcaatgagaccgatgtggtgctactggagaaagcacggtacgggatagacaaaacggtgttttcatctgaaagccgttccatcgtcgtgccatcagaaagtattctcttgttgggctggccctctggcgaacgagcgccaggagaattccacttcatatcttccggtgtgcttctagtgggcagcaacccactcaggaacgaattatcctgtacctgcggacgagttctgggatcatcgacttggtttctcacgttggtatttgttagagaagatggctcgggcagttttggagcggggatgggctttacaatgctggatgtttccgtggggacattaatgtttgatgcccctgagcccgtcgctcccgttcccggagatgtaacagacggggcttgaccattcccaggctgactttgattcgtggaactggagaattggctgttgcttgagaccttcccggtaggtacagtcgattgcagagcacggggaccgggttgagcacctgaggaatcattcagccacctgtagacttgagtacctctggttccatcgcgtgtttcaactggcactgccgcatattgataaccctggtccgaccacatcggtttcttgatagaccctgccggcgcgacgcctaggttttccgcatttagaggcatgggtacggctggatgattgggtgaaacgtaccaatcgccagtcttcgtcaaggacgtcgtctggaaatctggttttgctgccagtgtgctttgaacggaagacccacgtttcactatgctttcgcttgaacctgcttgcgtgttaggtgaagtcggccatttgacgaaacctccatcaagctgttcattccatccgtcacgaatcagtgctcttctatctgctgtgcttagatttttcgtcatcgagctagttaggacggccggagacgagctagtattagggcccgtctgcaaaactgttggtccgctagctggtttcgaattgccgggattcgatctcgtgcctgaaggcattacacttggcgcaaacattgcgctagacggagcggttagactatccggtttcggtgctcgcatgccttgaaccgaaggttcggtcgtttccactttattgccagcgaagttctgactggcttgggcctgattgatgtttcctgtttgcgatgtttgagattgggtagtcgtcgtagtctgggctctgttctgcccaccctgcgccgatgtgtcgttggtagaaccggatatttttgttgttgcgaccttattccctacggactggctcgtttgggcctgagtcgtactggctatttgagaagtctgagggtgattgccaccaccgttctgcactgtctgagccagattgcgatttccgttctgaactttctgggattgattcgcggctctactctgactctgaacagtctgcgattgatttgctgatgcggcccggatcgtttggaccttattgccagggagattctgaatggtttgagcctgattgacttttcctgtttgcgatgttgaggattgactgttcgctccggtttggattttgttcagagcagcctgcggagaaccggatatttttgatgcttgaaccttgttcccgacaggttggccggtttgggtcttgttcacattggttatctgagaaatctgtgattgattactaccttgagcaatccgcgattgattgttggatgcggtccggaccgtttgaaacttatttccggcgaaattctgagtggtttgggccgtctgattgactgctcctgtttggggttttggctgggcacttgtggcagtctggactctattttgtcctccgtgccacaaattcgataggccaccatttgttggtgttgtttcgattttgttccccaaaggctgtccattttgaactttgttccaaactcccgtttgagaagcctgagaccgactgctgctatcattccgagtagtccgcggttgattagcgtatccggtttggattttctgaaactgatttcctatgccattttgaatttgttgagcttgaatgcctgccccatggtgacgccccagaaattgattgcccatccggttctgcaatttattatgcccaccatgccacaaattcgacctggaataagtgtcatgaaatggttttgatagtttccgatcggcatgccacaaatttggatttggccacgaatgagcgccatagaatggcttggacattttccggtcagagtgccaggcgttcgctctatgtctctggccaaaaaaatcttgcgagatccttcgctgaccaggattgaatgagccaaagtggcgtctttgactctgtgagaagatttgtggattaaccctttgaaccggcatagccatacgctggttaacgcgcatgggcatgttgaatccccttccgaatctgcgtgctttgggcaccaggagtgaatcgtcatgctcaccacttgttaacggtgcggccagtatttcatcgatgccatagtgcgtctcccactgtgcacaaacaggcgcggaacagatcatcagaaaacccgccaggacggcgaaggtcatcaa

SEQ ID NO: 521 - DNA, 88510 bp, Artificial Sequence
  Synthetic Oligonucleotide
gctaccagacagccacaggcagccagtgaaagtattgccgcatgggtgatggttatgcccggtcccagcatcagcatagccaagccggcacaaggaaccggggtttctcccagggcatcgtgaatggcgatggcttgcccgttctgatcaattttggcatgctccacatagagatagctaagccgatctctgatccgggggatagagtgcaggtctttattcatcattcctgattggcagaacggacagcaggccaaagccgaagcttttcgcttttccaatgccgcttctaagcgtttccaggaacagtttcgggtcatccactttgagaattccctccagtagagccgaacggaagcgcagaggattgtatgtgtgttcacgccagtagccctgtccctgttcctttgctttgacatttttaggttcaggcttggagccataaacccaacccagttgaagaagctcacagcgctgaagggtgaagcccagctttgggcttttggcagccagccagtcggcaagggcctgatccggggtggaagagggatcccaggtgagagaaacccttttgtgcaggatgttgccagtttctatggtttgaccgtcctgttgcaccttctcaggaatatgacggcgtacgctggcgtttacccgcagcctgaaccggagcagttgtcccgcttgaaactctggattatactcctttgtttccggtggcgctgccaggaaatcaagcgcgttttggaagcaataatcccaatccggctcaagaacggactggacgataataatcgcccttttatcgtttccgtcgatgttgttatcgacccggaaaaggaagggagttttttggaagtcgtttggcgaaaagggcttcaggaaatgcggatcctgctcccggcgcaaacctgaagggaacgccatggaaaggcggcggtggacgttatagatattgtccagccactttctgccggggcggggacggtctggattgcctccagtatcgatcaatagcttggacaagtagatcatccgttttcctcctctggcttcattttgcggaaacgctgcccgcgcgaacggaactcgactatatctttgcgctttgccagtattcgctcccgccagatggggtcgcaggggtcgatgcggtcggtggtcatgccggaaccgtattccagcatggtgcaggcgtcgtggcagaggcggcacagcgcccgcaggtcttccggtatttccttgcctcccgccctgcggtaattcacgtgttgaacagtcgtggcgggagctttgcataccatgcacgcggcatggtccatcacaagccgctccgccctgaccttcttatactcggaattgttataatccgcccgggttcctttgggcctccaaacgctggttccggtttccctgctcacttgcacatcctctcccacaaccagctcacgcctgatcacgaagcgcggcaaatggcggggcggctgaaaagaaaccggcagatcgtaatgaatctccgcgtcatcaggcgcatgttctccgtcctggctggggatccagtccatgacgcaaggcagtatttgcggcaggggttcattgtgccagcgcttttgcaggggaaccgcggacagcgcctcctccaaagtgttataaaagcccggagcatgctcgcccacgggacgtgaagggggacaggatttgcgccccagataaattgcccagaccggcttggccagagcggcggagagcttttccacaagttccggctcaccctgcaaggcgaccagaaaactggcgtcggcaagatattcgcggcgtgagagcaaggtctctgccctggtttttactttgcttggtgtcagggtatcagccagggcagctccaaccatggaaggttttttgggtgccttcagctctgccatgcgcattctttgtcccgctccaacagtatggaagtcccaccagcgtatgccggggcggtctatccgcacgcccatgcgcaggttggcgagttttgggagccatgaatcagcagcctccgcgcgcccaattcccatggccgcgcaaagcagccccaggacacctgattttgtgggagcgtcggtagtcctgcgcaaagcaaacttagcctcgttgctgccccaagactgcaaagccccctccaagcgcaagaataaggtgttgggtggcgcactcatgtcagccgccaacataagccttgcttttctgaacttcttcccacttgaagccgccaatataatccaacacagcgcctacaagctcattgaggttgccaatgtttctggaagccagtttggaatgctcattgccaagggaatagcgattgtttggagaaaaccagaagctgataactggggattgctcatcataatagccaagcctgatgtcgttcacgtagttggaaagctggccgatgctttgttccaccaggtccgattccttgaccacggaaactggcctgacgaatgcgttggcgtagctaataggggaattcttgaactcaacaaggatgccatcgggatagttatgagcggcgaagctgttctgtttgccactggggttggttttggcagcggcgaggagaaaggcacccacggtgtgggctgccagattcgtgtcccctttcaggttcttgaccaactgttcccaatcaatggagaagtatttgtagaaacaggctgaggcaaacatggattcgccaatatgacccgctccggcgtcttcaccgggaacatcatcggccgccacaaaatagtctatctcaggtctggcaatgtgggtggagatcgcatgtgcaacctgtagggcgccttcaacgccagtgtttttaagctctttggtctccaacatcctgccgcaaagtgctatatccggagaatggacgcagtttgtgagcaaatctttgaactgcagcagtttttcgctttcacttagtttggagtcggaaagcagctctgccatttggcgcagggcatcataagtggtaaaaaccagcatgtcagatgtatcagccgcctgctgctcatcctgatcttcatcggcttccgcgggtatcttttcggacttttttgcagctttcttggaagatttggttttgattccgcaggcttcaagaaacttggcaaccagcttcttatctttgttttccagcatttcttcaagtttctctgccagacgccttgttcggatacctcctctaaggtccgcgaattccggggcaaaacggatgctgcgcttgatgcattggctggagatgcgagaacgtaatactccaccgaaataacaggtcttgggggcgcccaagtcgtcccggttaagatttgccgggctgtgattctgaatcatatgaatttcaatcaacatctgaatcctccttgttgatcttgtatgctttaataaatgaatccgaccattctcttttgacaggttcctgctcccaaaatgacagaacatcagtaagccctacccagtccaggcagacctgctggtgcttgcgcaagatacccataatgaccgacagcggctcttccatctgcataatgtcaagcgatgcgagttgatcaaagcgtgccaatacacggggtaattcctttttgggttccaacttccggcagatgcctcccataagaatgggcaatgtggctccctcgcgctgttcaaagcggaattcagcaaaaagtttggcgatcaaccaagccacttcacgcttgggagcgcgttgattcttttgccgcaaaggccaccatagggcggaaaacaggtcaaatccgggaagcttttcatcaagccgggctcccctgagttttctaagaatgcccaaatcgccttctttgaggttctccaggcttgcaatgaagtcaacggttcctctattcattctggtcctcctctgcgggttttgttttggattctggtataactggccagggcttgcgggaaatgaatttacctctcttgagcctggcgtccactgtttgagccggctccaaagagcatgcaaccttggtgagcagttctccgtattcagtatcggcatcctgccaggaatagcccctgttctcagtcattttacccgcattgagggcaattctgctttcggcatgggggataatgtcagcaatctggggagtgcccactgactttttgaaatcacctctgagaggcttcttgcgcatggcattaagggcagtagccctgtttgccaattgagccagtagctcatcatttgtatcagttccctcaagctcgatgatcttgtcccagatgtctatgctttttgctttatcgctggcaaatccaaccaaccatagttttccttgtctggagtttccttccgcgtgcaaatagctgaacaacgggctataccaatcccggtccgcgaaagtgtatctatcattggacatcagtttgattttggactggagactttttccctgatcggtgtaaacaccatgagggtctttccatttaaggccttccggcactggttcaggttttatgctgcaggaatagacgagagctttggagggtaagccgcaggaacaacatgctgcctgacctgagacaggatcatgcagatgcaccttgcgcggcagccaggtcattccggcaagtaagcccactttcctgctttctttttgaaaagaacccaaccatgccggaatccccatattatcccagggttgccaattttgaaccagcatgccagcgaggtcatttgcatgccagagcaggtaaaatggaggagtgttgttgattcccgcgcctatccctctgccaccgacagtggtaaagacaggtaatctcagcagtcccttgatgcagcaagcttcgcagagcccatcgatatagtcggtgacatgattgaaatggcataggttgtgagctgttggtatctcatgaataaggtcggtaatggctctgatcctggaactgggatcggcttggaaaaatctctgtccatccccaaaaagctcgaaataccccttgttttcttccagccaggatatccaggaggtcggaagcggcttatcaggttcaggctccccgttggtgttggcgaaacaccagtagccaagagcaagcaggaatctgaaaacagcgaaccggtccataggattgctgtatgccagttgcagacagtgtgcgtcttcaagagtttgaactaaagatattctatctggtttgcccgaaagatagaccacgtttacccaattatcacaaagaagattgtacataacatgctccttttgttcgataggaaccttatatttaagccaaagatcattgtcaagaaatttgctttgcggattttgggttaggaaagatcaatttggggcggtatcttgttactttcaaggtgttccatgcggcggcttccactcccattttacggagccccaccagcggctttttcagcgcagttttcccgctgctgatacttggcttgttggaaagaaccgccgtgtgtaatgcgcggcggttcaagttaattatcggacttggaagggcggctgtccgtcacttcagcaatatcattttgcggctggcgctcgtctttccggtgctgaggcggtagatatagactccgcttgccagttgggcgccgttggagtcggtgccgtcccagttcaggctgtgttttccggctcccatctctttgtccagtagggtgctttacatgaaaactcccgggaaaaaagcgtaaaaaaacccctactggtgaaatgatgaccactagtgtaatatggaaagagcagagaacaacctgtgctgtctacaatgcgttatataagaatatagctttacattcgggcatatgcctaatggcaagtcccagctggtagtccatatacggactgtttaccaagttcaaaacgtccatatttcagaacagaagtccgtcggtaatatgttttgtatgcacagcacgctatgttcttattgatcgtgtgaattacactcttagtgtcagatatcccaagctgcgtttgttgtccagttttcattcctggtagcgaaaaatgttttcagcgaagttcaaacattccaaaagactggatcccgggttccacggttcacgcagataaacgcggataaagggcgcagattgacacggattggtgtaatataagggttgccgaagtccgttcggcagaggcaacggagttgcctgtttggaagagacctccggtctctgtggcaaacggactttgccacacctgggcactggatcacggctcgcaggctgtgatgacacggtttttagtctggagggttttgttccggagtcgggtgtgttgactctttaatgttcttttaattcgtgttaatttgtgtaatttgtggatgtttcttttaaaaagactggatcacgggtaagccaccccagagggggccccgacttcccgtgatgacacaaaatataacttggtggacttgtttcgggggcacctttccacctttccacaaaaataccacaaccttccgcataatccttcataccgccctcctttgctgctactggatttgatgccatcatccttaggtcaaccttataaattataaggatgacctaaggaagactcacgccaaaacgctggatgcaaatgagagccacccgcgcgcgaggggaaagggagggcagccagcccatggccgcgcaattacgggcaagtatatatatacttgccctgggatccgcttcccgcctggcatgaaggggtcgtagcacctatatatatggggggagaatttgtggaaaggtgttttgaggtggaaaggtgcctgcttttttaaaaccttacgcgtttgtttctaaaagactggatcccgggtcaagccaccccaccaaaccgcttcgcgctttggcggggaccccgacagcccgggatgacacggtttttagtctgttgtgctttgtttcggggcttgctggttgtttttaaaagactggatcccgggtcaagccaccccaccaaaccgcttcgcgctttggcggtgaccccgacagcccgggatgacacggctttagggcttggtggcggtttgtttcagggtctggttgttgtttttaggctggacacttgtccttattctgttcttttaatccgtgttaatttgtgtaatttgtggatatatcaaaaacacaggcccctgtctgccagaattctctttgcttgacagattcgcgcttttcacatatattatttttacatgggctggtatccagtccgacaaggaaagaaacatgaaagaactgataataaaagctattagcggccgcaagccgcaagactttttgggagaagatagatgagcacaccccgcggagaacgcgtaaacatcaccctgctgggtaaccgcaacgctggaaaatcgtccttgatcaacgccctggcaggacaggagatagccatcgtttccagcaccccgggcaccaccacagacccggtggacaaacgctatgaacttctgcccctgggcccggtgaccttctttgacaccgctggactggacgacagcggcgaactgggcgaaaaacgggtactcgccacctataagatactttaccgcacggacatagccgtgtttgtgaacgatggccgccccttcgcggagagcgagctgtcctccctgaaacgcatccgcgagatgaagataccgctgttaatggtctttaaccacagggatttgcgcgagcctgcccccgccaatatcgcctggtgcgaggaacggggactgccctgggtctccgtctccgccctcaagggggaaaacatcgatgccgccaaggaactgctgatcaagctggcgcccgcccatctgctggaggagcgccccctggcgggtgacttggtgaaggccggggacagggtgctgctggtgactcccatcgacctcgccgcgcccaagggacgcctgatcctgccgcaggtgcaggtgattcgcgaactgctggatcacgacgcggtggtgacggtggtgaaagagcgggaactggcctatgccttgcaaaccctgaaggagccgcctgatctggtgatcacggattcgcaggtggtgctgaaggtggtgaatgacctgccccccgaggtgaagatgaccaccttttccatcctctttgcccgctacaaaggcgatctggacgtcctggcggaaggggtgaggcagatcgacaagctgcgcgacggcgacaagatcctgatcgccgaagcctgttcccaccacgtgcaggcggatgacatcgggcgggtgaagattccgcgctggctgagccagttcacgggcaaggaactggagtatgaagtttacgcgggacacgactttccgcccaatctggaggaattcgcgctggtgatccactgcggagcctgcatgctcaaccagatggagatgagccgccgcatcgtggaagcccagcggcgcggagtgccgatcaccaattacgggctggccatttccaaggttcagggagtgtttgagcgggcggtcgcgcctctgtatccgcaaggataggagcggtcttcgagccgagtccacttttttccattctgtattggaggcgggcagcgattccggcttgacaaatccgccgccatctggtagagtataaaaacaaagcttagttcagggaggttaccatgtttcaacaacaaacgcccaaacctgtcgtgatcaagtttcccaagttcaggatcaaagccctgcctgccatagtgctgtccgtcctgctgctgggttttatgctttactttgtgcttccggtgctgcatatccgctttttggactggatcgtccccctgatgatctgcctggctccgctgctggcaatccggcgcctgcgcaagatcctctatgtggtctatccccttctggcgctgtggctgatcttggcgcccttcttctcttccggcatcttcaattccggcagctaccgccgcatgatcggcgaggtggaaaagaccgagttttccgacctggtggcgccggtcaatctggatcaggtgccgatcctggattccgctttcgccaaggatttggcagccaagaaactgggcgaggacttcgccctcggcagccgggtggtgctcggcaacccgaccatccagatggtggatggcaagcttttctgggtctgtcccctgctgcacagcggcttctggaagtggatcaccaacacaagcaaaggcaccccgggctacatcaaggtctcggccaccaatccgcaggatatcacctttgtgcgcgagctgaaaggcaaacccatccaaatccgctatcagcgcaacgcctactttggacaagacctctaccgccatctctggtggaacggcttcgcgggcatcggcctggcaggcgatacctttgaactggacgacaatggcgaaccctactggaccatcaccacctacacccacaagatcggagtgagtgccccggaagccaccggactcgccatcgtgcatgccggcacgggtgagatcaaatactttcccctcaaaaaaagcggcggcatctatgacgacagcaagattcccgcctgggttgaccgcatccagccctcctactttgtgcttccccagctttcctggtggggcaaatatgtgcacggcttttggaacagcgtgttcggcaaacgcgacctgctgcgggtgacgcccggttacaacgtgatctatggccgcgatcagcgcagctatttctactccggcctcaccagcgtgggttcggacgagggaacggtgggctttgcgctcacggacacccgcaccaaaagcagccacctctacctggtctccggtgccaccgagactgccgccatgcgctccgccgaaggcaaggtgcaaaacttcaaatactatgccaccttccccatcctggtgaacatgaacggcaagccgacctattttatgaccctcaaggacagcgccgggctaatcaagatgttcagcttcgtttcagtgcgcgacttttccctggtgggagtgggtgaaagcgtgcgcagcgcgcgcgacaactatcagatggccctggccggaagccggatggggatatccccggaggcagcggacaagcaggccaccctcacaggctccatcgcccgctttggctcggacaccacggatggacgcacctactactaccttaccctgaccgaagcgccggatataatctttatcgcctccagcaacctgagcagccgtctgcccatcacccgcgcgggcgaccgggcacgcgtcagctatctggaaagcgcggacgcggagatcaccctcaccgccttcgccaatctgagcctgggggataagtaggcagaaaggagattatagttaagccaggcaaggcaggtagccagatatgaaccgcgtggtgcccagctacatcctgcagcagtatgagcaaaacatcctgcaggggcagatcaccggctatatcctgcgcttttgcaccgttgccacttacaatatcaaaggagtaaggctcaagcagcggcagcaggtgattgacaggatggaagcaactttcaccgaagcctatgaaaggatgctgagcctgatcaggaacgcaggcggactgctcttccagtatgagggaaactgcatccacgccctgttgccggaaagcactccggtgctgatcgcggcgctgctggcacgcatcaatcacactatcggtgcgatcaacagctacgccagcccccatcatggaatgccgaatgtaatccgcctggccgtgggttttggcaccctgtcctggcgcatctttgagaaccccctccagtttgaatatgtgttctggtctccccaactggatgtcctgcgtgaaaaccccggccagcccaaccaaccttattactctccccaggcattgaacagactgggctgggagttggatgccaggcctggcaaacttgccgagcatccgccctttccccagttgcctgatattccggaaaggaagcgcttgggcaagcaacacggccaccacttcattcattcccgctttcacagactcaatcccgcggctgacgtccggcacagcgtttgctgctgcctcagcctggacgagcctccggacggccccctggagccaaccatccaggcgctggaactgctggcggtgatctacgacgcctttttggcagccatctatgtgcggcacaagcggctgcatgccatcctgctcttcgatttcccccacaacaaggtcaacaaaatgcagcgcgcctgccgcctggctttggaagctgccacgcgccacaaagcccgcgccgcctgctgcaccggctacatcttttccatggctgccggcaaagacctgtggaaggcaaccttcttcccgggcgaagccatcacccgcgcccagaagctcctggagcttgcccgccccggcgaagccctcgccgaccacaagctgcgcaaccagcagcacaactccttcatcttcacccccctcaaaagggaaaaagccgcctcaaaagccgcgccccgcgcctaccgtctgggcatgctgccggggcaactgatcaccggacaaccgctttgcatgattggcagggagaaggagaccgctctgctgcatagcaggatacgcgatggtttggcggcctcctcgccccaggcgatggtggtgcatggaacggcgggagtgggcaaaagcaggttggcacgcgaagctttgcgcgccttcgagactccccggcggcaggtgtatctgctggcttgcaggcaggattcccccctccctctggatatcgtatcccagttgctgcgtgccagtttggggcttttggaggatgaggctcccgcgcaggcggtgcagcatttccgcgaagcgtggcaaaagcgcacccgcggttcctcgctgggacaggattgcgaagccgccctcgcctcgctgctgaatctctcctgggatggctcgccctggcgcgggatcgcccccgaagccaggctgccccgtcagcagcaggcctggctggattacctgcgctggctgtgcgccaaatcccctgtgcttatctttattgacgatgtccaatggctcgatcccctgagccgtcaattcctggaactgctgtggcaacacggcgtgcgcccgctctttctgctggctaccgcccggacggaaaagggcaggctgcccgcggagcttgccgtcaaaaaagatggcttggagagcctcgccctgggctccctcaactccagcgccagccgcaagctctacctcaatctgctgggccttccccgcctgccccgcgaggccttttccgctttccacgcctgcgcgggcggcaatcctttcaatgccgaacagcttgccgcttatctgctggaaaacaagctgctcagtccccacggcgaaatagcgcaagagggcttggaagcggcggcgggaggcatcgacgaggtgatttcccggcgcattgcccggctctccaaaaaggttcaggaaagcgtccgcggcgccagtgtgctgggcttccgcttcaatgttgtcctcctctcccacatgctcgaaggcaaccccatccagcaactgggcaaagcggggggacggaaaatctggcaggatgccgatgaactcttttacatcttttcccacagcctgttacagaaggcggtctatgccagcatccgcgaaaaggagcttaaaaaactgcacctggcggccgccgaagccatggaaaccgtctttgaacaggcactcaaggagcattccgcggagatcgcccgccacttcaaagccgccggggaactcaaaaaagccgcccattactatgagatggcggccgattacttctgggaccgcatgctgctggccaagattgaggaatgtatgctgctggcagccgagttgtcctgccaggcctggggcggggacagcccggaacacatcgaacggctcttccatctggccctgctctatcactatatgcaccgcatggacgatgccgagccgctctatctgaaggtggtggaggccagaacccgccagctcgggccacgcagcccccgcctctccccctatctgaacaacctgggacgcttttacaaagataccagccgctacgagcaggctgaaaaactgctgcgccgctcgctgaatatcgaaaaacgccccgggcccagttccaacgtggcagaccgcatgaacaacctcgcctcgctctacagtctgatggacaggccggacaaagcggaggagatgctccgcgccgcgctggaaatgatggaaagccttttcccacaggggcactggtttacggcggtctgcgccggaaatctgggcagtgtgctgctgcgccagggacgcctggaagaagcggaaccactgctcaagcaggcgatagacggccataccctccactatggcgaaaaccattcccagacagcccattacctcttctctctgggcaggctgcgcgccagacaaggcgacacaaacaccgcccgggaactactgaccagggtgctgagcatctgggaaaacacctttggcaaagactatccccgctgcaaaaacgtccgcgaagaactggacaagctttcctgacacgactgctgtctgcacgctgaacaggcgggaaacgggggtggctcctctggggtgactggatcccgggtcaagcggttcacgcagatatacgcggataaaggcgcagatgagcgcggattagtattatggggggaggtttcggaccagggctgccgaagtctgttcggcagaggcaacggagttgcctttttgggagagacctccggtctctgtggcaaacggactttgccaccccactcatgatgacacagtatatagcatggtggacttgtttcgggggaaactttcctccattccaccttttcacctttccactctcaaagatccagtcgatcctgtcatccgcgttctatctcttttccgacagcaccacgttaccacgacaccacgtcaccacgaagtcctcctttccacctatcgtagcacctatatattatagagggatgggcctcatttgcattcccctctccggcgtgggtcatccggcagtcatccttaacccggtgagggatgacctaaggatgatgactccaaagccagtagcagcaagggacggcgctatgaagcatattgcggaatgtgttggatatttaatgcgattgtcaaataattgatgccggttgtttttggtctgggtgcttgtttgggacttgaaaagacagaatcaaggttcaagtggttcacgcggttcacgcagatatacgcagataacttaagggctgccgaagtctgttcggcagaggcaacggagttgcctttttgggagagacctccggtctctgtggcaaacggactttgccaccccactcgtgatgacacagtatatagcctggtggacttgtttcgggggaacctttccaccattccaccttttcacctttccaccttcaaagatccagtcgatcctgtcatccacgttcttttcaggagagtagaaaaagccccggaacctttcggtcccggggcttggttataggttatatcccgatgaattacttcatcatgatcatctttttggtgctgctgtatttgccagcgctcatcttgtagaagtagacgccactggagacagctttaccagcattgtcacggccgttccacacaatggtgtgcttgccggcgttcatgttgtcgttcacgagggtcttcaccagttggcctttcacgttgtagatattgacctttacgtggcctttatccttaacgctgaagctgatggtggtttccgggttgaaggggttcgggtagtttccgtgcaactcggtggcgaccacagggacgataggatcgtcgctgtcagttctgccggtgatatggaagtcatccagcatgaagatccagtggtcatgggacacgcactggatgcccacgtaggtgtcaccatcgtagttgctgagattatacacatactctgtccaatcaaggggagcttcgaggggagtgctgccgctgatgatggtgaagtcggaggggttggttccagtggtggagacaccgatcttgaacttttccagtcctccgtactgcgccgtcagggagcgtgcccagaagcgaagttccagcggattgtggagtacgggagtaatcaaccagtcgttgttgggaggggtagttgcggcgatacaggctgccattttatctcctccgtgaggtacgatggtagtggcgggaggagtggtggcactgggattgaagatgatgtaggcctgtggtgtttgggtgttaggccaggtggtattggtcatgccataggtcgcgctgccgtcaacgtcaaccgtggtccagggcgcgaattcgataacgaagttttcgtaggactcaaatccgtccgagagcagcacattgctgatcggcagctggaagttcaccgtggtggtctggttggtaacgacaatcactccgtcctgggtgacaggtgtgtagttcgggtggctggcggttacgctccaggtgcccgcgggaacctgcatgctgtaggctccgctggcgttggtggtggcagtcacgtcgccgcaagatacggttgctcccatgatgggggcgttggccatatcgcggacgataccggcaatggttccgatctgggtaagtttctgcacagcattggagaaggctggcagggattgcgcttcgccggtgtagatggctttcacagcccatttgtaccagccgtcaggcacgccgccccatccgttgtccggccaggcagtcgcggtgatgggtccggtggtgagctgagtccaggctgaatcgttgttttcctggccttgcagcaagcgccagactctgtagccgacgaggacacggtcgttgtctttgcaggcactgatgtctttgctggctttgatgttgtcggacgggatgtgtttgaggatgctgggatcgatcgcgcacacatcgttgggagctgaatatcccacgtagccgcggatgttccagttgtagttgaggctcggagccaggtcggtcagagttgcccattcaccggagttgtagatcatgttgccgaagccgttggtggcggggccgccgtcacagcctgcgggataggcgcccgcagcatggctgacgttgtagccaaaccagagttcctcgttgcctgaaataagcacggggttatccaaaaccacggtttggaacgtgtctacggcttgcacggtgaagggttggtcaacaacctgggtttcgggagcgctggcggtgccaccggtccagacacgcagggagtaggtgcccacatcgcctgggaagagggatatggcgtggaggctcatgccggcatagtcggtaagagcggagggcgggaaacgaatggcgacactgaattcaccaccggagacgaggccgatgctgtcatcgttttcgccggtgtcgtagtagatccattcgccgccgccagtgccaggctccatccaggtcaagttgaccaagctgttgctcactgccacggcttccaccgcgcaaggaggcagggtgatctctgtgagtacgaagtcctgggtggtggtttgcagtccggtaacgctcacaccggtctgggaagcggcctgatagccgactttcgagcaggtgacggtgtaaactccctgatagacgctgaaggaataatgtccgttgttgtcggaggtgccgctgtaatcgccggcggtgatggtagctccttcgatcgggacgttggtgccgaattcggtcacggtaccggtcagggtgcccatcatgcctttgtgtatctcaccggagaagacggcgggggacaggacgttgttggtgtaaacagctttgactgcatatttgtaaacgccggaaggcagcggggcccaggcgttgtcggtataggtggtggtagtgctgggaatgacagatggggtcagggtcgtccagagtgactcgttgtcctggttgtcagcaagcaggcgatagaccttgtatccaccaagtacgcggtccgaattggaaggagtgaacatctggaagtctggtacctgaatacgggggttattggcatggctggttcccacgttgcgggatgccgaagccgcgtttccaatgcttctggtaacaattgaactggtggagaagctctgggtgttggtattacgggagctgaaggaggaagcggaggcaaagtgttccttggctgtaggaacggggcccacgctcacatcgtccaccacgaagtagaaggcgtcgtcggaaacgcactggatggcgaagcggatgttctggccagcgtaagcgctgaggtcatagctgtacagtgtccattcaatgggcgcctggatgtagctggggccgctgatgatggtgaagtccgcgggggcagtgccgccggtggaaatacccactttgaagcgttccaggccgtaagcatcgctgtaggacctcgcgtagaagttcaggaactgacttgcggtcgcgatcatcggcggagagatcagccaatcgtcgttgacagcatcagtgctggcgaagcaggcagccattttgtttccgctgtgggcggtaatagtggtaaccggcggagtggcagcgctggggttgaagatcatgtaagccatgggggaatagacgttcggccaagtgtagccggtcataccataagtgccgctttgatcaacgtccaccagaacccagggatcgaaggtgagggagaagtcttcgtattcctcaaagtcttcggagataccctgagcattgggatccggagccatccaggtgacggttacgtgcgaatagtccgctgcttctgtggcaaccacttggcagggagggaaggccagttcgttcacggtgatgtcgcccatgttcaggtcggtggtgccaaccacggcttggccgatggcagcttggtaaccgatggcttgagcggtgtattcgtaagtctggctggcatagacgccagtgatggtgaattggccgctggcgttggttgtagcctggtaaggctcgtaacctgtgaggctgatggtggcgtcagccaggccaactgtgggttggtcgctgcccacgatgcggccggtcacggtgacctgaggcagttgggtgagcacgaagtcctgggtgacagtttcatcttcgatgatggttacgttgtgggtaacgacgttgtagccgtgtttggtggccacgacgctctggggtcccatcgccacgtaggggaagttgtaaacgccgttggcgtcggtgagggtggtgaggggggttccagtgatggaaaccgtagcgccgggcatggcaacgttgttcgcgtcacgcacggtaccggtaagcgcgcccatgtcgtccacgaccaggaagaaagtggtcttggggaacatagcggagggacttgtaccggtaggaggagcggcaggatcgtagtcctgggagtccgactggaccttcagagaacgggccgcaaggtccccagtctgggtgaggaagttatcgttgtaattgtgccattcggtatccatcgggcgttccaccagcaataccaggttaccgcccgcgtaggtgtaaggggtggtgaaggcaatgttgatgttgttcggaccgctgggataatcgacgttaccggcgaacaccgcggtgagctgggttgaagggatccagccagccgacagatcggtctgggtggtctcgcctaaccaaatattagtgggcatgttgggcaggttgctgacgaagtcgttgtagaactggatgccggttatcaggccaccaatgttgagctcggagcccaggtaaatggcctcgaacagggagttcttccagtacatgtccatgggcatgcggccgacagcgctgccgtcaccgagggtaatggccacgattcccgctgcctgcacggccacgtttagaggcaaggtttgattgttggcagcgatgccgtcattggcaagcaccacttcaccccaaatctgtatcgggccggtttcggtgggagtccaggtgaggccgaattcgatggtctgctgaggagcgatggtggtgccgggaatggaggcgagctccacgtttccggtgcccatcagcttcacggtgtaggtgttttcggtgttgtttccgttattcttgactgccaccgtgtaggtagtgggatcgcccacggagggagtgctgttaccggaaatgctcttcgcgccaaggtcgtggtcgagatttccagcagtcactaaggccgaccagccggggcgctggacagaggtgtcggaagtgaagacgaaggtcacagcgttggagccaaagatctcttcaggcagagtggtaccggtgtagccgtcagcaggtccgatctgcggggcggaggtatccggtccgttgtagatcttcaggtaatcccagctgttttccgtattgaattctgtgaacaacacgtaaatgatcgagttggggttggcggctgagaaggtgaaggtgtagttctctgagttttgataattgccgtcggggccgcctgaatcgtagaaggaatagaccattccatccggcaccgactgtgtgccgttggtcatgatgaccaccgggccacccgtggtaaagctccaaacagggcagtttgccgcgtcaccaatggcgttgaagggaattatctgccagtagtaggtggtgtggaggtccagggtgggggcgtagctgttttcaatggtgttttcgatgaaggggggtgggttggttgtgccaaaatgcaccttgtaaccagtgggtgctccgccgccggaagcccagttgagggtagcagagctcatcacgtccacagcgccgtccgcgggtgaaatgagcagcgccgggttgggcggatcggtaaccaccagggcttccatgttgaatctgatgttggagcggttggtgcttgtggttccgctggtggcggtgctggcatcagcgctgtcgctttggaagcgcagggaactattgaaagctgtggtggagtaataaacagaggcattctgggtccaggatcccggaatgatggaggtgtagatatcgacaagtatgttcgaagtgccgtcccagacgaagggggtcgtgaaggtgtgggtgttccagccaacggtaggcatatactcagcctgcgtgtacacggtctggtagtccccatcctcaaacgcggtggtcagggtggtctgggtggtgtgtttgagccggatgttgtagttcggcatcggggaacagttgttcaggttggccacattgaaggcgactgaattgatgttgcccgctccgccgccggcatcctcgatttccgaggccagtagcaggaactgctggcggaaattcttccagtaggttccatagggggctggagcaccggttgtggtattggtgctggtcccgctgcctatggtaacgttaacctgggcatagacattactgatcaggccgaagcccaggatcagcaacagcgcgaaaagaagggtttttctcataggatatctccttattcccgttttctatttgggttgtttctaattattgaccgattttcgggagtctttaccggcggactcttcctccaggccgatagagacatttatgccatcagtcgttatataatcacttaatatatagtctttcactgctatggtatgccagcatattttggctcttaaattctaatgcctacattctataaatctgtcaagtataatgtttgggttaacttgttaaagtgcttttttggcctttccatgcccaactttgctcataaacttttgccgcggcaaacgggcttgccgtccattatttcggacaccaaagtagccaagcatagtggctcaaaagcctttagcagaaaaggacggggctaatccgccgcattgggggatgagctgtcttcaaacggttccaccaggatgcggccgcagctttcgcaatagtttatctttttgcgcaactgcagctcgatgcggacttgggggcggatcacgaaaccgcagcctccgcaggtgcccttgcggcagaagaccaccgccaggttgcctttgtttttgatcatgttgccatagagcttcacgatctgcaagggcagggtgcgtgccatggtgttgcgttgggcgcgcagatcctcgatctgtccttccagcgagtcgatttggcggcgcagttcgccttcctgttcgcttttagctttttccgctttgtccagttcctgtttggcttcgttcacccgcgccgcggcctggttttcggcatccatcagttccagttggtggctttcctgctctgaaatcttttccttgagaaaggcgatctcgctgttgagggccttatattctttgttggtcttgatttcggagagttggttgctgtattttttgatctgttcctgatgctgtttgatgtcgctttccagcgagcgttgttttttggccagttcggcgcgttctgtttcgcaggcaagcaaattcgcggttgcctggtccacatgcccgatgatttcgttaagctgctggggcagttccttttgcaggacccgcagagcgccgatgcggtcatccagtttttgcatttgaaccagggtgcgcagttgttcttccatattttactccttatcaaaaagcaggcttatatccaaagatttatatgagtgggtgagggctccgctggagatatactgcactccggtgcgggcgagggagcggatgttggacgcggtgacgcctccggagatttccagttccacttgggagccgaactttttcacgcagtctttgatctgggcgaggtccatattgtccagcatgacgcggtcaacaccggctttcacggcttcttccagttcttcaaggcaggtgacttccacctcgatcttgtagctggtgttgtggcgtttgatgcgtttaacggcctcggtgatgccgcggcaggcgcggatgtggttttccttgagcatgaccatgtcgtagaggccaaagcggtggttgaaaccgccgcccacgcgcacggcgtacttttccagtccgcgcagcaggggagtggtcttgcgggtatccaacagcctggctttggtgcctttgaggcgctggacgtaggagtcggtgagggttgcgatgccgctcaggcgctgcaaaaagttgagcgcggtgcgttcgccctgcaggatgctggcggctttgccttccaggcgcatgatctcgttgccgggaaccacgcggtctccgtccttgcggtagagggtgatcttgaggccgccgtccacctgcaggaacacggctttcgccacttccaccccagccagcacaccttccgccttggcgatcatgtaggcgttgctgttgaggggttccagttccagatactgggtgctgatgtcgccgctgccgatgtcttcggccagggcaagttttatgatcttgtccagatccatgctatcctccggggtaaaaaaaaagcatctgctgatttgcaaatgcttttgttctattcagggtattatatttatcacttatcttcttgctgtttatacacatatagtttattccttaccttactgaaccaatatctgggcggcagatatttgtcaattggaaatttgggtttggcggttcgcgtttgctttcatccttccatgacctttcgggcatagcacctatatattatagagggcggcctcatttgcatccccctctccggcgtgggtcttccggcagtcatccttaacctggtgagggatgacctaaggatgatggcaccaaagccagtagcagcaaaggagggaggtgtgaaggatattgcggaatgtattggatattttttgcggttgtcaaataaatgatgccggttgtttttggtctgggtgcttgtttgggacttgaaaagacaggatcaaggttcaagtggttcatgcagatatacgggatagaggcgcagatgagcgcggattggggttataaaaggggcggttgctttgggattctggtggttgtttttgggcttcaaaagactggatcccgggtcaaatcaccccgccaaaccgctacgcgctttggcgaggaccccgtctgcccgggatgacacggatatagtctgtggggaggttgtttcggggctgggtggttgtttctaaaagactggatcccgggtcaagctatcccaccccaccggatcgttgccgatccgtcgaggaccccggcttgcccgggatgacacggttttggggcttgggggcttgttctgggctgcatccaccatctacacgtcaccacgacaccacttcaccacgagttcctttccaccatttcacctttccacctttccactacttttcataagatcggattttgttgacgaaatgcggggctgcggcagcttggtctcatgatgaataaatacagtattttactcattctgcccctgctggcgttgagcgcgagcgcttttgccgcagcggttggcaacgtttatccccttcccaagggatatcagacttgggaaagtttgcaaaaagagatgcaggcgctttccagcaagcatcccgatctggtgaccctgcgggtgatcggcttcagcggcacggaaaagctgcccatccacgccctctgcatcggcacaccggacgcccggcgcaaagtcctgatcatcgggcagcaccacggaagcgaggttttgggtgtggaaaccgccctggcatgggcacgagaactggcggtgaattacaagcactccggcaagatcaaaaaaatcctggcggagttcgagttcaccatcatccccaccctcaatccggaaggctaccgggtggtgaccagcgggcaatatcagttcaaacggaaaaacaatcaggaaacagacggcaggaaaggtttggactggcggacggacggggtggacctcaaccgcaactatccggtgttttgggaacagggcgcggttgtgccgggctcgcacgagaatttcaaaggcagcactccgatgtccgaagcagaggtgaaggcgagcgtcttactggcccaggaaaacaattttgaactggcgatcttcttccatagttctgccaccggagcctattccgaaaagatatttttgcccgccatcgacagctccgtcgccagccagaaagagcgttacgactcgctgctgcgctttgcccaggcctatgccaaaaagacgcgcaaggcctttggcggcggacgctatgaggttgccaccggccccagttcaagggaaggcaacgcgcgcaactactttttccacatccactacacgggcgctttcctggtggagatcggcggcatcaacccggacggaatctcggtgatccatcctccggacaaaatgcgcaaatctatcacgggaatgcacgtgaaggcgctgcgcaaccagttttaccgcttcagccgcggcaagctgtaaagaacgtttaacggggcagcttttcccagatgccctgatggtattgccaaacgccgtccttgcgtagcagggtcaggctgcgcactgaattgatctgatctgccgccaccagagtctgccaggcggggctgacccggtaattggcgggtgcggcggcagcttcctcatagcccagccagaggaataccactccctccgcgttcagcttctccgccaggcgcaggctgttttcgcggtcaaagttgccgatcagcaggcagtcgcaatctcccgcttcagccagtagggggcgcaattcggagtcttccggcagttcttcccatttgcggggaaactcgcgcagcaccaggtcaaggctaagctcactttccacagtgagatgctgcaactggtaagctgtcctggcgtcggagacgcggtagcccgcctgcagatagtattctccccggggcaggtttgccgtggccgttccgcctcctgtggcggtgaatttgtggttgagcgggtagagcagcccgttctgccagcgtgccagggaaaggttttggggatcgatgtccagaggggcgccctgttcatccagagtgcgcacccgcagggtgaagctggaggcagaatccttcttcccgccatcctcaaattcgcagagccggacattgcaatagcgccactggtcgttcaccagcacatagatcaggtcggggatgcgggtgaactgggcggggatgccgttggcgcgtgccaggctgacagccaggatgcagtattggtagttgctcagatacttgctgcgggatgcctcttccaggggcaggaggccgcgcagggctttggcggggtcgatccggtgctttttcttcagccagcgcatggcgttgtgcagccgctccagatcgttgtttcccgctttggcaaaggaagtgggatagaggctggggctgtctggcttgccaaaggggcggggcagctcttcataaaaaactgagggcgagagcagcgaagactgttcttccggattcaactgtccggcatcgaagcgctgaaagttctgatagagcgccgcgaactgcgccgcgttcgcctgccagaggaacttggggtcgctctccagcagatagttcaaaaagtccgggccgggctggggctgcatcttcagaaagccttcccaggcggcatgattgccccggcaggcgctcagtaccttgccttgcagggtgtccgcgcaggctgctccccgctcggtaaacgagctatcctgcccgtcccacagagccttggcttccttcacgcccagatcccactcagggggagcctgtttccaggtgaaggggttggagggatactccaaaaagatatcttgaggtggcagggggccttcgttcagaaccagatcgacatcaagctcgttttgctcggtggaagggacgggaaccagcgcctgacggccatccaggctggcgcagagatagaagcctccgcgaccggtgctgagcgtgaaagaaccgtcctccgcggtgataaactccgccagcacgcgcagggaataccagttgtaaaccatcacgcgcaccggcaccttgcccaggggattgccctgcgcgtccagggttctgatcctgatggtgcgggcgcgttccccggcatagttgcgcaccgagttgatcacacagtcgtagcggccgcggctcagcacctcgtcctgttctgaaggaagggaaccgtcggcaaggatcagcaccgtcttgtcgatcatgccgctaaaccaggtctgatcgggatagtaggcggcatccatgtctcccgtgtagtgccaggcgttgtccagccacacttccgcccaggcgtggttgttgtccatatgcgcccaccagggggtgctggccgggcgggatggcaggccaacggtgcgggcggctgccacgaagaggatttgcatttcctcgcagcgtcccacgatgctcctgcgggtgatgtccaggggcgactggtcgcgcccggaggtctgttgaaacttgagtttgctcacacaccattgggagatcttgcggtagagctcgagctcatcgacggagtcgcgcatgatctggcgcaggccgtcatccagcagcgcggcgcggtaggcctcgatgcgttcatcggatacagtctgatccgccacataggaaagaaagaattccgggctgtgtttgcagccttgctccgcaagcagtttgactatctcccggtagttgcttgccacatccgcgggagcggcgcattgcaggttagcgtccgattcataggccagcagataggccatcaccacatccgggtaccggttcagcaagcggcggtaggcttttccctgcccgtttcgcaggcgtttcaggttctctttggcaaggctgtgcagttccttgtaaagggatggattgccgcctttggtgaaggcggcgggaagtccggcggcgctgaggctcaggacggcaaagatcaaggcgaagagcaggaagattcttttgcaacaagacatatcgcacctatccatatatagtattggggagtcgtgggggaggtcagtcggccagtttgagcagtttcccctgacgtagggtgtcacccgctttcaagcgccagaaatagatcccgggagcaagccggtttccggagttgtcgcgcccgtcccagttgagttcgtgcttgccggcgtccaggtcgagccttgccagggagcgcaccttctgtccccgcaggttatagatgttcaagtccaccctggctttggcgggcagttccaggcgcagactggtctggctgcggaaggggttgggatagccgcgcagggaggtttgcaccatcggtatctgtggctcgtccacttgggtattgacgtattccaaaacgccaaagcgatccaggatgaggcccagcatgtctttcagttcccactcgccgttttgcaggcctgccaaagcaaaggaggaggcgatggtgctatgctccggaaccgcgtgcaggattccgatgctggcatccgcggaggcggcgccgtgggtgctgaagatggtctcggcggcgggcagggcgggcagcaagacctgcgcgttggggttggactgggggttgtagtcccagatccaggcttcgccatcctgatagcattttacagcttcaatattggtgaacatattcagcggggcgttggcgccgaacttgctccagaaaggatcctggctattccaggccacatccccttccagatagagcttgccgccgccgttcagatagccgtgcagcagcgagtagtccagggaatcgggatgcgggacataggcggcgtcgccccagccaaagaggcaaaacacggcttcaaagcggttgatatagtcataatccgggatcagcttatcggtatagaccacgttcagcccgccgatctggttcagcgcatccaccactctcaagccgccatgacgggagggttcatagaccaggatttcgcccaggggctggatctggctgccgctgtggccgatggctggatcgccgtagtggaggtaggtgtaaacgttttgcagttcgggatatatgattcccccgccgtccaccggatcgccaaagaggtaatattgggtgtggaggaggttggcccaggccagtgaagctcccgaggacagcccgttgcgggcaaagttttccagatagtgcaggttataggagcttagccctccccagccgggattgcgccagccgatcttgtaccagcctgtgcgggtggccgccatcgccgccacagccttcctttgcagcgcgtattccgcgatgcactgctgactgctgtcgatcatgccgttgtagcaggaggccatgaagatgaccgtgccgtcgctgttgttcaggttgtcaaagctctgcctgtccaccatgctcatccactccatttcccaactgtccggcaagccgttggagttgtcatcgttcatccacaccttgcggacagagtaaccggaagagccgtgcgcgctccagttcaccagcccgtagctttgggtgttgagcaggtttcgcagtccttggtagtccaggggatgatcgcagggatgggagggcagccagccggtttgctcgtacagggtggtattctggaatcctgccagggcggtggctttggcgtattccataaagtccgcgccatccgtctgcagatagatagtttccggttcgccgccgtagttcaggtaggcagcgggcagtagggcgctgcgcttccagggggcgtcgctctgctcgtagagcacggtgcggttggcaacgtcatacacgtggacgggattattggaggaaatgcgtcccacaaacagttccggggtatagtcgcaaaggtagtcatccactccttcaaccggtgaatactcgcccaggcggttgtctccgtccgtgtccacgatactgctgaggtcaccataatagaagtcggaagccactgtatcgccgccatccggctccggcgtcagatacatcaccggcacggtgtcgtgatcgcccaccagcagcagataagtgaaaggatggctgttatattgattgcaaaggtagttgcgcagcttgtccgccgcgttggcgcccggggtggaggccaggatcacggagatatccgcgaaggaggtgaccaggccctggctctggcgaaagctgaccaacggggacaacacgtcatagagcgcgggagtggtgacgatcaggtagtcgtagtttttgcctgccgggggctgataccatttgtccagatcacggggattggcaaagaagttcgcccgcaggttcgcgttggatttgctcagttctgccaggacaggcgggatgcggttgggcgcgggctcggattcgctccagttcagatcgagttccaacctgctgtaaccctgccaggagtttccattccagaccgcgggcagcacgcggaagcgggcgtagctcacgtcgccccagcgtcccttgcccagatagtgcacctgtccggcccgggcttcgcgggcggggctgtccagcaggcgttctccacccaaaaaggctccgttgcgttccggggcgggcaggccagaggtctgcgctccgctccagttgtagctgaagctcagttcctccgccgcgggtggcaggatcacatttatagtcttatatggaagttgtgggtatcccggggcgctgaggctgccccaaccctgcagttccatatccctggaggaggcgggcaggccgagatcgacgctcagggaaaggtttccaccccacagcagcaggggcagggacagcagcaagatggtgcaaagcttattcatcggattcctccgtgtgcctgatcctgaagggcatgccggcatcgtccgcggaacggcgacgggatttgaacccctgcctgttttgggatttgccgcggttttttaagttccgcttgtccgcgaagttctttttgccctggcggtcctgggagcgttcgcgcgccgtggtcttgcggaagcgcttcttcttgtccttgctcatcttttccgtggcatactggatgatcaggcgcggcgcgctgtccttgtgttcaaggaggaattcttccacctcagtgggaaacagcctccaaagttctctcagaaaccagcccacgccctgatgcaccacgcgttccggatcggacatcagggggcgcataaagtccagcagctcggccggaggcaatttcccccgctgccaaagcatggtcaccgcggacacccggcggctccatttgctgggcgaactccgccactccgcgaaatcctccatgttggctatctccagctccaaaaacacgggggtgatcttggtcgagatcaggtctgcgtgggcccagttggcaagggactcctcggtgaagcgtttgacgctctcatatacctcgcggtcgaagcggggacggtgtttcttgagcagcatgatggcgagcgagccgaactcatattttcccgtggcaaagaagtgcctgcccagttccgccagttcctgcacgctgggctcccattttgacaggacttcgtcgcgcagctgtttcatctcttcttcgctaatgccaaaggcgtcatagccttcggtgaaataatgggcatatttgttgaccaacgctggtttttcgtggtcgaagaaaaacttttcgcagtggcaaaagatttccaactggcgttcattcatttccgtgacggcggtgagtgctatcatctcttgtttccttgtaggcataacttgcggggcatctgaatcgccccgcgcaatctattgatcctggccgtagccctttcccttgccggttaccagcacgtgccagcggttaaacatctgccgcaggcgccagaccatcatcttgccggggttgagctgtgccagcatcttgtccaggaaaagctcccagttcgtggtctcgtggctgcggaaaaaaccgcagtcgcgcattacatcaagcatatagttgcggattctgtcaagttcatttccatccaccgcccttaactgccgcggttttgctccctgcagggggaggctgtagatctgccacagggcgatggtgaccgcctgggcgaggttgatggagggaaaggcaggattggcggggatgtggcaacgcagggggcagaggtcggcctcttcgtcggtgaggccgaatgtttcgcggccaaacaccagaccaatctccagtttggggattttggcgcagtagtccgccatctggggcgggttcagatccaccggtttatagcgtcccacgcggcgggaaaaggcgatcagcctgtccaggtcggcgctggcatctttgaggctgtcaaagacctgcgcctcctccaggatatgttcggagtgcatggccaggtaaaagtcgttctttttgggcacgctgcccacgatgcgcaggctggtgaaaccaaagttgttcatgatgcgggcgacggcgcccacattgccctcatagatgggttccaccaggattacgtggatcattgtttacgcagcagttgtcccaggcggttgctcatctgcgccacgttggggtcgggatcgtttttccattcctggatcacccgcttggtgacgttcataaagtcgaatcccttgtcgcgctggttcttttggctgaagatgctgcccaatttgcgcagggtctgccagatggcgtccacccgttcttcactggcccccaccagccagcgccggatattggcataggtctgcagcgggcgttgccgtcccacctgggtgaggatgtggccgatctttttttgcacttcttcgctttcgtcgtccagcagcctgccgatgaaggtgaggatgtattgcgggtttttatccgcgatgttttccatgccgtgcatggacatggaacgcttgttttcgttgggagacatcgcccaatggggcatctcttccttcatgacctcgggatagttcttccatagctcgaaacagatggtctcgctttcccagggaacggtctccacggtcttttccagggtcttcacgatcacccgcgggtcgtcctgcctcttgtaatagaaatagaacagcgccgtggcgcggataccgtagatgaaatcatccagcatttcggcgcaaatctcgtccaagggccccttgccctggtaggtggccagcctcttgcccatttcttcgcgcacgaaatagttcgccgtgttggccatttcctcaatttccttgatggcctgttcccgtttgcccttgtccaggcttttgaaaatcttttccacctgggcgtccattattttgtagtcgtccagattcagacgtcccatttctttgatcattagctatgctccaaatctcggtgtaagaaaaaatatattattcacaacagcagcataccgcgtaaatgcctgtgttccgtatataatgttggattttgcctcttctttcgtttgctcgtgattaacatgaacagtagatatctccgcaagctttctgtcaagaaatttctctgaccgggttgctttgcgggggaaagtggtgggtgatactggattcgaaccagtgacctctacgatgtgaacgtagcgctctaaccagctgagctaatcacccaacaatcagggtggtgggtgatactggactcgaaccagtgacctctacgatgtcaacgtagcgctctaaccaagctgagctaatcacccaggacaggatgcaatagcaaattgcagcccttttttgtcaacaaaaaacctcgctctgccccccaagcctttaccgatggcgatcttggctatcgccgtggaaaggggttttttaggtggaaaggtggaatggtggaaaggttcccccgaaacaagtccatcaagctatatactgtgtcatcccgggcaagcgtatgcttgacccgggatccagtcgcagggggggtggcaaagtctgtttgccacagagaccggaggtctcttccaaacaggcaactccgttgcctctgccgaacagacttcggcagcccttcaattatccgcgctgatctgcgtgaaccgcttgacccgtgatccagtcttttgaaatggccgtggaaaggtaaaatagtataattgtattcaattgtaataatgcaagctaaacagtattatccgttaatccgtgtaatccgtttcatccgtatgatgcctggcatgccaatcttatacggattgacggatttaaccgatttacggatttatgatgctaaagccggaaggagaaatggaaacagaacgcggacggttccattccaccattttatcttacttcaaaagcaccagcttcctggtttcccggtagtccccgcattgcaggctgtagagatagacccccgcgggaagcccttccccgctgaaggatatctgctgcgaaccggaacccagcttgtggcgggctacgatctgtccgcgcaggttaaagatgctcagtgtagcggaggagcgttccggaatgtcagctttgatcagcgcgcttccatctctgtttaggggattgggataggcgttatgcagcctggcaaccgcttgcggagcgagttcatcttccacgggggttccgcttcccaacttggcgacaaagatatcagattctccacttgcagtcagggtatggatgccgaaagtagcggtttcgtaaaaatatccggtcacacaggcgttacccgcgccatccacagcgataccagatccagcgttatttatatattcatttcctcccacattgatcgcccagagccagttaccggaggagtcaagtttggcaacaaagatatctatccatccgactgcagacaagggatggctgccaaaagtggcggtttcgcaaaaagaaccgcacgcataagcgttacccgcactatccagagcgatgccatagccattatcatagtctattcctcccgctttgaccgcccaaagccagttgccggcagggtcaagcctggcaacaacgatgtccttctctccgtttgccgtcagggtatggctgccgaaagtggcggtgtcataaaaagaaccgttcacccaggcgttacccgagccatccacaacgaagccaaatacatttatatcgttattccctccccccattacagcccataaccagttacctgacgggtcaagcttggcaatgaatatatccgattctccgtttgccgtcagggtatggctgccgaaagagactgtgccttgaaataatccggtcacataagcgttacccgttccatccaaggcaattctaattccaaagtcattgcctgaccctcctgcctttaccgcccagagccagttgcctgaggggtcaagcttggcggcaaaaatatcagcgcctccgcttgctgtcagggtatggctgccgaaagtggcggtgtagcaaaagtatcctgtcacataaacgttacccgcttcatccacgtcgatgccacctcctatatcccagtcaataccccctgctttgaccgcccaaagccagttgccggagggatccagcttggcggcaaagatatcatgctctccatttgtcgtcagggtatggttaccgaaggtagctgtgttctggaaatacccggtcacataagcgttgtcggctccatccacggtgatgaacaatccccagtcattctctgttcctcctgccctgaccgcccagagccaattaccggaggcatccagcttggcaacaaagatatcaccgccaccgctggtcgtcagggtatggctgccgaatgtagcgatttcatcaaacataccagtgatgtactggttgccctggctgtcggtcgctatggatatgctttcttcatagtcagttccccccgcgcggactgcccactgccactggggcgcctgcgctcccaaaaccatcgctccgcagagcaggataagacacaaaaatgagtttcgcaaggctttcattttttcctccctatgatgggtttcccatttggaaatatactggatgggttttagtagatttgtcaagaaaaatatcggcaggttgaatctttattttttggaaggcatttttcaaagacaggatggctgtttggagcctcaaaagactggatcccgggtcaaacggttcacgcagatatacgcggataaaaggcgcggattgggctgccgaagtctgttcggcagaggcaacggagttgcctgtttggaagagacctccggtctctgtggcaaacagactttgccacccctgggcactggatcccgggtcaagctatttcaccccaccggatcgtaaccgatccgtcgaggaccccggcttgcccgggatgacacggaatgtagcttggtgacgcttgtttcgtggccttcttttcgctgtttcaccttaaatatcctgttgatcctgttatccgcgttctataatcctttccaccttcaaagaccctgtcgatccgcgccttggcgataagggcaaaaaaagccggaacctaagtttttagtgtcccggcacaaggtctttagggttaatcagaacaggccgctgatgtcgccatcgtcttccacggagatggtttcggcggaggggtgtctgggcaggccgggcatgcgcatgatctctccggtgatgggcaccaggaagcccgctccgctcgagatgactatcttgcggacggtgaccaggaagtccttggggcgtccgatgaggtcgggattgtcggaaagcgacttctgggtcttggcgatgcagatgggcagcttgtcgaagccgaatttggcgatcctcttcaagtccgctttggcgtccgcggagtaatccaccttctccgctccgtagatttcgtgggcgatagtgtgaatcttgtcttccaccgggctgtcccagtcgtaaagcccgtggtagtggcagatttccctgtccaccatatccaccacctgttgggcgaggtccagcccgccttttccgccccgggcgtggtattccaccacagatgaatcgaatccgcgggagctggcatagtcgcggatcaatctgatctcctcatcggtgtcggttgcgaagcggttgatggcgacaatggacttcatgccgaacttgtcgatattttccagatgtttgcccagattggccaggccagcttccaccgccgcgggattgggggtggcgaggtctttgagcttgacccctccatgcaccttgagcgcgcggacggttgccaccaagaccacggcgtcggtgcagagcccgccatatttgcagacgatatcgaaaaacttttccgcgcccaggtcgaaaccgaagcccgcctcggtgacagtgtattccgacagccgcagcgcgctcttggtggcaaggatgctgttggcgccctgggcgatgttggcaaaggggccgccgtgcacgaaggcggctgtgttttcggtggtctgcacgatgtttggtttgagggcgtccttgagcagggcggcgatggcgccttcatagcccagttgcctcacatagaccggttctccgtcgaaggtgaagcccacggtaatgttgccgatgcgctccttgagctcgtccatgttgtttgccaggcagaggatggccatgatctcgctggcgggggtgatgtcgaaaccgtcttcgcgggggaagccctgcttgctgccgccgaggccgatgacgatcttgcgcagcatgcggtcgttcacgtccagcacccgtttccaggtcatgcggcggggatcgatatttagcgagttgtcaaagtaaacatggttgtccaccagggccgcgagggtgttgttggcggcggtgacggcatggaagtcgcctgtgaagtggaggttgatgtcctccatcggcaacacctggctccagcctccgccggcagctccgcccttgatgccaaacacggggcccaaagagggttcgcggatggcgacgatgctctttttgccgatctggttgagggcttgggaaaggccgatggcgaccgtggtcttgccttccccggcgggggtcggcgtgatggcggagaccaggatcagcttgcctctggggttgtctttgatgcgctccagcgcggaatagctgagcttggctttatgctcgccgtaatgttccagttcctgggggcttagcccaatctgggcggcgatctcatctatgggtttcaaggttacgctgcgcgcgatctcttgatctgttagcatagggatactccttttaaggcttgatattgaataatctaaacggattttacgatctggcacggaggaaatgccgggagggacttgagcttattccttttctggcagaaaatcaggctatctctaacactgagtggataaatcaattctaaaacaagggcgcaaaaaactaagactggtgtcagtccgctctcgcgcgcgcgagacagctaagtctctgtcttcctggggtcatccttaacccggtgagggatgacctaaggatgatggcaccaaacgcagtagcagcaagggagggcgctatgaaggattatggagattattctaagtattttgtgaaaaggtgaaaaggtggaatggtggatacaagtccaccagaccccgaaacagaccctaccagactatataccgtgtcatcatgggcaagcgtgcttgacccgggatccggtgcccaggggtgggaaagtctgtttgccacagagaccggaggtctcttcatctgctctccgccgatgcccaggccgcaacccgctatacgcagtggggaatcccacacctcctcgcccagcgcgctgatccggtttgccatcaggcagttttctccatccagtatctgcgtccagagcgtgatcaggctgccgtcatctgcttgctgcgtgcagccagtgtaactcagatcctgcgcttcccgcaccacgacgtcctcagtccagacagggttggcaaaagccaggctggtggcgagcagcagtagtagcatagccgtgtgtttcatgaaaaagactccttttcaaatagattggaaaagataacaagtcccgcgggcaggcgctgcccttacataaagacgcaaaacaaacagcttacagaatgatagtttaaacaagtccgccatattcgcaacttctttctttaaaatttataaggcgccggatatacagcgtgaggcgcccattgcgagctgaaattgctagggcagcattgttctaaggattggttcatatcccttgtcttccgcaggtattcacagatcacaaacgcagcccagacgtctgttttctttgccctcaaaaaactacttgactgattctgccatttctcacataagaatttttcgactacatttcgataaaccaagatggaatacagattatgaaaaaacttaccgccctgatcggcctgacgctgctctgcggaatcagcctggcgctcaccctcaatgtaagcgttgacccctccgcctgggatggcagcctgcgcggccagcccacggcacccctgctggagcccggcgttcccgcgctcaactattaccccgtgcgggtgctgatcccctttggggaaaaggtgctcaacgtgagcgtgcaaagctccccttacctgttgcagcgcgatggcgtgtatctggactacgcgcgccagcagcagcccacttcgcagccccgtccggacgctactcagcccgatcccgcgatctggcagagcgacgcgctgttcccggccgccaatcaccgttatctgggcacccagttgcagcgcggcctccaatatgccgtgctggacctcttcccctggaaatacaatccggtttcccgccagattcacgcggcttccgaattcagcatcgagatagaaaccggatgggatgatgccctggccacccaacaggccaacttctacgcccccgccctggctgcccgctctgtggaaggatttgccctcaacccccaggccctggccagctaccagcaggcttcccgctatcggaaccacgctccccaaagccgcctgattgacctttccactccgcgccaaatggtcatcattaccaactccaccgcctcctcctggctgcaaagctatgccaactggcgtgacggcaacgacatcagcaccggcgtattccagaccgcggatatctatgccagctatcccggaaccgacaacgccgccaaggtgcgcgccttcatcagcgacgcctatcaagcctgggcaagcaccccccagcctctgcaatatgtgatcctgggcggcgatgacgagatcgtgcccctgcgcggctgctacggccaggtgggcgacacggttgatctcagaatgcctaccgacctctatttcagcaatctggatggagactggaacgccaatggaaacgacatctggggcgaaccgcaggaccaggtggacatgctgccggaagtgcatatcggacgctttcccgccgagacccaacccgagtttgaaaacatcatccgcaaaatccaatactacaccagcaattccacgttcagcaacaacaccgccatcatgttcggagaaaacctgaacaacaaccccctcacctggggcggagattacaaggacgaagtggccaccagcgtcccggaactgtaccacctgcgcaccatgtatcagcgcgacggcacctacagcgagcagggcgtctggaacgccatcaacgagggcgtccacgtgatgaaccacatgggacacgccaaccaaaccttcctgatgggacagagcaacggcagcatccagcagctccagaacaccgaatatggctttctttacacccagggctgctatcccgccgctttcgaccaggccaccagcggcgacggcgagagcatcgcggaacacatgctcacagcctcgggcggcgtctttgccttcctcggaaacacccgctatggctggtattcccccggcaacaccaatggcgcctcccagttctatgaccgcgactacttcatcggtctctaccaaacggccaacacccagtttggctccgcgctcagctattcccgcgagcagaacctcaatgccgccatcagctatgacgtgatgcgctggtgctactatcagatggtgctatttggcgatccttccatcgaggtcaaactgcctgaccccgccctgcccctgctcagcctggaaagctacactatcgacgatgtggagggcgacggcgacggcaccatcaatcccggcgagatcatccgcatccaccccgtgatcagcaaccatcagaattgggccgcggcccacaacgtgaccgccaccctcagcggcctgccagccggagcgcagcttttgagcgacccgctggtgataccacagttgttgccaggccagaccgccgatcccggcctctatttccgtgtgcaacttccgtccggcatcgattatggcagctatcagatcaccctggagctgcaatcgctgcatcccgtcaccaacttgagcactggaacccgcagattccagctcgaatatgaaatcaccctcattgacggcagctttccctgggattgccccgtgggcagcaaatccgccccgatcgtcttcgattttgacggcgacggcagcctcgacatactttacaccgataatttcggcaacagccatctgctggataacgcagggcagcagaccggctccattcccgcgcctctccagcaggatgtgatgcgcagcgccgcctatggccagttgattgacggccaggaaccggctctggtactcaccagccgcaccggtaaagtgctggcactggcaggcgatgaagtgcttttcgattacgatggcggcagccagttcctcttcacccccgtgatcgcccagatcgactggcagggcgggatggaagtggtggcgcactccctggatggcaagatccacgtcctggattcctccggaaacctgctgccgggcttcccgcttgaccttggctccgccttccacagcgaactggctgtggcggacatcgacggcgacggcggcaatgagatcatcgtcggctgctccaacggcaagctgcacgtgatcaaatccgacggcactcccctggcgggtttccccctccaggtctccggcgcaatcaacggcgcgcccaccatcctcgccaaccgcaggatagccttcggcacctccagccacctgcatctggcaacgcccgcaggcagcctggtcttcagcaagccgatcagctccgcgatgggcggcagccccgccctggcggacatcaatgccgacggcgcgctggatatcgtgttcggcaccgccaatggctcactctacgcggtcagccagagcggaatagaccttcccggcttcccggtgcagaccggcgccgtgctgcagaccccgcccatcatcgctgacctcgacgacgatcccaacctggaaatcctcgtttccagctatgtgaactcggtttatggcttcaaccacgacggcagcgtattggacggatttccattccagaccagcttcaacggctgcacgccctccacgctatgcgatctggacggcgacggctggctcaagctggtgagcggctattccaccggagtgctggtgctgaacctgcgccgcgcggaaaaggacaaccggccctggaccgtttaccgcggctcactcacccgccagggcagctacgtctccaccggtaacgtctccaatcccgcggaagaagctcccgccctgcgcaccgccctgctgcaaaactttcccaatccctttaatcccagcaccagcatccgtttccaactggcatccgaaggctccgtccggctcgcaatttacaacctcaaaggccagttggtgcgcgtcctgagcgacggccatcgttcccgcggctcacacaccgtcacctgggatggcctcgacgcctccggcgacccggtctccagcggagtctatctctaccgcctgcaagcgggtggaaaggtgcagtcacggcgtatgctgctgctcaaatgacagagatttgcattgacataaaacgcactaaaataaagtcttgaaaccagaaataaaatatacatagggaggctaatatgccaaaagtactgatcgccacagagaagcccttcgccgcggaagccgtgcagaagatcaaggctgaactggacaaggccggctatccccatagctggctggaaagctacaccgacgtgaaagacttccatgccgccgtggcagatgccgaagccctcatcatccgcagcgacaaagtggatgccgccgtcttcgacgccgccaaacaactcaagatcgtggtgcgcgccggagcaggctatgacaacatcgacctcgccgctgccaccgcccacggtgtggtggccatgaacacccccggccaaaactccaacgccgtcgccgagctggcgctggccatgatgatctacatggcgcgcggcaagttcaacggcaaaagcggctccgagctggctggcaagaagctggtgctccatggcttcggaaatgtgccccgctttctcgccaaaatggccaaaggcattggcatggacgtctatgcctacgatccctacatcagcgcggacatcatggccaaagacggcgtcaaacacctggataaggtggaagacatcttcagcaccggagactacatctccctgcacatccccgccaccgccgagaccaagaaatccatcaactggaacctgctcagcctggtgaaacccgactgcatcctggtcaacaccgcccgcaaagaggtgattgacgaggaagccctgctcaaggcctttgaggaaaagaagaaattccgctatgtgagcgacgtggaaccggaatgcggcgccaaactgatggaactctatgccgaccgctactatgccaccccaaaaaagatgggcgcccagaccggggaagccaacgtcaacgccggagtggcggctgccaaacagatcatcgccttctttgaaaaaggcgacacaaccttcaaagtaaactgatcagaccctgtctgagattgcaacccccggcactgcccgggggtttttcttgtcccggcaatccgcgccctgcgcgaatcgtgtatctccagtgcgatcatttgcgctccgcctctgctatggataacctttatacatttaatgagcgtagattgatcacctctttgccctcatttgccagggtgggctaagtctatattttccgtaggtcatccttaacttggtgagggatgacctaaggatgatggcagcaaacgcaggagcagcaagggagggcgctatgaaggattatgcggaatattgctggtgtttttggtgaatgtaatactatattgtttgcgttttatttttatcatagtgaaaaggtggaaaggtgtttttgaggtggaaaggtggaatggtggaatggtggaaaggttctctcgatacaagtcccaaccgacccccaaaaagaccaccccccagactaaaaaaccgtgtcatcacgggctccgacccgtgatccagtcttttaaaagaaacatccacgaattacacgaattatcacgaattaaaacagaatacaaggacaagcgtccggcttcaaaaaaccacacaagacccaaaaaccgcgtcatcccggcatgtcggggccctcgacggatcggttacgatccgttggggtaggatagcttgacccgggatccagtcttttaaaagaaacatccacgaattacacgaattatcacgaaataaaacagtatacaaggacaagcgtccagcttcaaaaaaccacacaagacccaaaaaccgcgtcatcccgggcagcgacccgggatccagtgtccaggggtggcaaagtccgtttgccacagagaccggaggtctcttccaaacaggcaactccgttgcctctgccgaacggacttcggcagcccgaggggaatggcaaagtccgtttgcccaaatacgaggggaacgcctctctaacgcattgcgggagatatgggttcagttttttcctgcctcatctatggtaagattattgtttgtagtaaagctctcaactccgggcttttttaggttgacagattttccttgctgaaatagacgaaacaaactggggttgcgttttgagttatagatgaaatcgtctctggaacttcatataaacgccaacaggtttttctttattttggagattaggataaatcttatgaacaagaattcaggcattcgggataaccgtaaatatggcacagtgggcgacttcatttccctaaacgttactcccaacagcaagttggcctttgtttccgcctattttacaatctatgcctatcagcagttgaagaacaggctggacaagatcgatcacctgcgctttctctttggcgagcccagattcctggcttccatggatcccaacaagaccgacaagaagcagttcgagatagaggacaacaagctggtgatctccctggcaaacaggctggtgcagagtaaaacagcccgagactgcgcggaatggatcagggagaaggtggagataaaatccatggtcaagccaaatttcctccacggcaaactctatcacatcacaaatgaaaacggggttgagaaagccctgcttggcagctcgaacttcacagttaatggtctcggatacgggaacaaacccaatatcgagctcaatatcgaggttgccgacgatcgcgacagggcagatctcctggcttggtttgacgaactgtggaacgaggataaatccttggttgaggatgtcaaagacgaagttctaaaatacctggcaaaactctatgtgcataattccccagagtttatctattataaaaccctctatcacctctttgagaagttcctgggagagcaagctgacaaggggctgttaaccgaaaagaccggctttttcgacactgagatctggaacatgctctacagcttccaaaaagacggtgtgaaaggggcgatcaacaagttggaacgccacaacggctgtattattgccgatagtgtcggcctgggaaaaacctttgaagccctggcaatcatccaatactatgagaggctgcaatacagggttctggtactctgccccaaaaagttaaaagataattggaccgtttaccaatccatggccgccaacaaactcagcccctttaccagagaccgctattcctacacggttatgtaccacaccgacctgggcagagcgcggggaacttcggatgccaattccatcgacctggcgaatttcaactggggcgcctgggatctggtcgtgatagatgagtcgcacaatctaaggggaaatccgcgggaaaagatcgacgaaaacgacgagttgagctataaccgggctggatttcttttgcacaaggtaatcaaagagggggtgaaaaccaaggtgctgatgctctccgctaccccggtcaacaccaacctgaaagacctgcgcaaccagatacactatatcaccgaaggcagggacgacgccttctacgaaagcctgggtatagaaagtgtctcctacaccatgaaacaagcccagagccaattcacaaactgggtgaagagcaacaaagcgggacaaaagaaaagctcgcaactcttcagcgccctggacagctcgctcttcaaactccttgacgaacttaccatagcccgcagccgcaagcatattgtctcctactacaaggatattgataaaaagagctttcccaagcggctaacgccgatctcggtgagcacgaatatcgacctggaaggggatttttgttcctacgacaaagtgaatgaagacatccaggcttacaagctttccctcttcaaaccctccagcttcgttctggaggagtttaaggaactttatgagccaacagagaaagtgaaggagttttcccaagcccaacgcgaggattttctggttgagatgatgaagataaacttcctcaagcgcctggaaagcagcgttcattcctataccctgaccctcgggcgggccttggaaaagatcaacagcctgcaggacaagatcgccaaatttgaatccggccaaactcaagatggggatatttactcctttggcgatgaggacgcggtttcaccggaagaacaggataacagcgatgatttcacagttggcaagaaactgaagtttgaactaaaacacctcgatctggagaaatggaaggaagccctgagcaaggacaaagaccagttgatctcgctttacaacacggcgagcctggtaactccggacaaggatgccaagcttgaggaactgaagcagatcattaccaacaaactgaaacatccggtaaacaaggacaacaaaaagatattgatcttcaccgcctttgccgacacagccgattacctctatgagcagctcaaggatttcattcacaaagagcttggtctcaatgttgccctggtcaccggaagttctcataataaaacaaccatcaagctgcccaaaggtttccagaacgacttcaacgccatcctcacctgctttgccccttttgccaagcagcgccacaagatgcccatcctgccccaggatgaagagattgacatcatcatcgccacggattgcatctcggaagggcaaaacctccaggattgcgactatgtggtcaactacgacatccactggaatccggtgaggataatccagcgctttgggcgtatcgatcgcatcaacagccccaatgccaaaatccagatgctgaacttctggcctaccaaagacctggacaaatacatctccctcaagttgagagtggaggcgaggatggctctggtggatattaccgccacaggcgaggacaatctcttcgccgaagaggaatttgaagaactgctttccaacgaaatgaagttccgcgccaagcagttgaaaaggctaaaggaagaggttatcgacatcgaagacatggaagacggcatcagcctgaccgatttcactctggatgatttccgggttgatctgcttaactatatcaaagcaaacgaaaaagagctgcgcgaagcccctcttggcctgtacaccgtggtgccctctcccgaccacgaactttgggaccactcggtcaaagtcagccaggaacacagggaaatcatccggcccggtgtgatcttctgcctccgccacaacgaatctggcagggaatacgaaaagctcaaccctctccatccctattttatgatctacatccgcaccgacggcaccgtccgtttccgtttctttaatgccaagcagatcctggatatgtaccggatcctggccagcggacggcgaagtcccatcgaaagcctttgcgaccagttcgaccaggaaaccaaatcgggcgaagacatgagagcctataatgagctcatccagaaagccttaaaaagcatcaaagcctcccttgcaaagaaaaagcaggatcaactccaaacccatggcgatgctgtgctccctcccctgaaacaacatgaccccggcggtgaatttgaactgattacctggctgataatcaaataagcaccagagagaagacctatgaacgcaaagacagacatgaaactttccatccaggaggctttgaataactttcaaacccgtccttttgtggatgccgcctacgatttttggaaagtcctgggctatgaatcccagcgtagattcgaagaagtatcctatacctattcagaatttacggaagcattttctacccgccatcaacttaggcctgttcaagccttgaaagagcgctggacaaagatcaatctgcactttcaactcacaaatgatgagatcagagaagctggctccttctccgttcaaacgactataccggggtttaaaagtaactcggttgactccaatgaggttaagtcgtatatcttcgcatcaattgaactgaaaggacttcatgccacaagaaaagagttggttgcattaaccagggaaatcaaccgctgcttcgcgatgcctgtgctgctgctaatcaaatatggcgaactgctgactacatccgttatcaaccgaaggctgaacaaacgcgacgaaacgagagatgtcttggataaagttagcttggttaaggatatcagatacgccactccgcacagggggcacattgacattcttgagaagttttgtcttgggaacttggatgtttcatccatcaaccaactgcataaagcttggcagaaacaactctctatccgggaactaaacagggaattctataatcaaatcatagcttggtatcgcacttccctttctattatcaggctcaagtttcagtgtcaactgtctgaagaagagcaaaacgagaccaagaagcactttctggtcaaattgctttgccggttgatgttctgttggttcctaaaagaaaaaggccttattgacagcagcattctggagctgttctcagacaccgatgttccctatccgatagtaaaagataacgataatcccgaaagcaatagctattatcgtggcattctgcagacagtgttcttcgattgcctgaacgagcctaagaaaagtcgtaaactggataaaggcaaaattgaaaaatacctggatcctgcactggatttgactgttttcgaaagaataccatttttgaatggaggagtgttcaaccgtgacgatgagtttttagaagaccactgcatacttaacaacaacatagcagactcggatatcagcatacccaacaagatcttctacggctggcaggctcctggaaacaggagatcagatgatgttcccgggttgaatgtgattctgggcaagttcaagtttaccatcgaggaaaacacacccctggaagaagatgtcgcgcttgatccggaactcctaggtatggtcttcgaaaaccttctggctgaactcgacccggaccccgacatttccagaaacgctcgcagaagcagcggcgcgtattacactcccagggaggtcattgattacatggtcaatgactcgttggtgttgtatctggagtccaaggcgaaagaaaaggggctaatggagtatggagacaacatcagattcctagtttaccatgatgttgtcaatgccaatgagaagcgttttgacgattttgtggttgacgccctggataaaatccgcatcctcgacccagcctgcggcagcggttcatttcccatgggcatgcttcacaagatcacacggatactcaatctggtcgatcccgataactctaaatggttacacctaaaactggaaccgctggaaggaaaatatcgcgacgattttggcaaacacctgaaggaacactacgacgactactcccgcaagattggcatcctgcgtgactcaatctttggagtggatatccaacctttggcagtacatatcgcaaaactgagattcttcatatctctggtggttgaccaaaatacagactgtagcaaagacattggagtgatgcctctgcccaacctagagaccaacctgatctgcgcagattctctcaacgatattgaaactgatatattcgaagaaatagtatctaatgacttatcaagagcgattgaggaatactatcaggcggaacataccaaggcagaaaaagaacagctcgctgaacgtatttccactgaacttagcaacttataccaaagcttcaagtggggtcttaaaaatccaagcaaagacaggctcaaagtgttttggaaacgatggtttatgtatggcaatatcgcctgtcccttcttccatcccgaatgtttctttcccagggtgatgaaggaaggaggattcgatatcgtaatcggtaatccaccctatggaggcgataaaatctccccggaggttagaagtagccttggtttaggttcaaatgacccttatggtgctttcatcgcccgcttcatgaatttcaacgattttcccactccgctgaaaccgcatggggttttgtcttacatcgtttccgacacttttatgacgatcaagtcccacaaaaaattgcgcaggcaattgctcgacaactatatccacaaaataatccgcatgcacccggacaccttcaagcaagtggtcaacaccgtggtaatcctgtgccagaaagcggagccagggtatagcataccagattcccatcaatgccttatggtggatatgaccaacattagcatccacaagtatctggataagttcctggaaatcctgtatgatatttcagacgcggaaaaagcagttgaatactccgacaatgtccatgccgtgttcatttatcaccaaaacattatccataaatgcagtttgctgcctttcttcgtcgcccctcctaagttgttcagtttaatgcatgatgttggcgttgatcggaaccctaagaataaagctgaaagaactgtagagatcaatggtaagaaggtcacgcttgtcaaactctctgatattgcgtcggtaactcaaggacttgccactggcgacaataaatcgtatcttttccagacccccgaatctggacccacatacagaagcattgagccatacctgaaatatgtcgtttccgacgcagaactggaaaaaatatcacaaaatgacaatatccgccacaagataatcaaccttggctttcatcaatcacgctccgagcaaccatttgaccctgaccgttggttcggtggaaaatacattgtcccctatgacaaaggtggcgcttcttatacagaatccggttggctgccaaactactatgttaaaactgatttcttcatagattggagttcttgggctgtcactcgaatgaaaactctgactatcagagaaagggatggtaaaggatcaaatgctatctgttcaaggtttcagaacagtgacacatattttagtaacggaataacattttcgattgtaggtcaatatgccccaacatttagatacaatagtagttctgtttatgatattagaggatcattaattaatgttacaaccccttatctccaaatagacaacattttgtctatcctttgttcaaaattatgtaaatttatattcaaggcattgatataccatggtgtagctgcagaaatagatgcaatcaaagaaataccaattatctgtggaaacaatgataaaatcatctcattagtccgtaagatcataacaaaacagatatctgatagatactacgattattcaagtaatgaacaaaggcaaatagataaaatcatctatgaactatacggtctgtgtgatcaagatattgagcttgtggaacaatggtatgcccgacgttatccccgtttggttaacaatgcgttattggatgatcaggaatccctataagcaccataactgggaagatgttctcttccgggacagttatagcctctacggcatcaagggtagatacgctcaaaaactgattgcgtctatgcttcccgatgataaggccatctattatgaccctcataagcgttcctgcatgggagtcttggaagttgcccgcgaaccttttcaggattttaccgcttgtgaaacgcaacgtctgtgcgtggatttcaagcccatcaaaaccttggcggaacccgttgttctttctgtcctcaaagaaagtgatcttttcaagggttccctgttcctgcgccaacccaggttttcaataacagagattagccctgctcagtttcagtttatattcataacgtaacgatagtaccaaggaggtatgcacacatgaactgcgttgttacagaatgtccgatatgccgcaacccactgagtgaatcacccatagggacagattacaataataatttccatttccgctgtgcctattgtggtgaatttgagatcaatggctttaggatggtaagtcattttaatattaataaaccaggagtcaaaccagccagagataaggagctttgtattgcgctcaggcatctttacgaagaatcgaaaattatttcgaaaataacagaccaccaagacatcgacaagataaagcaaagcgtgagatttccctccggtccacttgagttgatagatatcctattgttatatttacataagcatatcactcgagtcgatcaagtgaaagccattgcggaaactgactgtcccttgctgtttatgcatgacaaacaagaactgtattacttagtcagattcgcaaaaaacatagggtatgttgattctaatgatagttttctcgctaagacatatactctcagattagagctaaaaggctgggagcgaatcagccagattgtctcgggtagtgtgaaaacaaaacaggtctttgtggctatgaaatttggagatacagaactggatagcgtatatgagaatggaatacggaaggcagttggttcacttgatctgataccataccgtgttgacaaagaagagtataacgacaaaattgatgataagattattgcagagattaacaaatccgatttccttatagcggataccacaatccccaatatcaacgtccactttgaagccggttatgcgatgggccaaagaaaaccggtgatctggtgttgtaaagaaggaactcaaatatctgatatttttgacacaagacagtacaaacatattatctgggaaaacgctgaagatttggtcgagaaattgaccaacaggataaaagcaacaatcctggacgtctgaatgcaaagcaatatcatgtaaatcaaggaggttataatgtcaagtcaggctaaagtgtttatcgtgaaatacgcaagcaaagcggattacaaggtctattttgtaaaatatgcatcgcaagagaaaaacgcccaaataatagccggaggcaagctggttaagtatgaatcacaagcaaatgtaaaggtctttatcgtgaattatgcaagccaggctgatatcaagatcatgcacgagcacttccccaaataaatacctcgcatagctcatcgcttgaagccactatgtatgacagtccagaatgatctgttattaaggctcaagttgatctctcgggatcggtttgaaagacccgatgcatattcctccctcaaaaggtctgtatatcaaacaatagagaagcacggtgtgttatcatcaacccagatagcagattcaatgcaacttcccattcgttcagttagaagatacttggagtctttaactcagaatggccttgtatcccgtgagggtaggggcccatccacagtttaccgaactacaaagtaatccggccaaaaagcggccaaactggccggaaatggggagtattgtataaaaagactggatcctgggtcaagcaagcttgcccatgatgacgcggtatgtagtctgttggggtttgtttcgtgggctgccgaagtctgttcggcagaggcaacggagttgcctttttgggagagacctccggtctctgtggcaaacggactttgccaccccctgagcactggatcccgggtcaagcaagcttgcccgggatgacacagtatatagcctggtggggtttgtttcgtgggctgccgaagtctgttcggcagaggcaacggagttgcctgttggggagagaccttcggtctctgtggcaaacagactttgccacccctgggcaccggatcccggctctatacaccccaccaaaccgctacgcgctttggcgaggaccccggcaggccgtgatgacgcggtttttgggtcttgtgtggttttttgaagctggacgctgtccttatcctgttcttttaattcgtgataattcgtgtaattcgtggacattattaaaagactggatcccgggtcaagctatcccaccccaacggatcgtaaccgatccgtcgaggaccccggcttgcccgggatgacactgtatatagcttggtggacttgtttcgtggccttcttttcgctatttcaccttcaaatatcctgctgatcctgtcgatcctgtcatccgcgttctatctcttttttacaatcaccacgacaccacctcaccacgaaggtctcctttccacctttccacctcaaaggaagccccgatatttgcatgaagcctttctaatctctgggcaccaaaaattttacttgccttgttatcgcactatcaattagtgtgaccccaagggtggcacgggctgagatcattcccgtggctgcccctgaatccgataaacctgtaaggaggattatataatccatgtggactattattaaacgttgggggctgtttttgacagtcaacatcctggtgttggctgtcttgggttttatcatgcagatcgtgggcgtgaaaagctcggactggatcgggttgctggtttactgcgccatattcggctttgccggagcggtcatttctctgctttccagcaaagcgatggcgaaggcatcctacaggatcacaccgctcacccgggagacagcccgcggcaaagagctctatctctttgatacgatagagaaaatggccgcccacaaaggcatcaggatgccggagtttggcatctaccaggcggcggacaacaacgcctttgccaccggcgcgtccaaaaacagatcgctgatcgccttttccagcgggatcatgcaaaacctggatgaggaggaactggctgccgtggcggggcacgagatgacgcatatcacggaaggcgacatggtcaccaccaccctgctgatgggcaccatgaacacctttgtgctctttctggccaatatcatcgccgccctcctgagcggcagaagaggcagaaacgatgatgacggggcttcgtccgggatgatgcattccgccagccaggccgccatcgcgatgatcatccagaatgtgctgatgatccttgccaacatcgtgctggcagcccattcgcgccaccgggaatacaaggcggacgccggctcagccgccctgaccacccccggccacatgatcaccgccctggaaaagatcagcaaagcttacgtgccttcgcgccgcaaagacgcctatgccattgccaagatcaacaacttcagccccctctccctgttcgcgacgcatccgccggtggagaagcggattgaagccctgcgtaagatgatggtgtgaacaagagattcatcctccggatagaaaagctggctctgggcggttttggcctgggctttcacgagggcaaggcgatctttgcccagcggatggcggtcggcgacctggcggaagtggagctggtcaaagaacgcaaggacaccgcctttgccaggcccctgcgttggctggagcggggcaagggagtgcgggaagcggactgcgcttcctttgacctggacgacccctgcggaggctgcgattggctgatgctggactacccggcgcagttggcagccaagaccgaactggtgagggaattgctgcagcccctggccccggatttgaagatcggcgccatgcccgcttccccaaatcccgtaaactaccgcaacaaagcctttctgcccgtgggttccggcgccgatggcctctattatggcatctacgcgcgctggtcgcacaggatcgtcccccatcagcgctgcgtcctgcatccccaactctttgacaccatcgcccagcgttgcctggaaatctgccggaaagcgggtgtgcaggcctactctgaagccagccacaccggcactttgcgccacataggcctccgcagcaacagagatcaaagctcggtgctgctgatcctggtgaccaggggagccaagctgcctttttccaacctctttgtgaagcagatcaccgcggaattcccctgcatcagcggcatcgtgcaaaacatcaaccgggaacggggaaacgtgatcctgggcccggaagacaaactgctgtatggcaatccctggctctttgacgaactggcgggcaaacgcttccgcatccactaccgcagcttttggcagatcaaccgcggcacggcggaacagatcatcgcccgcctgcagaaactgatgggcggcgcgggactggtcttcgacgcctacagcggaatcggggcgctggggctgaacctggccgcgcaggcagaacgcgtgctctgcgtggaagaatgccgggaagcggcactggatggggaactgaactccgaactgaacgacctggcgaatgttgaccatctctgcgccagagttgaggacgccctgcccgcgctgctttcagaccagcaaagcagcccctgcaaaacgccggatgtgatcattctggaccctccccgttccggagtgaaaccggcagccttgcaagccataatcgacacgggtatcaagcggatattctatctgagctgcgcgcccatgacactgcacagggacctcaagatcctgcttggcagcgggcgttacaaactggaaggcatccagacctttgacatgtttccccaaacctggcacattgagactctggcctggttgagccgcctatgaagcagcttggcgtcctgttgctctgtttgttcctgctgtcctgcaatttggccagcagtcccgaagacatggacaaaatccgcatcgaggatatcctgaaaggcattgcccgcgatttctgctggaaagacattgagggcatcatgacccaggtgcatccggactattaccacaaagggatgtatggctttcaactgcgcgggctgtggcaggaccgtatggcacgcttcgacctgcttgacgtggaagtgcgggatattgacctggctggctcccgggcgatcgtgagcatgaagctgaccttcacggccgcggacagcactctcagctatctggatcccgacaccgagggcgacgcttcctatttttaccgggaggatggcgtctggtttctctgtggcaatcaacagaatttcaagtagggattcagacttatgcgttgcccgagccaagaaccagagacagggctttcaagccccgctgttccatcaggcaaggaaaaaaggatttgacaatattgcgcagttgtaaggtgatgcaatttaatataagttactaaattgaaaaagcataggagtaagcgtatgaaattgtacatacgtgttttcggactgatgcttgtcctcgctctggctctggccggatgcaaggtttcaacaggcaaggatcagaacgggcaaaccctggatacggttcagggtctctttgtgcgggatattcccaacgatggaggcgatggcctggtaataggctggaagcccctgccccgcgaaaagagaatccaggaataccgcatttacaggggactcacccccgattccctgttctatcttgcatccgtggcggtgaacgtgaaaaccggcgttgcctcggacagcatgtattactacgatagcggctacaacgattttgtggatatcaactcgcctggaaagctcaagcacgaaaagcagaagaaaggcagcatcctgtatcgcaacatcccccgcgatatggaattggtagccaggttgagcgaaggatacaacctttactcgataatggaatccaaagactactatcgccggacgaagaaagctttttccgccgattcggaagacaagaccgtctattctggcgtgaaaatcaaccagcagagcatctctgcttccctgaagacctacgatcctgccagcgaagaagacaagattttgtattactataccgtggttccggtgaatgagcgcaaccagtatctgggaattgccgaacccaagtgcggatttcccgtggatgacgcgcccgaggcttctcccaatctctattgcaccgctttgcaagacagcatgacgctgcgctttgagtgggagtatccggtcaacaaatccgacctcgccttctaccagatcatggctgtgcccgagatgccggattcgcaatggtgcaagatcaagggcacgccccaggccatggccaacgcgctgcctgtagcccagggtcaaatcaatggaggcgcgttcaaaaactacgcggcggtcaaacatgacgaattgccagccggcttgagttgggaacgggcttccaccagccgttacgcgatccagttttatgattacagaaacaacccctcccccttgtcccgccaagcctgtgtagttctttcggacagcagcaagctgccccaggcagcacagtttgtggtggaagacaaacccaacgacaagggcgacaggctcacagtcgtttggaacgaaccgatagtattcatcagcaagacctccattatcaaacgcgagaacggtaacaaaggcctgttcgcgaagctcggtctggcaggaaagggcggcaccaggctgaagatcaattaccagcttaacaagaccgacgtgcagaaggtcaacaatatctactttgaactgctggttcccggttcggacaagccctttgccagggtgaacgaattctatcaggacaacatcatcaaggtcaccctgcccaagggctatgatctgaacaagggcctcaaggtgcgcatcacgatgaacaccagcccttacgagatcaaccccaaaaacgggcggatcacatatcagaaaggccgtttggtacccaactatgtgttggagcaaaaccttgtctgggacaaccagatgatgtcgctgatgccttccaacgaactcttcaggaatggagtggatgtttcctccgtgcacaatacggtgttccgtaaaacattcagcggctcgcagtttaccctggtgaaaaagaacacttcctacgataatagcctggatgtcaccatcccttacgttgccaacgtgggcaagcccgtgctgggcttcaactttgtgaagggcggcacgctttacacctatatgggcggcgagcgctacacccgcaagctgaaggctggcgaaaaggttcaaaacctgactttggtggaatcgcagatcgacctgaaatatgtcaagcaggacgatcccaaggattcccgcaccatccgtaccagcgtgttcaaggatgaagccgcgaaggaactggataagatgcggcaggacatcaaggacaacaaggccgaaatagccaccaagcaagcggaaatgaaagctattcccggcggggctgccaatccccaggcgcaggctttgcaacagcagattgaagccttaacagcgaaaaacgagagtctggccaagaccatcaagatctacgagaatgacccggattacaagaaatccctcactttccgcggcaaccgcggcagaatgaacttcgtggcttccatccgcgaaccgctcagccgcctgcaatcctacatgatcgtcaagaccaacggccgcggcctcttcaccgaatcctatcccgaaaaggatgcccaaggcgactatatttacaacctggcggtatccaactggttcgactggaacaaactggtcaccctcgtcgcctgcatcatcttcggcgtgggggtggtggtcttcgtgcgactggccaagcaaggcaaggatctctatatccgtcccatcgcgggcttgcaggagatcgacaacgccatcggccgcgccacggagatgggacgcccgatgctgtattgtatgggtaacggcggtctttccgatgtggccaccctggcttccctgggaatcctgggactggtggccagaaaagccgcggaatacgacaccaagctgatcgtcccctgctacgactacattgtcatgcccatcgcccaggagatagtgagagaggctcactacgccgtggggcgtccggacagctacgataaaaacaacatattctatctcacctcggtgcaatttgcctatgtggctggcgtgaacggcatcatgatccgcgaacgcatggccaccaactttttcctgggctatttcgccgcggaagccctgctgatgacggaaaccggaaacaccgtgggagccgtgcagatcgccggctcggacgccatcacgcagatacctttctttatcaccacctgcgactacaccctgatcggagaagagctttacgccgcctcggcctacctcaaccgcgagccgatgctgctggggactctgaaagcccaggactatttcaagttcctgattctgatcttcgtgattctgggcggcattttggcaagcttccaggtcacaggtttaatgcaactattccctattaaatagaagaggtcgtaaatgaagaagacaataccattaatgatagtgatcctgggaggaatcgtctgggtgctgtgggtctttgtgccgcacagactgctgcaggatgtattctactacgatttctatgtgccctggattcgtgccatgtctcccttcgggatgctcttgggcgtgatcagcctttgcatgatgcacacatccaagattcgccgcaaagctcccaaatggcaatacagtttcttctttttcgccggtttcatcatcacggctttggctggattcatcggcggaacccagaagggcggcctctatatgtggctgttcgaaaatatgcagatgccgatgagcgccacgatgttcgctctgctggctttttatatggcttccgccgcctacaaggctttccgcgcccgttccgcggaagccaccgtgctgctggtggcggcgatagtggtgatgctggctcaggtgcctctgggcgtcaagatcagcaaatacctgcctgatatctcccaatggatcctggacgtgccgaatctggcgtccaagcgcggaatcctgctgggtgtgggtctgggcagcgtggccaccaccctcaagatcctattgggcatcgaacgctcgtatctgggcggagattaaaggcggaggtgaaaatgaatctatttgaaagactgcaaaagctcgaccgccggtggatctacatcgtggtcgccctggcgatcgtcattcccctgatgatcccctataactccgacaacatcacctctcctcccacggagaacacctatcagctaatagactcctatgccggccgggaagaccgcgctgtcctgctcagcttctggcacgatgcttccaccatgccggaactgtatccgatggaagtggcgatcatccgccactgcttcgagcgtaatgtgaagctcttcctgctttccttcctgcccaccggagcccccatcatcgactatgccgtgaactccgtgaaagaagagtatccggacatcaagtctggagtggactactgcaactttggctatatccccgccgccctgatcatgccaaccatcatcggcatgggcgacgacattgccacggcggtgcccaccgacgccgaagggcgcaaggtggaaaacctgcccattatgaaagggatcaacaactacagcgagatgaacctggtggtggagttttccggctccgtggcgggcggctactggctcacctatgccaggcccaagttcggcaccaacatcgccgtcggcgtcacagccgttatggcggcggacgaatatccctacctgcaaaccggacagttcatcggcatgctggcgggcttgaaaggcgctgccgaatatgagaagctggtggatgtctttgccgcttaccgcgctcccggcgaccccatgggcgtcacctacgacgaggaaggcaacaagatagtccccggccgctccttcagcagcgacgttctggaggacgaatccatccagaaactgctcaagatcaccactcaaaccaaggctgttttctcgcagaaggagtttgacaggttcctggccaactatcctccggaagtccaggctttgatgagcagctacaagaccgaggaggacaacaacgtggtcatcgacgtcaccaaggtgaaagaggacgaccagaagaagcttggctacacagcctggaacgacctcaaccgcatgacccacaacaccatctataaattcaagacggcccgtatcggcatgaacgcccagtcggtggcccacatcatgataattctctttatcatcatcggaaacatcggctacttcatcagccgggccaaagcgcaaaagaagtaagggaggataaaatgtcttttgaattatttagcaacctggttggagccttcttcaccctctgcatcttctccttcctttacaaggacaatccgttctatcagatgtccgaacaactgctggtggggatatccctgggctactccgtggtactcacctacgagcgcgccttcatccccttcttcgtccagcccatcttcctcaaacaccaatggatactgatcatacccagtatcattggaattttctacctgttccgcttttcccgcaaatacagctggctttcgcgctatccaatcgccttttccatgatgggggtgggcgcgtccgttcccttggccatgcacaacagcattctggtgcagatgcgccaggctatggtgccgatcgaaaacatcaacctgttgctgatcttcatcggaactatcgccgtgttgctctacttcttcttttccaaagcccacaccggcgcctatgggaagtttgtggatatcggcaaatggtacatgatggttggctttggcgcgtcattcggactaaccgttatggcgcgtatctcactgctgatcggacgtatccagttcctggtcaacgacgtcatcaaagcgatattcaactaaataaacacagatcatgaggggggaagcccggtcttccccccggactctgttcaggcgtcgatgccacaccagcaatgctccaagggataaagcaatgaaaagatactttttattctgcctcttagttctgatatcactcctgctggccatgggcggctgcgtccgcggccgttccgcaaatgccggggtggaggtctttgaagctctcgacatgccccacgacgatggcagcggagtactcctgagatggaagcctctggacaaaagccaccggatcatccaatacaacgtctatcgcggccattcgccggacagcctcttcctgctgggcaatatcgaagttgatcccaaacagggtgtgatgggcgaatacctctttttctacgaccgggattatctccccctggtccagtttgagactgctccctcaaaattgaaaaaggaaaaacaccaggctccggacagtcccctctaccaggcagttcccagggacgcgaacgtcgtgagcaccatgcttccccattacagcgtgctgggcaatctcaccgcccgcggtttctacaacggctcccgccgggtggaaaaggatggcgaagagggcaaggaagtctttgccggctacaagcttaaccagtttgaaagcatctatgccaaccccctgcctggaaacacctactattacagcgtggtggcggtgaccgagacaggcaggcgcactcccgccgcccgggtctgcagcgttatccccgttgacaaccggccggattccagcgcggtgtttgccaccacctacatccaggacaccaggcagttcaagtttgaatggagccctcccacgggaaccaccgatatcggcctctggcagggctggctgatgcccaaaagcctactcccgctttaccggcaggaacagcagaagaacgccgccgcccctgacagcgtgttttacgccgcctggcaaaacggctccataaagctctttgaacacacccctccctattggagccagaccttttaccaccaggtggacgcggccgcggaaggcatcaatctgccttccagcctgcaggactacattccggtgctcagctttatggactacggcggtttccaggcagccaccctgggcaaaagcgcgcaggtaaaaaactccgcggaactgcccatcgtgccggctttccaggtgattgacaaggtcaacgacaaaggtgacaacctcatcgtttccttcggcaagccctttgccttcataacgcaggcttcctataccagctcccggaaaaacaagctgagggtgaactacgaactctccaaaaacgagcattacgagatagacaggctccgctttaccttccaggatactgccaaaaacaccttgggcacggtcacggaatactatctggacaacgtgataaagttcaagctgcccgctggcctcgccaaaaaccaaagcttcagggtgcgcgtcgagtttcgcctgcggggagagaaggatttcgatccccaggtggtctggcaggatgtgacttacgacgccaaggccttgcgtttcaacggcagcggggtcaccctcaacggccagttgctcaacaagtatttcttcgatgtttttgccaaaagcaaactggattcggattacagccccgtcatgcgcatcggcggcatttcccgcgcctttgaccacaccatcccctttgaggacaccgtcacccccgagatcgtcggctttgaccagaagaccggcaggctgctgcttgaacccaatttcaaagtggcaaaggaccccgtcagcggagcggttttgtgggttcccctttacaaacaggattttgccccctatctgaccaatttggagaaagaactggccgcgctcaaagccgggctggcgcccggagacagcctttccgaggcagcccaggaattgcgggacaaacaggccgaactggatttcgcgcgcaaccatcccgcctacgcccaggccaaagacgcaaagtcggacaaaacctggcgcaaggtcttccgggctgaaaaggacagaaacagccgcagctacgcctatcaactgctgatgaccgatggcaagggcttctggaacatcgccgaaccagcctccggcgaaggtggagagatttggaactatcccgtgggcaactggttcgacaacaccaaatgggccaccctgatcgcttcgtttgtaatgctcgcgctggtggtttacaccgtatcaatatcccgccgcaaagaattgtatatccgccccatcgcgggattggctgagcttgacaacgccgtgggccgcgccaccgagatgggacgcccggtcatgttcgttcccggctggggcaccctgggcgatgtgtgcaccatctctgccatgatgatcctcaaccagatcgccaaaaagaccgctgaatacgacatcaggctcatctccccccatgtggactactttgttgtccccttggcgcaggaaatggtccaaaccgcctacagcgaaatgggcaggcctgacgcctacaaccaaaacgacatcttcttcgtttccgacacccagttcgcgttctgcgcggcggtaaatggaatcaccgtgcgcgaaagggtcgccaccatcttctatatgggctacttctacgccgaggccctgctcatgaccgaaaccggaaaccagtccggagccatccagatcgccgccaccgatgccatcacccagattcccttctttatcaccacctgcgactataccctcatcggtgaagagttctacgccgcttccgcctacctttcccgcgacccgagcctggtgagcatgctcaaggctcaggactattttaagctgattatcgtcgtctgcgtgataataggggtggtcttatccactgcccacgtcaacgcgttccttaacttcctgcccttcgagtgatcctgcccctgcggcggggtcgctcccggtcgggttaaacacccaatataaagggagatcgaacgatgcgagtcctgcttgtttcaccccgcgcgcgcaccagcggcctggaaagcctgcgcaaggggcatcagattatccagggcctggtctatgtggctgccgcggcgagggatgccgggcacaaggccacggtggtgattgccgaccgcgagaccctgccccgctatatcaggcgctatcagcctgacttggtgggcgtttcctgcgtgaccgccacctatcccgtcgcccgcgaaatcctcatcgatctggcgcaaaactatcccggcctgcccaccatcatcggcgggcaccacgccaccttcatgtaccgcgaagttttggcggagaccggcgtcagctatgtctgccggggtgagggggaggaggtctttcccgcccttctggctgctctggaaaagggtgaacgctatcctgaaatccccggtatcgtcttcctcaaggacggccgctaccacaacgacggccacatcgctattttggacgacctcagccgcctgccccgcatctccatggatctggtggccccggagttcagcttcacgcccaagctggtttccagccgcggctgccccttccgctgttccttctgctccatctcttccttttatggcggcaaataccgccagcgtcccgtggagactgtcatttccgagctggaggagttcgtttcctggggctacaaggatttctggtttcacgacgacaacctcaccgccgatatcagatgggtgaacgaattttgccgccagcttgaagagcgccgcctcaagattcgctggaactgcatgagccgcgtggacgttatctacaagcatcccgagctttttgccaggatggcggcctgcggctgttcgctgatcaccatcggcctggaaagcggcgttcccgaagtgctggaaaagatgcacaagcagatcgacagcacccaggtgaaaaaggcggtggacacgctcaaccggctcaggatcagccatgtctggtatatgatcctgggcagcggcgatgaatttgaccatccccgctatatccgtcagaacatccgctttttccgttccctgcccctgggcattgtggtgatctccctgctcacgcccttccccggcacggaggtctttgacaggctgcaaaaggaaggcaggctgctccattacgactgggaaaagtatgacctcacccactgcgtttaccagccccaagggatgagccccaaggatctggaacgcttccagtccaaagcctacctcagcatctatctgggcaagaaatggcggctgatccccatgctctacaagggatttcgctcagggacattgaagttccactcggtgagcacaggtttcaaggctctgctcaggacggcccttttcaagaccaagttttcggacgcgatcatcaagcgccgctgaaagaatcggccaccaggccataaagccgtgatccagtctttttgaataatcatccacaaattacacaaattaacacgaattaaaaagcaggatacaaggataagcgtccaatccaaacacaaccaccaagctacaaaacaaatcatacccgacaatattccgcgtcatcacggcctaccggggtcctcgccggatcggtaacgatccggtggggtggtttgacccgggatccagtcttttggaaacaaccagccagccccgaaataatccttttatgtcaatccgtggcaatctgcgccttttatccgcgtgtatctgcgcgaactgctcgccccgggatcacacactgtatagcttgggtgtggtctgtttataggtcgggtgtttactttgcccgcgcaaccaacatcttgagagagatactatggctcccggtgcttatcaggcagtagtacacaccgctcgcgcagatgttgccgtgcctgtcctttccgtcccagtttacgaaactggttccggctgttaggttccagtctctcagttcctgccccacggaattcaatatggccaaccttgcttgcaggccgtctttgaccccgcaaactatctcgcaactgcctccctcgggcatgggattgggttccaccttttccagccagcattccgaggcagcgggggagtccggtttggtggcaggttcacagctcatgagcgacaggcagcttaggatcaagatggctgccgatgtatatagcattatcttgttcataattccttcaatcgcggatacgcgtcatttgcttagcagttgatacaagcccaggatgtttgccgaaacgccataatcgtaggcgtttttttggttcctcagcctgcccctgggaaaaagtgcgtgattcaggcgcaccgaaaagaggtcgcgatagtggagattgacgccccagccgtaggtttggccgctaatgtttccagccttgtcatggtggtatcccgcgcgcaggaagatggtgtcgaaaaccccggcttcgcagccgaatcccagaagcggcgcgtcatcgctgaactcctccgccgcgcctaacaacactctgccgctgcacaagttgcggactgccgaggcaaggccgtgcccttgggagtagtgaggattttccgcgcttagcgaaatagctccgccaacgctcagacgcttgtaaattggatctcgggatgcttgccccgagtattccgccttgccgtcaaaagcattgatatacgccgctccgaaggagtattccagctcaaaaccggattggagcgtgctgcccagacaggcagacagtcccagattgacgctttccgctttcttcaagctaaagagaaccccctcattatcaggatcgggatgtggatcgctcgcgttacttacccaatttgcgcccagagccagatgcctgacgcatcttggaaacacgccaggtgccatcaaggccagtgccgcgggcaggttcaccgagaaaccgagggtcgaggaatcttcgttcagggaaaagttatccacaagctcgccagtgctgtccgagacggcaaactctcccaactcgactccggcgctgttgctgtttcccaaagctggaagcagcagcgcgaaaccgtgatacgacatcccgagtaaagcagcccggtattccaggttttccgttttcagtatatcgcttttgtgcatatacagatagctcgtgtgtgaatacgcgatgccctctcccagggaagcgaaagcggggttgccgtaagcgcaaagggggtctttgtgccagtggtttaccacacccacaggactgccacccagagccatgttgaccgacgacggctcaagcccgttccaggcaaatccctggtatgatgccgcgcccaacgcgccaagaaagcagaacaaagccattgccaaaatacatttcttgctcaaatcggatcctccttttagattacggaccatttgaaatacttatatttgcacataaagcggctgtcaagtaataattttcgcctggcgcgctttgtagtcttggtgtgctttgttcctaaaagactggatcccgggtaagccaccccagagggggccccgacttcccgggatgacacagtatgtagcctggtggacttgtttcggggctgggtgaaaagccttattcttttaccatagtaatccgtaaatccgtcaaatccgtcaatccgtataagatttgcatgccaagtatcatacggatgaaacggattacacggattaacggataaatcgttttgcgcagtgttgtatttcattgctaacgacaccatttcacagttccactttactacggccatttcaaaagactggatcccgggtcaagcgtgcgcttgcccgggatgacacagtatgtagcctggtggacttattttggggaacctttccaccttttcaccatcacagaaaagaacgcaaacaatatagtataacattcaccaaaaacaacggcaataatctgcataatccttcatagcgccctcccttgctgctcctgcatttgctgccaccatccttaggtcatccttataaattataaggttgacctacggaaaatatagacttagcccatcccgtcaaatgggagcggcatttatttcaggcgggcgcattaattggcaagggtctggctgtcagattctaactgcatggtacagaaggcattagaaaaacagcatattttcacaccgctgtcaggttgcggcgacatgggaagcctgaataatgccaaaacgaagagacgggacgaatgaatcatcccgtctccggttatgtggtttatgtttagcccataaagggatagcggtagtcgtcggcaggaacgaaggtttctttgatcgaccttgccgaaacccagcggtagaggttgatggccgatcccgccttgtcgttggtgccggaagatctggctccgccgaaaggttgctgtccaaccacggcgccggtgggtttgtcgttgatgtagaagttgcccgcgctatgcttcagcagttcggaggcgacggagatcgcggttctgtcctgcgcgaaaatggagccggtgaggccatagggagaggttttgtcgcagaggtcgagggtctcggtgaactctttttcggggtaggcatagacagtcagcaccggcccgaagatctcttcctgcatggtgacaaacttgggattggtggtcttgatgatggtcggttcgatgaagtagcccttgctgtcatcgcactttccgccccaaacgatctcggcgtcagacgcgttgcgggctttgtcgatgtattcctttatctttgtgaagctgcttttgtcgatcacggcgttgacgaaattcgagaaatcctggacttcgcccatcttgaccgtcgcgagcatggcgctgatttcctcgaaccatttgccgtagaggctgtcgggaatgtagaggcgggacgcggcgctgcacttctgcccctggaactcgaaggctccgcgcagggatgccaccgccagggtcttgatgtccgcggaagcgtgcgcgaagatgaagtccttgcctccggtctcgcccacgattctgggataggatttgtagaggtggatgttgttggcggtgcgcttccagatatggttgaacacctgggtgcttcccgtgaaatggatgccagcgaggtagggggaatcggtgatcaggtctcccatctgggctcccgagccggggacaaagttgatgacaccagcgggcagtcctgcttccatcaatatcttcatgatgaagtagccgctgtaaaccgcggttccggaaggtttccagaccaccgtgttgcccatcagcgccggggctgtgggaaggttgccggcgatggaggtgaaattgaagggcgtgatggcgaagacaaagccttccaaagcgcggtattccgagaagttccattctcccttgggggagatgaggggctgctgttcgtaaatcttttgagcgtaataggggttgaaacgccagaagtcaatcagttcgcaggcggagtcgatttcggcctggaaggcgtttttgctttgccccagcatggtggcggcgttcaacagatagcggtatttggtggaaagcagttcggcggctctcaggaagatggccgagcgatggtagaaagacatctgctcccaatccttgcttgccttcacggccgcctggatggcgaggttgatctccttttcgccgcatttgtggtatttgccgatggcgtgcttgtggttgtggggttcgatgcagtcggcggtgttgccgctgaacacttccttgccatcgataatcgcgggaatttcgatgaactggctgccgagttcattcagctttgccttcaaggcgtctctttctttggttccgggtgcgtaagatttgatcggttcattttcaggtgtagcaacagtgaaaaacatcttcaactcctttatttatttttagtattttcagcttggaaagggagacacactgcgccagtcgcaggaaaaatgaaagtttgcttgcgtgtcaccttttcacactggaaggcatatctgtttccggatataccctgacggcgagcaatcctgccaaaggtttagatttgctcgctcgatgacgctgccagacttaaaatggcgcatttttatgtcaaggacaaaatcccgggcggcggccggacaagcgcgggtgcaggcaaaaagacctgcctcggaaagcgggattcccatttgcccaagcgagagaaacttgcgattttgggatggcgttgacagccggaaattccctccatcggaaaagaaaatccttgacatatatacatagttttcaggcttttggttacccccaaagtaaatttgacggaatgaaaaaactcaaaggaatgccgaccacgatacataagcaccgactgccccgaatcacgctcctgacgctgctgctggccttgctgctgagcgccgggttgcgggctgagattctgatccccatggatctgacgcagagcaaccacctcaaggcctatggagtcgcttttgaagcgctcaaagagcagcatgtgataaagtggctgctcaactaccggggcggcagcttcctgatcccggacgcgccggagatttccgcgctgtgcaacatccggggggtgcgcttcgagcaggtgtcgtcctcccaggtggccgccatcatgctggagatccagaacgccaatatggaagccgtggtgctggagaaagaacccaagatcggcatctatatcccgcccaactccctgccctgggatgacgccgtgaccctcgccctggaatatgcccaggtggattacgaccgcgtgtgggatgacgaggtgctggaaggcaaactggccgattatgactggctgcatctgcatcatgaggatttcaccgggcagtatggcaagttttatggctcctaccggcacatgccttggtatcagaacgatgtgcgcaccaacgaggcaatggccgccaaacacggctacgccaaggtgtggcagctcaagcatgccgtggcgcagaagatagaggagtttgtgattgccggcggcttcctctttgccatgtgcgccggcacggacaccttcgacatcgccctggcggcgcggggtgtggatatcgtggacgccctcatcgacggcgacggcatcgatccccagtataaaagcaagctcaactatgagcgctgcttcgcgttcgagaactttaccctcaagaccaatccctacgaatacgaattttccgatatcgacgccagcgactactcccgcctgaggggagcggaggcggactattttcagctcttcgacttttccgccaaatacgaccccgtgcccaccatgctcacccagtgccatacgaacgttatcaacggctttttggggcagacgacctcgttctttaaggacaaggtgaaaaagagcgtgatcatcctggcggaagtgccggggcaaaatgaggtcaagtatatccacggcaacatcggcaagggcactttcaccttttacggaggccacgatcccgaggattaccagcacaaggttggcgacccggaaaccatcctggaactccataagaattctcccggctacaggctgatcctgaacaacatcctctttcccgccgcggagaagaaacagctaaagacctgaggacgcgcgatggcaaagttttattccaagctctatcagacccagctcaaggttgggctgttcacggttatcatgctgttaatagccgtgtttggctatctgtggctgagcaagcgcatttcgatccgttcgcagcaagacctgcaggtgggcttcaccgacgtcatggggctggaagtgggcgacaaggcgatgttccggggcatggaagtggggcgcatcaagagcatcgcggcccgcggggacgacatcctggtgacggcgcgcgtcaaccgggggctcggcctcaaagagggcgcggtcttttacatctcggacagcagcctgatgggcggaacggtactcaacatcgcccagggagaggggccggggctgctcgatctgggcaaggcccaacggggtgaagaccccagcggagtgatggccctgctgggcaaggcgaacgccactctgggagagttcaacgctgtgctatcggagctgaggcgggagaatggattgattgcgaagtcttcctctctgcttgacgatgcgggcagcgcggccaggtcagtggaggagctttcccaggatgccaaagcgcggctggcggccaccctgcaaaagatagattcgctctcggagcggataaaccgcgtcgccaaagccaacgaggagcagatcaacacggtgctgcaacgctctccccaggccctggaaaacgtgagcggcaccctggacagcctcaaaacgctttccgccaacctttcccaaaccgtcaaggcgctgaatagcggacagggcagcgcgggactgctgctgaacgatgaagccctgtatcacaagctgttgcgctcggtggccaatctcgattcgctggtgctggatatccgcgcccatcccaagaaatatgtgaaattcagtctcttttaaagatgccgatgaaattaagattcgccctgcttttcctgctgatttccgctttgtgccatgcttacaactttggccagaacaaggtcaacaccacacccgaggcgtggtcaaccctccagaccatgcactttgatgtttactttccccggggcgagaacgacttcggccgcctggcggcgctgctcgcggaagagacctactacaacctgcgggctgacctcaaatatcccatctcgtcccgcatcccgatcatcttttaccgcagcaagagccagtttcagagcaccaatatcatctatcccctcctcacggaaggcgtgggaggattcaccgagagcctgcgcaaccgggtggtgatccccttcgacggcagttaccgcaacctggaagacctgattgcccacgagctcacccatgcctacgccaacgctttggacaaaggcatgatcaactcctatctgtccctccggcctgtgtcctttcccttctggttttcggaaggactgccggaattcctctccattggcggcgaaaacgactataacaacatgttcatcctggatatggtggtcaacgactacctggtgccactgggcagttcggacggctattttgcctaccggctgggggagagctttctggcctacatcgccaagacctatggccgggaaaaggtgtcggaatactatttcaccatccactcctcacacaatatggacgcggcaaccaagaaagtctttggcatcgatttcgagagcctggaatcccgctggcgctttcagttgaaacgggacttctatccccgcgtcaacgaccatggagtgccccaggaagcgatggagcagcgcacccgctccgataaggatggctcctacttcaacttcatgccccgcttttcccccaagggagaccgctacgtctatttttccaccgccggggcgagatacagcgtgtggatggctggcatccatgaaatggacagggcaaagaagatattcaccggtgaggccaccggcaaagccgaggaattctattacttccgctccaacctgagctggtttccagatggcaaacgggtggctttttccgccaagacctcctggggcgaccagatccacatcctggacgtggacaggggaaagatcgtgcagacggtcaaactgccggaatttgacgcgatctatgaactggacgtggctcccgatgggcagaagctggtctttgccggacagcgggaaatgcgctgcgacatctatctccatgacctggagaccaggcagaccaggcagttgacggatgactatttcaacgacgcccagcccaggttttcccccgatgggcagacgatcgtcttttcctcggagcgcagcctcaacccggaatcccagcgcaagggcttctttgccaatgtggtggccaatatctacagcctggatctggatggaggggagccccggcagttgactttcaggatcagggactgtagctggcccatgtttgacggcagcggcgacaaactgctctacctcacctatgaggacaaggtcaacaatctccacgcccttgatctgcaaagctccgcccaggcgaaggtgaccgatgtgctggcgggggtctttgcggcggatatctcccctgataaccgctatttgctggtttccaactatttcgacaaggcgtggaacatctactttgcccacgatcccctgaaaaacctggcctggagcgacagcaccgcgcaacagctttccgtcccctctcccgacctcatggcaggggtggatttggggcaactggactactttggcaagcgcaaacccgctcctctgcccaggatcaaccccgcccgccagtatgacgaacgcttccccctcagcggggaataccgcccctttgaacttacccgcgaggattccctgtttctcacccgggattacagctatgacgaccgccccaccagcaaagacaatcctcccacaataggcggatacaagccccgcttctctttggacagcatctggggtggcctggcctattcctccgccgtgggaacaatcggctatgtggagcttggcctcagcgacatcatggggaaccacggcatcggcgcgaacgtcggcgtggcgggcaagctggaggagtcgaacctgctgctcacctatatgtatttgaagcacaggatggactacggggtcggaatctacaacctcgtggacgacgcctactatctggacgagaattacctccccaacaatttgttgcgctaccgggaacgcaagagcggcctctacatgctgctgcgctatcccttcacgcgcttcacccggctggagtttgaccacatgctctatcagcgcgggcaatacctgtcctgggcgccctatgtggagggctacgagctgagcgaggaggtgagcctcagccaggatcttgtttacactcccggtctttcgctggtgcacgacaacgccctctatggctccaccgggccgcttgtgggttggaggagcctgtataacgtgagcgccaccctcgccgacggaagggtggaatacttcaccaactacatcgatctgcgcagctacaccctgttcagccggcgctatgccatcgctttgcgcgctattgccggagtgagtacgggaaaggagccccagcgcttcaacctcagcggctactatggggtgcgggcttaccgggataacctcagcggctacaaaaaggccctgctgagcgccgaacttcgctttcccttttttgaatacatcaacctcgccttcccgatcccgctcaacatccccaacatccgcggcagcctctttgccgacctgggcacggtgttcgacaatttctcagacttcaacgccaccacggaggacggcaggctggatgacctcaaactgggctatggcttcgggccgcgactcaacctgggctatgtggttttgcgcttcgacatcgcctggcagaccgatctttccaaaacctcaaagcccacctattacctgagcttaagtgaagatttttaaataagttaagatataaacgaggagaaacgatgaaaatcgacttgttacgcaagcttaccgaacacatggaaagcgtgatcgtgatgatagacgaaaaaggcgacctggacagtgtcgaatacctgccggagaatatcagacaggcgatccagctctatcttaaacaaaacgaattcaaatttgagttcaacagaatccgcagctttcccatcgtgctgcccaagcactgcaacaacgtggtgctctgcggagtgggcaacgccaaggagttgaacggcgcgaaactgagaaccctgtttgccaacgccctgcgcgcggtgatgaagctgaatggcagggaagtgtatctcttccccgcctttgccaatcccctgggagatgtgcagtttggccacattctggcggaatccgccctgctggccgagtataaattcaacaaataccaggcggacgccgaaacctgcggcctggaagcggtgcatctggtgatggagctcaagaccacccgccacatcaaccgcggcatccttgaaggccgcatctttgccgacgccaccaatctggcccgcgatctggtgaacgaacctgccaacgtggtcaatcccgatacactggcggagacagcccgcaagctggctctgaaacacggtttttccatcgatgtctttggcccggacaagctgagacgcatcaagatggacgccttccttgccgtagccaggggttccgccgccgaaccgcgcctgatcctgatgtcctaccacggcaatcccgattcccgcagcaaaagcatcggcctgatcggcaaagggctcacctacgacagcggtggatactgcctcaaaagcccccagggcatggtgaacatgaaaacagacatggcgggagccgcggccgtgctgggcacctttgtggccatttccaccctcaagctgaaggtaaacgtctttggcgtgatcgccgcctgtgaaaacatggtctccggccacgcctaccacgccggagacgtgatccgcagcatggctggcaagaccatcgaggtcaacaacaccgacgccgaaggccgcctgaccctggtggacgccatccattacgcggtcagcaaggaacgcgtctccaaggtcatcgacatcgccaccctcaccggagccgccgtgggagctttgggcaatcagatttcgatggtgatgagcaacaacgacgccttgctgaacaaggcgaaacacgcggccgacttcaccggagaactgatctggcaactgccctcccatgaagaatatctggatctgatcaaaagcgacatcgccgacctcaaaaacagcggcgggcctctggctggagcgatcactgccggtctgttcatccgcgagtttgtggacaagaaaccctggctgcacatcgatatcgccggaaccgcgcacaaggacagggaaagcggcatcaacacctacggggccaccggggtgggagtgcgtttgctgacccaactgctgcgtgaactggagtaagcccatgcgcagaatcttgccgctactgttgggatcgctggcgctactggctctcctggcctgttccggctcgccccggaacgagcgggagaccgtggtggtctcgatctatccctatgaattactggtgaggcaactgaccggcgacagcctgaacgtggtcaccctcattccgcccaacagctcgccccataccttcagccccaagcccgccgggctgcgtgccttgaacggggcggccctcgcagtatccaacggctttggcctggaaaccaatctggggcaggcttttgacgccttgggcgacaggcatgtgaagatcgaggatcagctccggcggcagcacgtcattcccgccgatgataccaatccgcatatctggctctcgccccggctgctgacccacatcaccctgatcctctccgatcagttgcagacgcgttttccccacctgaaaaccaccatcagcgaaaacacgggacgcctgatctccgacctcgccgccctgcatcagcgcatgcagagcgaacggagcactttcacccgcactccggtggtcacctggcacgacagcttccactatctgctcaaggattacgacatcgaggatctgggcaccgtgcaaagctcccctggcaaggaacccactccccgggagctggctcgcatcggctcgctggtcaagagccacaatctcaaagccgtttacaccgaagtccagatgagcgacaaagcggcgcgcgccctggccagtgagttcgacctctccatcgtgcaactggatccgctggggcacagcttcaaacccaagagcatcatggacgttatcctcaacaactgggaggggttaaagctgggttgggaatgatgtttccgcctttttccgcctgccttcccattcggccctacttcgcgtccttaaccccgggaggagacatccttaggtattccttataaattataaggttgacctaaggttgtcccaagcaaaaggtaaggattgatatgagggggatatgatgatcgaggtgcgggggctcagccatcgcttcggcaacagcctgattctggaagacatagacttacagatcacgcggggggagtttgtggccataatcggccccaacggggcgggaaagtccaccctgatcaggctgatcctgggtttgctgcccgtgcagagcggcaccatccacatcgatggtgaggcgcatctggactggctgcggcacaacccgatgggctatctgcctcaaagggaagagtttgaccgcggttttccggcttccgcgctggacatcgtgctgatgggattggcggcggaactgcccttgggaggcagattcacaaaatcccagcgggagcgcgccctggcagccctggaaaccaccagcacggcggagctggcgtccaaacgcctgggaagcctttccggggggcagttgcagagggtgctgctggcgcgggcgctggtctcgcgcagcaactatctgatcctggacgagcctgaagcctcggttgaccgtcccggggtgcagagcttcttcgctttgctgcacgatctgaacaaggcaggcaagaccatcatcaccatctcccacgacctgcacacgctttccgaacactgcagctcgctgatctgcctcaaccgaaaactgcactgccacagcaagaccgaactggtgaacgccgagatcatccgcaaaaccttcggcgaagcggtgaaactgatcgacaaggactactgatgctggaatattcctttctgatccgcgctctggcggctgcctcgctctcctcgctctcgctggcgcttttttcgccctttgtgaccctgcggcggatttcctacatgggcgaagcgctttcccacatcgcctttgcgggcatcgcgctggcgattctggcaggctggaatatgcagttcaccgccatgctggttgtggtgggggtgagcctggcaatcagttggctctcgcgccgccagaggctggaggaggccaacgccatcaccatcttcctgagcgtttccatggccatcggcatcatcctgatctcgctcaacaagggctacaccttcgatctggccagttatctgtttggcaacgtgctgcttgccaattccaccgatctgtggctgctgggcgcggcggccgtgctgaacctgatctttatcctgggattctacaaagaactcttttactattcctacaatccagaactggcaaggttttaccgcctgcatgccggcttggtcaaccgcctgttcatgatcctgctggcggtgaacatcgtgatcaacgtgcgggcggcgggcatcatcctggtgagcgcccaactgatcctgcccgcggcggcggcgttcaatctggttgaccgtttggacagggccctggttttctgcgttgtcttttcgctgctggcttcctttggcggcttcgccctttcctggtggctgaacctgcccacgggggcgagcgttgtggtgctggagtttgtcatgtttttgctgagcctgcttcccagggctttccggagggatagatgctgagcgatccgcgcctctggacagtcgtcgcccacgctctcatctggcaggttgccgagcccaaaatgcaggcctggggggaaagggcggtcacattgctgactggcaggcccctgaaccagactcgcagattcgatgagcggggcattcccatccagctttaccgggatctgggcttgcaatacaatcccctcttcgtggcggcacaggccaatcgcgactaccagcgcaggaaggatcccgccaggcgcgcaagctttctgaagctcaccgattggctgctggaacactccgaggtggaagagggcaggctgtggcttccctatcgcttcgacctgcccaggctggggctgcgcgcgccctggtgcagcgccctggcccaggccagaagcatgcttgcctttgcccggcgctatgaactgaccgcccaggacgactggctgcaaaacagcgtcatggcgatgcgcaccctcgcgcccggaagcagcctgacgaggcgcttgccggatggctccctctggtttcaggagtatcccggcgaggggcaaccctttgtgctcaacgggatgttggcgatcctgctttgcctttgggacacatacaaaatcaccgggcaggaagaggctcacaggctttttgaagcgggatacgcgggcttgctggccaggctgggtgagttcgattaccggggtttcagctactacgacctgaatggcggcattgccagccggaattaccatcagaagcatatttcctatctcaggaagctgaaccgtatcaaaccccatccggagctgaaaaaatacaccgtccgctggcaggcccacgatctgctgccggtgggtttgcagcttttttacaatccgcgccccaagcggatagccgccttcctgctttccctggcgggatgcgtgggaatcgggtggctgcttactttgctattcccacgaggaacttgaccataaagtccggcgcatagctggtcttggcttgcctcaaaccctcgaggccgatgtcctgctcgcggtttatccatttgtagcgggattgcagatagcgggcggtttcccaatagattagctgggcgctgccctttttgtcgggatcaaacttctcgaagtgtaccgtcaccatgtcctgcgtctgcgggctgaagatggaataggcggcgatcctttggtccaggcagacgattattccctccacgggcagttcgtcccacatctcaagggtgttttggatggctttcatctcggtgtccagatagctgccttcaacgtgcctctcgcggcgccatttttcggtgaagcgctcgatcacctcgtgtttttccttgcttatcggcagcacatgatagttcggataggcacgccggaactgggagatcaggtttttcttcttggtcagctttttgcctctcaggttcaccattttctccgtcgcatagacgtagtcataccagtccctgtcgtcgctgatctcaaagtgcctgtccaggcccgggcagctttcctgccagttctccgggatgatcagcagtttcgcctccggagcgtcctcgcggtagaggtcaaaaagttccctcgtcttgtccgcgcccaagcccggtcccaccgggtagagcagataggagtattgcggattgaccagtaccagatggccttcccagagcgtgtattggttgttgtagattttgccccagcttaggaggttgcagatgttgtagtcgcaggactggcgcggatagcggctgaggaactcgcgcaggaggggaatctgggcagtggtaagaggctcgagctttagcatactgtgtcgcgcgcttagtcctgcttcaacaggaacggcgtgtatccctccatccgggcaaagcccagcccttcgtaaaacctgtcgtagcccggttcgctgatcaggcctatccactgcattccgtccccgcgcaggcgttcgagcagtttgcgcacgatggccttgccgatgccccggccgcggtagtcgctgtgtaccgtcacgtcctggatgtaggcgtcgctcaccctgtcgctgattgccctgcccatgccgatgatcctggagccgtgggcggcgatcgcgaagcagtgggagttcgcgattatcttttccaccgtcctcagatactccggattgtcatcggtttgccaccatcccgcgtggcgatacaaggccaggatcgcctccgggtctgcttgggtgactattgaaagttctatgtctgtcatgcttccgctccattctgtaactgattgtgtcaggttccgctggggaaaaatcctgtacgagcaattgcatttataaataaatgtccatttctgtcaagtatcttgccgtgcggggaatcggatttttcttgacagattgccttgaaaacatgatagataaccaatccgttcattcaaggagccaaaatgccaagattagtcattttcagcttactggcagccctgtttttggcaggctgcaacactgtttccacgcttcccgaccagacgggcgagctgccgatccgcatggacctcagcccggcggcacagctcaatttcaacgtctcgagggtggcagtcactgtcgtcaaagggacttacagccagagcatggacctcgccatcagcggcaatatggctgaggggactttgcaggacttggagccgggcgtttacgccatcgatgtacaggtctttgacggcctcaccctgatcgccaccggccagggcagcggactggtctcaccctctcagaccaccacggtgcacatcaccctgcagtttgttcccggaggcctggaagtggttgtggggtgggggcttccctatgaagacagccgccgcgtcctcctggtgggaaacagccacacctacttcaacgatggggtggatactcacttgcaagccctgatcgacatggcgcatcccgaatggaatgtggtggtggatgccagaaccagtggcggatacaccctggaaaaccattatcacgatcagaacaccctcagcaccatcgccacgggagattgggacctggtgatcctccaggaacagagcagccgccccatgctgaatccggaactcttttacagctatgccgattcgctgaacaccctgatccaccaggcgggcgccctcaccggtttctacatgacctgggcctggcgcaacaacccggaaatgtatgtgccgatcagagacgcctaccgctacatcggagcctggctggatgcccccgtggtgccggcaggagtggcgtggcacaacgccgattccatccccggcatgccaaatctctatgaagcggacaactaccaccccagcatctatggcacctacttggtagcctgcctgatgctggcccgcatctggaacgtcaaccctgtgggcaacaggtatttccccccacagatcgacgccgccacggctaacctcctccagcagcttgcctgggacaccatccaaaacgaataccggggcctggatttgcactccagacggtgggagcagcttctcgcgacagcggcataagatggcggctcgcagccctggcgcaaaaaacggagactacgcctgtagcctccgtttgcccggaacgaggtatatctaatctaagaacagcctgcaaatcttttcccggtactgttctggctggattttattttttgccagccactccttagccttatccagcatggtttgatattcctcactcgaaatcatggcgaagtattccaggtaatagaccacaaccagggtgatgccgatccttttggcgactgccggtttgaacttgcctgtcagagcgagccgatcggcgacgtctttggattttattttcttgtttcccaataccaggtgcagtaattgggatttatcccagtagccgtttgccgtttgcgtaagcaccagcctgctaaggataggatcatcttctttagaactgagagagttctggttatccaatagcgtgttataaaacatgactgattctgtggggggataggcgcacgcacatatccgttccgcatgatatgccaaagtggccaccacaggcacccggcgcagttcgatgcctcccttgagggattcgttacggcggggatcgctcaccacaaagctggtaaactcactcaggatctggtatttgacggcgatttccgtggctatgtcacggctggatctcattctttgccgcgaaccggagggtgtccggcccgggttctgaagccggtgtttggcgtagagctgcggcaagccgccgtgggactggggacagggctgcaactccccgctttccagagagagggtagtgccatccgccaggcttgccaccaggcttactttgccttccggctgcctatccagatgctccataaaatacagcggttcgttggggatcaggcaaatgcactggctgtccagttgtcggctctgtccgccccaattcaggcagaggctggtgacgacgggattgtccatgcgtgccagatgcctgccgatgacgggctccagcctttcgccgggataggcgaactcactttcgccgccggtaagccggggcagggactttatcagttcctcgtcggcgttgcgtcccagcccgatggtgaagatgcggggacggttgggggctttgcgcacgtaatcctgtatctggctgttgtttcccacttctccgtcggtgagcaggatgatgttcttggtgtcttccgggtcggtttccaaggcgtgtttgaggggactgagaatctcggtgccgcccagatcggcgtccaaagcctgcacccaggcgcgggctttgtccaggctactgtcatcgtagctgttcaagcttgtgaaaagggagtggaagtcactgccaaaggcgatgatgttgaagcggtcgccctcacgcagagaggctaaaagcagcaacagagcgcttttggcggattcgatgctgctgcctctcatggagccggaacagtcgatgataaagatgatgttcttgggctggcgggctttttcgggcagcttcggcatgaactccgcgtagccgatccagccttcctgaaacgggtcagggcagaaataggccagctttccgctgacttggacgggctcgatattgagcaccagatcgcggtccatctgcacttccccgctggaaaagctaattctgacactatcttcccccatttcgaccctgatcggatgagagggcgaatccaccgatttcaccccgccctgcatgctgatctccgcttccaggctgagcccgtaagggagcttgttgagcgcgcggggcggatagaggcggtccagatcggcaggatccatcttacgcgcgacatccaggggagtatatacttccgcgatcacggaaggcaggctgaagcgatagctgccatcccggctcctgagaagctgaacgtaagtgatgctcaccaccacatcctgcccgggagccagattgcccacgctgcaggtgaagtggttgggcgtgtcctgatccaggagataagcgctgtggttgtttgccagcgcttgatcgtaagcgtcgaaggcggtgtcccgttccattacccgggctaccagttcccgctccgcgtccgtgatcttgaatccgcagacagtggcgtccattggcaggggaaagctatacacagcctcgatggggatgttttcggtgttcacgtagtgttgttcgatggttgtctggcaggcgttgttgaccactttgatcctggcggcgacgccgcgcagggctatttgggcttcacctttgccggttgagccaatcagaccgcagaattgtttttcctccatggtttactccttatctgaatcgttcaagattttctccaaagccgcgatttcccccgtgtcgggaatcttgtgcccccagggcagttccaacaccgcgccgctcttcagtggaatgcgcagcacgcgctccagaggcggcatagacgcgcttgcctgggacggatgttcagctttttcggccatgccggcccggtgcgccaaaatgctctgcagatgctgctccgtgtaatagctgccccgtccgccgccgcaaggtggatcgatgatcttgcgctgcacatagtagcgcaccgcccggcgggaaacccctgccgcggaggccaattcggcgatggagtatcttgtcttgttcttcatggttcaattcgacactatacagggttagtgtcaagttcttctttcgtttttcaaagtcctttattcatattacaaataatataactaaggcggcccgtaaagcaaggaataaatgcgacatttatgtgatattttggcgggattgctgtctcgttccgggcagcgacccgggttccagtgtccaggggtggcaaagtccgtttgccacagagaccggaggtctctcccaaacaggcaactccgttgcctctgccggacagacttcggcagcccccgaaacaaacccccaacagactactcatcacgtcaccacgtcaccacgtcaccacgtcaccacggtaaacataccttgtcattcacggataataatcacaattatccgcaatatccttcatgccgcccgcccttgctactacagcgtttggcgccatcatccttaggtcatccctcaccgggttaaggatgactgccggaagacccacgccggagagggggatgcaaatgagggcgctccctccatcccgcgcgtttttcccctccccataatatataggtgctatgaaaagaacgtggaaaggtgaaatggtgagaaccagttgtagtaatgcaagcgagatagtatgagtcagtactgggaagggagttggatagagaagagtctgttggattcaatgcaaatgcccggttttcaggccgggcatttacttagtggtcaggatggatggagtaaattatttgatcatcaccactttctgggtgaagctggtcttacctgcgatcatgcgcaccatatacataccggtgccgcagtcgcgtccttgcatatccttgccgtcccacacgtagtctttgtagttgccggggtttttgacgcccaggtcatcgctatacacgatctgcccgcgggcgttgtagatctggatgctcaccggggtggggccggcgtccttgcctatgctgaaggggatgcaggcaaagggattgaaggggttgggatagatcttgttgagagcggtctgcaggggaatggtcgccggcgtcgtggaagtggacgaaaacgcgatcgacacagggccgtggaagctactggtagcagtttcgcgggcttccagccaataataatagacgccgtcttcatagacctcggagtcggtgaattcataggtctgcatgctggaagtattggtggcggggatcagcgggctcaccatctgggcgctgttcagatcgtcagaagtgccgcgcaggatgtaatagccggtcatgttggtctcggactgggtgacccaggtgagcttgacataagattccgcggacagcgaagccgtgaaagaggagagctccaccggcgtgggaatttggtaatagaggcattcgctca

SEQ ID NO: 522 - DNA, 87566 bp, Artificial Sequence
  Synthetic Oligonucleotide
atcacttacgttcagcttctccggagccgggatggcagctatcgcgtcagcctgccttccgtgatcgcggaagtatatactcccctggatgtcgcgcgtaagatggatcctgccgatctggaccgcctctatccgccccgcgcgctcaacaagctcccttacgggctcagcctgaaagcggagatcagcatgcagggcggggtgaaatcggtggattcgccctctcatccgatcagggtcgaaatgggggaagatattgtcagaattagcttttccagcggggaagtgcagatggaccgcgatctggtgctcaatatcgagcccgtccaagtcagcggaaagctggcctatttctgccctgacccgtttcaggaaggctggatcggctacgcggagttcatgccgaagctgcccgaaaaagcccgccagcccaagaacatcatctttatcatcgactgttccggctccatgagaggcagcagcatcgaatccgccaaaagcgctctgttgctgcttttagcctctctgcgtgagggcgaccgcttcaacatcatcgcctttggcagtgacttccactcccttttcacaagcttgaacagctacgatgacagtagcctggacaaagcccgcgcctgggtgcaggctttggacgccgatctgggcggcaccgagattctcagtcccctcaaacacgccttggaaaccgacccggaagacaccaagaacatcatcctgctcaccgacggagaagtgggaaacaacagccagatacaggattacgtgcgcaaagcccccaaccgtccccgcatcttcaccatcgggctgggacgcaacgccgacgaggaactgataaagtccctgccccggcttaccggcggcgaaagtgagttcgcctatcccggcgaaaggctggagcccgtcatcggcaggcatctggcacgcatggacaatcccgtcgtcaccagcctctgcctgaattggggcggacagagccgacaactggacagccagtgcatttgcctgatccccaacgaaccgctgtattttatggagcatctggataggcagccggaaggcaaagtaagcctggtggcaagcctggcggatggcactaccctctctctggaaagcggggagttgcagccctgtccccagtcccacggcggcttgccgcagctctacgccaaacaccggcttcagaacccgggccggacaccctccggttcgcggcaaagaatgagatccagccgtgacatagccacggaaatcgccgtcaaataccagatcctgagcgagtttaccagctttgtggtgagcgatccccgccgtaacgaatccctcaagggaggcatcgaactgcgccgggtgcctgtggtggccactttggcatatcatgcggaacggatatgtgcgtgcgcctatccccccacagaatcagtcatgttttataacacgctattggataaccagaactctctcagttctaaagaagatgatcctatccttagcaggttggtgcttacgcaaacggcaaacggctactgggataaatcccaattactgcgcctggtattgggaaacaataaaataaaatccaaagacgtcgccgatcggctcgctctgacaggcaagttcaaaccggcagtcgccaaaaggatcggcatcaccctggttgtggtctattacctggaatacttcgccatgatttcgagtgaggaatatcaaaccatgctggataaggctaaggagtggctggcaaaaaataaaatccagccagaacagtaccgggaaaagatttgcaggctgttcttagattagatatacctcgttccgggcaaacggaggctacaggcgtagtctccgttttttgcgccagggctgcgagccgccatcttatgccgctgtcgcgagaagctgctcccaccgtctggagtgcaaatccaggccccggtattcgttttggatggtgtcccaggcaagctgctggaggaggttagccgtggcggcgtcgatctgtggggggaaatacctgttgcccacagggttgacgttccagatgcgggccagcatcaggcaggctaccaagtaggtgccatagatgctggggtggtagttgtccgcttcatagagatttggcatgccggggatggaatcggcgttgtgccacgccactcctgccggcaccacgggggcatccagccaggctccgatgtagcggtaggcgtctctgatcggcacatacatttccgggttgttgcgccaggcccaggtcatgtagaaaccggtgagggcgcccgcctggtggatcagggtgttcagcgaatcggcatagctgtaaaagagttccggattcagcatggggcggctgctctgttcctggaggatcaccaggtcccaatctcccgtggcgatggtgctgagggtgttctgatcgtgataatggttttccagggtgtatccgccactggttctggcatccaccaccacattccattcgggatgcgccatgtcgatcagggcttgcaagtgagtatccaccccatcgttgaagtaggtgtggctgtttcccaccaggaggacgcggcggctgtcttcatagggaagcccccaccccacaaccacttccaggcctccgggaacaaactgcagggtgatgtgcaccgtggtggtctgagagggtgagaccagtccgctgccctggccggtggcgatcagggtgaggccgtcaaagacctgtacatcgatggcgtaaacgcccggctccaagtcctgcaaagtcccctcagccatattgccgctgatggcgaggtccatgctctggctgtaagtccctttgacgacagtgactgccaccctcgagacgttgaaattgagctgtgccgccgggctgaggtccatgcggatcggcagctcgcccgtctggtcgggaagcgtggaaacagtgttgcagcctgccaaaaacagggctgccagtaagctgaaaatgactaatcttggcattttggctccttgaatgaacggattggttatctatcatgttttcaaggcaatctgtcaagaaaaatccgattccccgcacggcaagatacttgacagaaatggacatttatttataaatgcaattgctcgtacaggatttttccccagcggaacctgacacaatcagttacagaatggagcggaagcatgacagacatagaactttcaatagtcacccaagcagacccggaggcgatcctggccttgtatcgccacgcgggatggtggcaaaccgatgacaatccggagtatctgaggacggtggaaaagataatcgcgaactcccactgcttcgcgatcgccgcccacggctccaggatcatcggcatgggcagggcaatcagcgacagggtgagcgacgcctacatccaggacgtgacggtacacagcgactaccgcggccggggcatcggcaaggccatcgtgcgcaaactgctcgaacgcctgcgcggggacggaatgcagtggataggcctgatcagcgaaccgggctacgacaggttttacgaagggctgggctttgcccggatggagggatacacgccgttcctgttgaagcaggactaagcgcgcgacacagtatgctaaagctcgagcctcttaccactgcccagattcccctcctgcgcgagttcctcagccgctatccgcgccagtcctgcgactacaacatctgcaacctcctaagctggggcaaaatctacaacaaccaatacacgctctgggaaggccatctggtactggtcaatccgcaatactcctatctgctctacccggtgggaccgggcttgggcgcggacaagacgagggaactttttgacctctaccgcgaggacgctccggaggcgaaactgctgatcatcccggagaactggcaggaaagctgcccgggcctggacaggcactttgagatcagcgacgacagggactggtatgactacgtctatgcgacggagaaaatggtgaacctgagaggcaaaaagctgaccaagaagaaaaacctgatctcccagttccggcgtgcctatccgaactatcatgtgctgccgataagcaaggaaaaacacgaggtgatcgagcgcttcaccgaaaaatggcgccgcgagaggcacgttgaaggcagctatctggacaccgagatgaaagccatccaaaacacccttgagatgtgggacgaactgcccgtggagggaataatcgtctgcctggaccaaaggatcgccgcctattccatcttcagcccgcagacgcaggacatggtgacggtacacttcgagaagtttgatcccgacaaaaagggcagcgcccagctaatctattgggaaaccgcccgctatctgcaatcccgctacaaatggataaaccgcgagcaggacatcggcctcgagggtttgaggcaagccaagaccagctatgcgccggactttatggtcaagttcctcgtgggaatagcaaagtaagcagccacccgattcccacgcatcccgccagggaaagcaggaaggcggctatccgcttggggcgcggattgtaaaaaagctgcaaacccaccggcagcagatcgtgggcctgccagcggacggtgtattttttcagctccggatggggtttgatacggttcagcttcctgagataggaaatatgcttctgatggtaattccggctggcaatgccgccattcaggtcgtagtagctgaaaccccggtaatcgaactcacccagcctggccagcaagcccgcgtatcccgcttcaaaaagcctgtgagcctcttcctgcccggtgattttgtatgtgtcccaaaggcaaagcaggatcgccaacatcccgttgagcacaaagggttgcccctcgccgggatactcctgaaaccagagggagccatccggcaagcgcctcgtcaggctgcttccgggcgcgagggtgcgcatcgccatgacgctgttttgcagccagtcgtcctgggcggtcagttcatagcgccgggcaaaggcaagcatgcttctggcctgggccagggcgctgcaccagggcgcgcgcagccccagcctgggcaggtcgaagcgatagggaagccacagcctgccctcttccacctcggagtgttccagcagccaatcggtgagcttcagaaagcttgcgcgcctggcgggatccttcctgcgctggtagtcgcgattggcctgtgccgccacgaagaggggattgtattgcaagcccagatcccggtaaagctggatgggaatgccccgctcatcgaatctgcgagtctggttcaggggcctgccagtcagcaatgtgaccgccctttccccccaggcctgcattttgggctcggcaacctgccagatgagagcgtgggcgacgactgtccagaggcgcggatcgctcagcatctatccctccggaaagccctgggaagcaggctcagcaaaaacatgacaaactccagcaccacaacgctcgcccccgtgggcaggttcagccaccaggaaagggcgaagccgccaaaggaagccagcagcgaaaagacaacgcagaaaaccagggccctgtccaaacggtcaaccagattgaacgccgccgccgcgggcaggatcagttgggcgctcaccaggatgatgcccgccgcccgcacgttgatcacgatgttcaccgccagcaggatcatgaacaggcggttgaccaagccggcatgcaggcggtaaaaccttgccagttctggattgtaggaatagtaaaagagttctttgtagaatcccaggataaagatcaggttcagcacggccgccgcgcccagcagccacagatcggtggaattggcaagcagcacgttgccaaacagataactggccagatcgaaggtgtagcccttgttgagcgagatcaggatgatgccgatggccatggaaacgctcaggaagatggtgatggcgttggcctcctccagcctctggcggcgcgagagccaactgattgccaggctcacccccaccacaaccagcatggcggtgaactgcatattccagcctgccagaatcgccagcgcgatgcccgcaaaggcgatgtgggaaagcgcttcgcccatgtaggaaatccgccgcagggtcacaaagggcgaaaaaagcgccagcgagagcgaggagagcgaggcagccgccagagcgcggatcagaaaggaatattccagcatcagtagtccttgtcgatcagtttcaccgcttcgccgaaggttttgcggatgatctcggcgttcaccagttcggtcttgctgtggcagtgcagttttcggttgaggcagatcagcgagctgcagtgttcggaaagcgtgtgcaggtcgtgggagatggtgatgatggtcttgcctgccttgttcagatcgtgcagcaaagcgaagaagctctgcaccccgggacggtcaaccgaggcttcaggctcgtccaggatcagatagttgctgcgcgagaccagcgcccgcgccagcagcaccctctgcaactgccccccggaaaggcttcccaggcgtttggacgccagctccgccgtgctggtggtttccagggctgccagggcgcgctcccgctgggattttgtgaatctgcctcccaagggcagttccgccgccaatcccatcagcacgatgtccagcgcggaagccggaaaaccgcggtcaaactcttccctttgaggcagatagcccatcgggttgtgccgcagccagtccagatgcgcctcaccatcgatgtggatggtgccgctctgcacgggcagcaaacccaggatcagcctgatcagggtggactttcccgccccgttggggccgattatggccacaaactccccccgcgtgatctgtaagtctatgtcttccagaatcaggctgttgccgaagcgatggctgagcccccgcacctcgatcatcatatccccctcatatcaatccttaccttttgcttgggacaaccttaggtcaaccttataatttataaggaatacctaaggatgtctcctcccggggttaaggacgcgaagtagggccgaatgggaaggcaggcggaaaaaggcggaaacatcattcccaacccagctttaacccctcccagttgttgaggataacgtccatgatgctcttgggtttgaagctgtgccccagcggatccagttgcacgatggagaggtcgaactcactggccagggcgcgcgccgctttgtcgctcatctggacttcggtgtaaacggctttgagattgtggctcttgaccagcgagccgatgcgagccagctcccggggagtgggttccttgccaggggagctttgcacggtgcccagatcctcgatgtcgtaatccttgagcagatagtggaagctgtcgtgccaggtgaccaccggagtgcgggtgaaagtgctccgttcgctctgcatgcgctgatgcagggcggcgaggtcggagatcaggcgtcccgtgttttcgctgatggtggttttcaggtggggaaaacgcgtctgcaactgatcggagaggatcagggtgatgtgggtcagcagccggggcgagagccagatatgcggattggtatcatcggcgggaatgacgtgctgccgccggagctgatcctcgatcttcacatgcctgtcgcccaaggcgtcaaaagcctgccccagattggtttccaggccaaagccgttggatactgcgagggccgccccgttcaaggcacgcagcccggcgggcttggggctgaaggtatggggcgagctgttgggcggaatgagggtgaccacgttcaggctgtcgccggtcagttgcctcaccagtaattcatagggatagatcgagaccaccacggtctcccgctcgttccggggcgagccggaacaggccaggagagccagtagcgccagcgatcccaacagtagcggcaagattctgcgcatgggcttactccagttcacgcagcagttgggtcagcaaacgcactcccaccccggtggccccgtaggtgttgatgccgctttccctgtccttgtgcgcggttccggcgatatcgatgtgcagccagggtttcttgtccacaaactcgcggatgaacagaccggcagtgatcgctccagccagaggcccgccgctgtttttgaggtcggcgatgtcgcttttgatcagatccagatattcttcatgggagggcagttgccagatcagttctccggtgaagtcggccgcgtgtttcgccttgttcagcaaggcgtcgttgttgctcatcaccatcgaaatctgattgcccaaagctcccacggcggctccggtgagggtggcgatgtcgatgaccttggagacgcgttccttgctgaccgcgtaatggatggcgtccaccagggtcaggcggccttcggcgtcggtgttgttgacctcgatggtcttgccagccatgctgcggatcacgtctccggcgtggtaggcgtggccggagaccatgttttcacaggcggcgatcacgccaaagacgtttaccttcagcttgagggtggaaatggccacaaaggtgcccagcacggccgcggctcccgccatgtctgttttcatgttcaccatgccctgggggcttttgaggcagtatccaccgctgtcgtaggtgagccctttgccgatcaggccgatgcttttgctgcgggaatcgggattgccgtggtaggacatcaggatcaggcgcggttcggcggcggaacccctggctacggcaaggaaggcgtccatcttgatgcgtctcagcttgtccgggccaaagacatcgatggaaaaaccgtgtttcagagccagcttgcgggctgtctccgccagtgtatcgggattgaccacgttggcaggttcgttcaccagatcgcgggccagattggtggcgtcggcaaagatgcggccttcaaggatgccgcggttgatgtggcgggtggtcttgagctccatcaccagatgcaccgcttccaggccgcaggtttcggcgtccgcctggtatttgttgaatttatactcggccagcagggcggattccgccagaatgtggccaaactgcacatctcccaggggattggcaaaggcggggaagagatacacttccctgccattcagcttcatcaccgcgcgcagggcgttggcaaacagggttctcagtttcgcgccgttcaactccttggcgttgcccactccgcagagcaccacgttgttgcagtgcttgggcagcacgatgggaaagctgcggattctgttgaactcaaatttgaattcgttttgtttaagatagagctggatcgcctgtctgatattctccggcaggtattcgacactgtccaggtcgcctttttcgtctatcatcacgatcacgctttccatgtgttcggtaagcttgcgtaacaagtcgattttcatcgtttctcctcgtttatatcttaacttatttaaaaatcttcacttaagctcaggtaataggtgggctttgaggttttggaaagatcggtctgccaggcgatgtcgaagcgcaaaaccacatagcccaggttgagtcgcggcccgaagccatagcccagtttgaggtcatccagcctgccgtcctccgtggtggcgttgaagtctgagaaattgtcgaacaccgtgcccaggtcggcaaagaggctgccgcggatgttggggatgttgagcgggatcgggaaggcgaggttgatgtattcaaaaaagggaaagcgaagttcggcgctcagcagggcctttttgtagccgctgaggttatcccggtaagcccgcaccccatagtagccgctgaggttgaagcgctggggctcctttcccgtactcactccggcaatagcgcgcaaagcgatggcatagcgccggctgaacagggtgtagctgcgcagatcgatgtagttggtgaagtattccacccttccgtcggcgagggtggcgctcacgttatacaggctcctccaacccacaagcggcccggtggagccatagagggcgttgtcgtgcaccagcgaaagaccgggagtgtaaacaagatcctggctgaggctcacctcctcgctcagctcgtagccctccacatagggcgcccaggacaggtattgcccgcgctgatagagcatgtggtcaaactccagccgggtgaagcgcgtgaagggatagcgcagcagcatgtagaggccgctcttgcgttcccggtagcgcaacaaattgttggggaggtaattctcgtccagatagtaggcgtcgtccacgaggttgtagattccgaccccgtagtccatcctgtgcttcaaatacatataggtgagcagcaggttcgactcctccagcttgcccgccacgccgacgttcgcgccgatgccgtggttccccatgatgtcgctgaggccaagctccacatagccgattgttcccacggcggaggaataggccaggccaccccagatgctgtccaaagagaagcggggcttgtatccgcctattgtgggaggattgtctttgctggtggggcggtcgtcatagctgtaatcccgggtgagaaacagggaatcctcgcgggtaagttcaaaggggcggtattccccgctgagggggaagcgttcgtcatactggcgggcggggttgatcctgggcagaggagcgggtttgcgcttgccaaagtagtccagttgccccaaatccacccctgccatgaggtcgggagaggggacggaaagctgttgcgcggtgctgtcgctccaggccaggtttttcaggggatcgtgggcaaagtagatgttccacgccttgtcgaaatagttggaaaccagcaaatagcggttatcaggggagatatccgccgcaaagacccccgccagcacatcggtcaccttcgcctgggcggagctttgcagatcaagggcgtggagattgttgaccttgtcctcataggtgaggtagagcagtttgtcgccgctgccgtcaaacatgggccagctacagtccctgatcctgaaagtcaactgccggggctcccctccatccagatccaggctgtagatattggccaccacattggcaaagaagcccttgcgctgggattccgggttgaggctgcgctccgaggaaaagacgatcgtctgcccatcgggggaaaacctgggctgggcgtcgttgaaatagtcatccgtcaactgcctggtctgcctggtctccaggtcatggagatagatgtcgcagcgcatttcccgctgtccggcaaagaccagcttctgcccatcgggagccacgtccagttcatagatcgcgtcaaattccggcagtttgaccgtctgcacgatctttcccctgtccacgtccaggatgtggatctggtcgccccaggaggtcttggcggaaaaagccacccgtttgccatctggaaaccagctcaggttggagcggaagtaatagaattcctcggctttgccggtggcctcaccggtgaatatcttctttgccctgtccatttcatggatgccagccatccacacgctgtatctcgccccggcggtggaaaaatagacgtagcggtctcccttgggggaaaagcggggcatgaagttgaagtaggagccatccttatcggagcgggtgcgctgctccatcgcttcctggggcactccatggtcgttgacgcggggatagaagtcccgtttcaactgaaagcgccagcgggattccaggctctcgaaatcgatgccaaagactttcttggttgccgcgtccatattgtgtgaggagtggatggtgaaatagtattccgacaccttttcccggccataggtcttggcgatgtaggccagaaagctctcccccagccggtaggcaaaatagccgtccgaactgcccagtggcaccaggtagtcgttgaccaccatatccaggatgaacatgttgttatagtcgttttcgccgccaatggagaggaattccggcagtccttccgaaaaccagaagggaaaggacacaggccggagggacagataggagttgatcatgcctttgtccaaagcgttggcgtaggcatgggtgagctcgtgggcaatcaggtcttccaggttgcggtaactgccgtcgaaggggatcaccacccggttgcgcaggctctcggtgaatcctcccacgccttccgtgaggaggggatagatgatattggtgctctgaaactggctcttgctgcggtaaaagatgatcgggatgcgggacgagatgggatatttgaggtcagcccgcaggttgtagtaggtctcttccgcgagcagcgccgccaggcggccgaagtcgttctcgccccggggaaagtaaacatcaaagtgcatggtctggagggttgaccacgcctcgggtgtggtgttgaccttgttctggccaaagttgtaagcatggcacaaagcggaaatcagcaggaaaagcagggcgaatcttaatttcatcggcatctttaaaagagactgaatttcacatatttcttgggatgggcgcggatatccagcaccagcgaatcgagattggccaccgagcgcaacagcttgtgatacagggcttcatcgttcagcagcagtcccgcgctgccctgtccgctattcagcgccttgacggtttgggaaaggttggcggaaagcgttttgaggctgtccagggtgccgctcacgttttccagggcctggggagagcgttgcagcaccgtgttgatctgctcctcgttggctttggcgacgcggtttatccgctccgagagcgaatctatcttttgcagggtggccgccagccgcgctttggcatcctgggaaagctcctccactgacctggccgcgctgcccgcatcgtcaagcagagaggaagacttcgcaatcaatccattctcccgcctcagctccgatagcacagcgttgaactctcccagagtggcgttcgccttgcccagcagggccatcactccgctggggtcttcaccccgttgggccttgcccagatcgagcagccccggcccctctccctgggcgatgttgagtaccgttccgcccatcaggctgctgtccgagatgtaaaagaccgcgccctctttgaggccgagcccccggttgacgcgcgccgtcaccaggatgtcgtccccgcgggccgcgatgctcttgatgcgccccacttccatgccccggaacatcgccttgtcgcccacttccagccccatgacgtcggtgaagcccacctgcaggtcttgctgcgaacggatcgaaatgcgcttgctcagccacagatagccaaacacggctattaacagcatgataaccgtgaacagcccaaccttgagctgggtctgatagagcttggaataaaactttgccatcgcgcgtcctcaggtctttagctgtttcttctccgcggcgggaaagaggatgttgttcaggatcagcctgtagccgggagaattcttatggagttccaggatggtttccgggtcgccaaccttgtgctggtaatcctcgggatcgtggcctccgtaaaaggtgaaagtgcccttgccgatgttgccgtggatatacttgacctcattttgccccggcacttccgccaggatgatcacgctctttttcaccttgtccttaaagaacgaggtcgtctgccccaaaaagccgttgataacgttcgtatggcactgggtgagcatggtgggcacggggtcgtatttggcggaaaagtcgaagagctgaaaatagtccgcctccgctcccctcaggcgggagtagtcgctggcgtcgatatcggaaaattcgtattcgtagggattggtcttgagggtaaagttctcgaacgcgaagcagcgctcatagttgagcttgcttttatactggggatcgatgccgtcgccgtcgatgagggcgtccacgatatccacaccccgcgccgccagggcgatgtcgaaggtgtccgtgccggcgcacatggcaaagaggaagccgccggcaatcacaaactcctctatcttctgcgccacggcatgcttgagctgccacaccttggcgtagccgtgtttggcggccattgcctcgttggtgcgcacatcgttctgataccaaggcatgtgccggtaggagccataaaacttgccatactgcccggtgaaatcctcatgatgcagatgcagccagtcataatcggccagtttgccttccagcacctcgtcatcccacacgcggtcgtaatccacctgggcatattccagggcgagggtcacggcgtcatcccagggcagggagttgggcgggatatagatgccgatcttgggttctttctccagcaccacggcttccatattggcgttctggatctccagcatgatggcggccacctgggaggacgacacctgctcgaagcgcaccccccggatgttgcacagcgcggaaatctccggcgcgtccgggatcaggaagctgccgccccggtagttgagcagccactttatcacatgctgctctttgagcgcttcaaaagcgactccataggccttgaggtggttgctctgcgtcagatccatggggatcagaatctcagcccgcaacccggcgctcagcagcaaggccagcagcagcgtcaggagcgtgattcggggcagtcggtgcttatgtatcgtggtcggcattcctttgagttttttcattccgtcaaatttactttgggggtaaccaaaagcctgaaaactatgtatatatgtcaaggattttcttttccgatggagggaatttccggctgtcaacgccatcccaaaatcgcaagtttctctcgcttgggcaaatgggaatcccgctttccgaggcaggtctttttgcctgcacccgcgcttgtccggccgccgcccgggattttgtccttgacataaaaatgcgccattttaagtctggcagcgtcatcgagcgagcaaatctaaacctttggcaggattgctcgccgtcagggtatatccggaaacagatatgccttccagtgtgaaaaggtgacacgcaagcaaactttcatttttcctgcgactggcgcagtgtgtctccctttccaagctgaaaatactaaaaataaataaaggagttgaagatgtttttcactgttgctacacctgaaaatgaaccgatcaaatcttacgcacccggaaccaaagaaagagacgccttgaaggcaaagctgaatgaactcggcagccagttcatcgaaattcccgcgattatcgatggcaaggaagtgttcagcggcaacaccgccgactgcatcgaaccccacaaccacaagcacgccatcggcaaataccacaaatgcggcgaaaaggagatcaacctcgccatccaggcggccgtgaaggcaagcaaggattgggagcagatgtctttctaccatcgctcggccatcttcctgagagccgccgaactgctttccaccaaataccgctatctgttgaacgccgccaccatgctggggcaaagcaaaaacgccttccaggccgaaatcgactccgcctgcgaactgattgacttctggcgtttcaacccctattacgctcaaaagatttacgaacagcagcccctcatctcccccaagggagaatggaacttctcggaataccgcgctttggaaggctttgtcttcgccatcacgcccttcaatttcacctccatcgccggcaaccttcccacagccccggcgctgatgggcaacacggtggtctggaaaccttccggaaccgcggtttacagcggctacttcatcatgaagatattgatggaagcaggactgcccgctggtgtcatcaactttgtccccggctcgggagcccagatgggagacctgatcaccgattccccctacctcgctggcatccatttcacgggaagcacccaggtgttcaaccatatctggaagcgcaccgccaacaacatccacctctacaaatcctatcccagaatcgtgggcgagaccggaggcaaggacttcatcttcgcgcacgcttccgcggacatcaagaccctggcggtggcatccctgcgcggagccttcgagttccaggggcagaagtgcagcgccgcgtcccgcctctacattcccgacagcctctacggcaaatggttcgaggaaatcagcgccatgctcgcgacggtcaagatgggcgaagtccaggatttctcgaatttcgtcaacgccgtgatcgacaaaagcagcttcacaaagataaaggaatacatcgacaaagcccgcaacgcgtctgacgccgagatcgtttggggcggaaagtgcgatgacagcaagggctacttcatcgaaccgaccatcatcaagaccaccaatcccaagtttgtcaccatgcaggaagagatcttcgggccggtgctgactgtctatgcctaccccgaaaaagagttcaccgagaccctcgacctctgcgacaaaacctctccctatggcctcaccggctccattttcgcgcaggacagaaccgcgatctccgtcgcctccgaactgctgaagcatagcgcgggcaacttctacatcaacgacaaacccaccggcgccgtggttggacagcaacctttcggcggagccagatcttccggcaccaacgacaaggcgggatcggccatcaacctctaccgctgggtttcggcaaggtcgatcaaagaaaccttcgttcctgccgacgactaccgctatccctttatgggctaaacataaaccacataaccggagacgggatgattcattcgtcccgtctcttcgttttggcattattcaggcttcccatgtcgccgcaacctgacagcggtgtgaaaatatgctgtttttctaatgccttctgtaccatgcagttagaatctgacagccagacccttgccaattaatgcgcccgcctgaaataaatgccgctcccatttgacgggatgggctaagtctatattttccgtaggtcaaccttataatttataaggatgacctaaggatggtggcagcaaatgcaggagcagcaagggagggcgctatgaaggattatgcagattattgccgttgtttttggtgaatgttatactatattgtttgcgttcttttctgtgatggtgaaaaggtggaaaggttccccaaaataagtccaccaggctacatactgtgtcatcccgggcaagcgcacgcttgacccgggatccagtcttttgaaatggccgtagtaaagtggaactgtgaaatggtgtcgttagcaatgaaatacaacactgcgcaaaacgatttatccgttaatccgtgtaatccgtttcatccgtatgatacttggcatgcaaatcttatacggattgacggatttgacggatttacggattactatggtaaaagaataaggcttttcacccagccccgaaacaagtccaccaggctacatactgtgtcatcccgggaagtcggggccccctctggggtggcttacccgggatccagtcttttaggaacaaagcacaccaagactacaaagcgcgccaggcgaaaattattacttgacagccgctttatgtgcaaatataagtatttcaaatggtccgtaatctaaaaggaggatccgatttgagcaagaaatgtattttggcaatggctttgttctgctttcttggcgcgttgggcgcggcatcataccagggatttgcctggaacgggcttgagccgtcgtcggtcaacatggctctgggtggcagtcctgtgggtgtggtaaaccactggcacaaagaccccctttgcgcttacggcaaccccgctttcgcttccctgggagagggcatcgcgtattcacacacgagctatctgtatatgcacaaaagcgatatactgaaaacggaaaacctggaataccgggctgctttactcgggatgtcgtatcacggtttcgcgctgctgcttccagctttgggaaacagcaacagcgccggagtcgagttgggagagtttgccgtctcggacagcactggcgagcttgtggataacttttccctgaacgaagattcctcgaccctcggtttctcggtgaacctgcccgcggcactggccttgatggcacctggcgtgtttccaagatgcgtcaggcatctggctctgggcgcaaattgggtaagtaacgcgagcgatccacatcccgatcctgataatgagggggttctctttagcttgaagaaagcggaaagcgtcaatctgggactgtctgcctgtctgggcagcacgctccaatccggttttgagctggaatactccttcggagcggcgtatatcaatgcttttgacggcaaggcggaatactcggggcaagcatcccgagatccaatttacaagcgtctgagcgttggcggagctatttcgctaagcgcggaaaatcctcactactcccaagggcacggccttgcctcggcagtccgcaacttgtgcagcggcagagtgttgttaggcgcggcggaggagttcagcgatgacgcgccgcttctgggattcggctgcgaagccggggttttcgacaccatcttcctgcgcgcgggataccaccatgacaaggctggaaacattagcggccaaacctacggctggggcgtcaatctccactatcgcgacctcttttcggtgcgcctgaatcacgcactttttcccaggggcaggctgaggaaccaaaaaaacgcctacgattatggcgtttcggcaaacatcctgggcttgtatcaactgctaagcaaatgacgcgtatccgcgattgaaggaattatgaacaagataatgctatatacatcggcagccatcttgatcctaagctgcctgtcgctcatgagctgtgaacctgccaccaaaccggactcccccgctgcctcggaatgctggctggaaaaggtggaacccaatcccatgcccgagggaggcagttgcgagatagtttgcggggtcaaagacggcctgcaagcaaggttggccatattgaattccgtggggcaggaactgagagactggaacctaacagccggaaccagtttcgtaaactgggacggaaaggacaggcacggcaacatctgcgcgagcggtgtgtactactgcctgataagcaccgggagccatagtatctctctcaagatgttggttgcgcgggcaaagtaaacacccgacctataaacagaccacacccaagctatacagtgtgtgatcccggggcgagcagttcgcgcagatacacgcggataaaaggcgcagattgccacggattgacataaaaggattatttcggggctggctggttgtttccaaaagactggatcccgggtcaaaccaccccaccggatcgttaccgatccggcgaggaccccggtaggccgtgatgacgcggaatattgtcgggtatgatttgttttgtagcttggtggttgtgtttggattggacgcttatccttgtatcctgctttttaattcgtgttaatttgtgtaatttgtggatgattattcaaaaagactggatcacggctttatggcctggtggccgattctttcagcggcgcttgatgatcgcgtccgaaaacttggtcttgaaaagggccgtcctgagcagagccttgaaacctgtgctcaccgagtggaacttcaatgtccctgagcgaaatcccttgtagagcatggggatcagccgccatttcttgcccagatagatgctgaggtaggctttggactggaagcgttccagatccttggggctcatcccttggggctggtaaacgcagtgggtgaggtcatacttttcccagtcgtaatggagcagcctgccttccttttgcagcctgtcaaagacctccgtgccggggaagggcgtgagcagggagatcaccacaatgcccaggggcagggaacggaaaaagcggatgttctgacggatatagcggggatggtcaaattcatcgccgctgcccaggatcatataccagacatggctgatcctgagccggttgagcgtgtccaccgcctttttcacctgggtgctgtcgatctgcttgtgcatcttttccagcacttcgggaacgccgctttccaggccgatggtgatcagcgaacagccgcaggccgccatcctggcaaaaagctcgggatgcttgtagataacgtccacgcggctcatgcagttccagcgaatcttgaggcggcgctcttcaagctggcggcaaaattcgttcacccatctgatatcggcggtgaggttgtcgtcgtgaaaccagaaatccttgtagccccaggaaacgaactcctccagctcggaaatgacagtctccacgggacgctggcggtatttgccgccataaaaggaagagatggagcagaaggaacagcggaaggggcagccgcggctggaaaccagcttgggcgtgaagctgaactccggggccaccagatccatggagatgcggggcaggcggctgaggtcgtccaaaatagcgatgtggccgtcgttgtggtagcggccgtccttgaggaagacgataccggggatttcaggatagcgttcacccttttccagagcagccagaagggcgggaaagacctcctccccctcaccccggcagacatagctgacgccggtctccgccaaaacttcgcggtacatgaaggtggcgtggtgcccgccgatgatggtgggcaggccgggatagttttgcgccagatcgatgaggatttcgcgggcgacgggataggtggcggtcacgcaggaaacgcccaccaagtcaggctgatagcgcctgatatagcggggcagggtctcgcggtcggcaatcaccaccgtggccttgtgcccggcatccctcgccgcggcagccacatagaccaggccctggataatctgatgccccttgcgcaggctttccaggccgctggtgcgcgcgcggggtgaaacaagcaggactcgcatcgttcgatctccctttatattgggtgtttaacccgaccgggagcgaccccgccgcaggggcaggatcactcgaagggcaggaagttaaggaacgcgttgacgtgggcagtggataagaccacccctattatcacgcagacgacgataatcagcttaaaatagtcctgagccttgagcatgctcaccaggctcgggtcgcgggaaaggtaggcggaagcggcgtagaactcttcaccgatgagggtatagtcgcaggtggtgataaagaagggaatctgggtgatggcatcggtggcggcgatctggatggctccggactggtttccggtttcggtcatgagcagggcctcggcgtagaagtagcccatatagaagatggtggcgaccctttcgcgcacggtgattccatttaccgccgcgcagaacgcgaactgggtgtcggaaacgaagaagatgtcgttttggttgtaggcgtcaggcctgcccatttcgctgtaggcggtttggaccatttcctgcgccaaggggacaacaaagtagtccacatggggggagatgagcctgatgtcgtattcagcggtctttttggcgatctggttgaggatcatcatggcagagatggtgcacacatcgcccagggtgccccagccgggaacgaacatgaccgggcgtcccatctcggtggcgcggcccacggcgttgtcaagctcagccaatcccgcgatggggcggatatacaattctttgcggcgggatattgatacggtgtaaaccaccagcgcgagcattacaaacgaagcgatcagggtggcccatttggtgttgtcgaaccagttgcccacgggatagttccaaatctctccaccttcgccggaggctggttcggcgatgttccagaagcccttgccatcggtcatcagcagttgataggcgtagctgcggctgtttctgtccttttcagcccggaagaccttgcgccaggttttgtccgactttgcgtctttggcctgggcgtaggcgggatggttgcgcgcgaaatccagttcggcctgtttgtcccgcaattcctgggctgcctcggaaaggctgtctccgggcgccagcccggctttgagcgcggccagttctttctccaaattggtcagatagggggcaaaatcctgtttgtaaaggggaacccacaaaaccgctccgctgacggggtcctttgccactttgaaattgggttcaagcagcagcctgccggtcttctggtcaaagccgacgatctcgggggtgacggtgtcctcaaaggggatggtgtggtcaaaggcgcgggaaatgccgccgatgcgcatgacggggctgtaatccgaatccagtttgcttttggcaaaaacatcgaagaaatacttgttgagcaactggccgttgagggtgaccccgctgccgttgaaacgcaaggccttggcgtcgtaagtcacatcctgccagaccacctggggatcgaaatccttctctccccgcaggcgaaactcgacgcgcaccctgaagctttggtttttggcgaggccagcgggcagcttgaactttatcacgttgtccagatagtattccgtgaccgtgcccaaggtgtttttggcagtatcctggaaggtaaagcggagcctgtctatctcgtaatgctcgtttttggagagttcgtagttcaccctcagcttgtttttccgggagctggtataggaagcctgcgttatgaaggcaaagggcttgccgaaggaaacgatgaggttgtcacctttgtcgttgaccttgtcaatcacctggaaagccggcacgatgggcagttccgcggagttttttacctgcgcgcttttgcccagggtggctgcctggaaaccgccgtagtccataaagctgagcaccggaatgtagtcctgcaggctggaaggcagattgatgccttccgcggccgcgtccacctggtggtaaaaggtctggctccaatagggaggggtgtgttcaaagagctttatggagccgttttgccaggcggcgtaaaacacgctgtcaggggcggcggcgttcttctgctgttcctgccggtaaagcgggagtaggcttttgggcatcagccagccctgccagaggccgatatcggtggttcccgtgggagggctccattcaaacttgaactgcctggtgtcctggatgtaggtggtggcaaacaccgcgctggaatccggccggttgtcaacggggataacgctgcagacccgggcggcgggagtgcgcctgcctgtctcggtcaccgccaccacgctgtaatagtaggtgtttccaggcagggggttggcatagatgctttcaaactggttaagcttgtagccggcaaagacttccttgccctcttcgccatccttttccacccggcgggagccgttgtagaaaccgcgggcggtgagattgcccagcacgctgtaatggggaagcatggtgctcacgacgttcgcgtccctgggaactgcctggtagaggggactgtccggagcctggtgtttttcctttttcaattttgagggagcagtctcaaactggaccagggggagataatcccggtcgtagaaaaagaggtattcgcccatcacaccctgtttgggatcaacttcgatattgcccagcaggaagaggctgtccggcgaatggccgcgatagacgttgtattggatgatccggtggcttttgtccagaggcttccatctcaggagtactccgctgccatcgtcgtggggcatgtcgagagcttcaaagacctccaccccggcatttgcggaacggccgcggacgcagccgcccatggccagcaggagtgatatcagaactaagaggcagaataaaaagtatcttttcattgctttatcccttggagcattgctggtgtggcatcgacgcctgaacagagtccggggggaagaccgggcttcccccctcatgatctgtgtttatttagttgaatatcgctttgatgacgtcgttgaccaggaactggatacgtccgatcagcagtgagatacgcgccataacggttagtccgaatgacgcgccaaagccaaccatcatgtaccatttgccgatatccacaaacttcccataggcgccggtgtgggctttggaaaagaagaagtagagcaacacggcgatagttccgatgaagatcagcaacaggttgatgttttcgatcggcaccatagcctggcgcatctgcaccagaatgctgttgtgcatggccaagggaacggacgcgcccacccccatcatggaaaaggcgattggatagcgcgaaagccagctgtatttgcgggaaaagcggaacaggtagaaaattccaatgatactgggtatgatcagtatccattggtgtttgaggaagatgggctggacgaagaaggggatgaaggcgcgctcgtaggtgagtaccacggagtagcccagggatatccccaccagcagttgttcggacatctgatagaacggattgtccttgtaaaggaaggagaagatgcagagggtgaagaaggctccaaccaggttgctaaataattcaaaagacattttatcctcccttacttcttttgcgctttggcccggctgatgaagtagccgatgtttccgatgatgataaagagaattatcatgatgtgggccaccgactgggcgttcatgccgatacgggccgtcttgaatttatagatggtgttgtgggtcatgcggttgaggtcgttccaggctgtgtagccaagcttcttctggtcgtcctctttcaccttggtgacgtcgatgaccacgttgttgtcctcctcggtcttgtagctgctcatcaaagcctggacttccggaggatagttggccaggaacctgtcaaactccttctgcgagaaaacagccttggtttgagtggtgatcttgagcagtttctggatggattcgtcctccagaacgtcgctgctgaaggagcggccggggactatcttgttgccttcctcgtcgtaggtgacgcccatggggtcgccgggagcgcggtaagcggcaaagacatccaccagcttctcatattcggcagcgcctttcaagcccgccagcatgccgatgaactgtccggtttgcaggtagggatattcgtccgccgccataacggctgtgacgccgacggcgatgttggtgccgaacttgggcctggcataggtgagccagtagccgcccgccacggagccggaaaactccaccaccaggttcatctcgctgtagttgttgatccctttcataatgggcaggttttccaccttgcgcccttcggcgtcggtgggcaccgccgtggcaatgtcgtcgcccatgccgatgatggttggcatgatcagggcggcggggatatagccaaagttgcagtagtccactccagacttgatgtccggatactcttctttcacggagttcacggcatagtcgatgatgggggctccggtgggcaggaaggaaagcaggaagagcttcacattacgctcgaagcagtggcggatgatcgccacttccatcggatacagttccggcatggtggaagcatcgtgccagaagctgagcaggacagcgcggtcttcccggccggcataggagtctattagctgataggtgttctccgtgggaggagaggtgatgttgtcggagttataggggatcatcaggggaatgacgatcgccagggcgaccacgatgtagatccaccggcggtcgagcttttgcagtctttcaaatagattcattttcacctccgcctttaatctccgcccagatacgagcgttcgatgcccaataggatcttgagggtggtggccacgctgcccagacccacacccagcaggattccgcgcttggacgccagattcggcacgtccaggatccattgggagatatcaggcaggtatttgctgatcttgacgcccagaggcacctgagccagcatcaccactatcgccgccaccagcagcacggtggcttccgcggaacgggcgcggaaagccttgtaggcggcggaagccatataaaaagccagcagagcgaacatcgtggcgctcatcggcatctgcatattttcgaacagccacatatagaggccgcccttctgggttccgccgatgaatccagccaaagccgtgatgatgaaaccggcgaaaaagaagaaactgtattgccatttgggagctttgcggcgaatcttggatgtgtgcatcatgcaaaggctgatcacgcccaagagcatcccgaagggagacatggcacgaatccagggcacatagaaatcgtagtagaatacatcctgcagcagtctgtgcggcacaaagacccacagcacccagacgattcctcccaggatcactatcattaatggtattgtcttcttcatttacgacctcttctatttaatagggaatagttgcattaaacctgtgacctggaagcttgccaaaatgccgcccagaatcacgaagatcagaatcaggaacttgaaatagtcctgggctttcagagtccccagcagcatcggctcgcggttgaggtaggccgaggcggcgtaaagctcttctccgatcagggtgtagtcgcaggtggtgataaagaaaggtatctgcgtgatggcgtccgagccggcgatctgcacggctcccacggtgtttccggtttccgtcatcagcagggcttccgcggcgaaatagcccaggaaaaagttggtggccatgcgttcgcggatcatgatgccgttcacgccagccacataggcaaattgcaccgaggtgagatagaatatgttgtttttatcgtagctgtccggacgccccacggcgtagtgagcctctctcactatctcctgggcgatgggcatgacaatgtagtcgtagcaggggacgatcagcttggtgtcgtattccgcggcttttctggccaccaggcccaggattcccagggaagccagggtggccacatcggaaagaccgccgttacccatacaatacagcatcgggcgtcccatctccgtggcgcggccgatggcgttgtcgatctcctgcaagcccgcgatgggacggatatagagatccttgccttgcttggccagtcgcacgaagaccaccacccccacgccgaagatgatgcaggcgacgagggtgaccagtttgttccagtcgaaccagttggataccgccaggttgtaaatatagtcgccttgggcatccttttcgggataggattcggtgaagaggccgcggccgttggtcttgacgatcatgtaggattgcaggcggctgagcggttcgcggatggaagccacgaagttcattctgccgcggttgccgcggaaagtgagggatttcttgtaatccgggtcattctcgtagatcttgatggtcttggccagactctcgtttttcgctgttaaggcttcaatctgctgttgcaaagcctgcgcctggggattggcagccccgccgggaatagctttcatttccgcttgcttggtggctatttcggccttgttgtccttgatgtcctgccgcatcttatccagttccttcgcggcttcatccttgaacacgctggtacggatggtgcgggaatccttgggatcgtcctgcttgacatatttcaggtcgatctgcgattccaccaaagtcaggttttgaaccttttcgccagccttcagcttgcgggtgtagcgctcgccgcccatataggtgtaaagcgtgccgcccttcacaaagttgaagcccagcacgggcttgcccacgttggcaacgtaagggatggtgacatccaggctattatcgtaggaagtgttctttttcaccagggtaaactgcgagccgctgaatgttttacggaacaccgtattgtgcacggaggaaacatccactccattcctgaagagttcgttggaaggcatcagcgacatcatctggttgtcccagacaaggttttgctccaacacatagttgggtaccaaacggcctttctgatatgtgatccgcccgtttttggggttgatctcgtaagggctggtgttcatcgtgatgcgcaccttgaggcccttgttcagatcatagcccttgggcagggtgaccttgatgatgttgtcctgatagaattcgttcaccctggcaaagggcttgtccgaaccgggaaccagcagttcaaagtagatattgttgaccttctgcacgtcggtcttgttaagctggtaattgatcttcagcctggtgccgccctttcctgccagaccgagcttcgcgaacaggcctttgttaccgttctcgcgtttgataatggaggtcttgctgatgaatactatcggttcgttccaaacgactgtgagcctgtcgcccttgtcgttgggtttgtcttccaccacaaactgtgctgcctggggcagcttgctgctgtccgaaagaactacacaggcttggcgggacaagggggaggggttgtttctgtaatcataaaactggatcgcgtaacggctggtggaagcccgttcccaactcaagccggctggcaattcgtcatgtttgaccgccgcgtagtttttgaacgcgcctccattgatttgaccctgggctacaggcagcgcgttggccatggcctggggcgtgcccttgatcttgcaccattgcgaatccggcatctcgggcacagccatgatctggtagaaggcgaggtcggatttgttgaccggatactcccactcaaagcgcagcgtcatgctgtcttgcaaagcggtgcaatagagattgggagaagcctcgggcgcgtcatccacgggaaatccgcacttgggttcggcaattcccagatactggttgcgctcattcaccggaaccacggtatagtaatacaaaatcttgtcttcttcgctggcaggatcgtaggtcttcagggaagcagagatgctctgctggttgattttcacgccagaatagacggtcttgtcttccgaatcggcggaaaaagctttcttcgtccggcgatagtagtctttggattccattatcgagtaaaggttgtatccttcgctcaacctggctaccaattccatatcgcgggggatgttgcgatacaggatgctgcctttcttctgcttttcgtgcttgagctttccaggcgagttgatatccacaaaatcgttgtagccgctatcgtagtaatacatgctgtccgaggcaacgccggttttcacgttcaccgccacggatgcaagatagaacagggaatcgggggtgagtcccctgtaaatgcggtattcctggattctcttttcgcggggcaggggcttccagcctattaccaggccatcgcctccatcgttgggaatatcccgcacaaagagaccctgaaccgtatccagggtttgcccgttctgatccttgcctgttgaaaccttgcatccggccagagccagagcgaggacaagcatcagtccgaaaacacgtatgtacaatttcatacgcttactcctatgctttttcaatttagtaacttatattaaattgcatcaccttacaactgcgcaatattgtcaaatccttttttccttgcctgatggaacagcggggcttgaaagccctgtctctggttcttggctcgggcaacgcataagtctgaatccctacttgaaattctgttgattgccacagagaaaccagacgccatcctcccggtaaaaataggaagcgtcgccctcggtgtcgggatccagatagctgagagtgctgtccgcggccgtgaaggtcagcttcatgctcacgatcgcccgggagccagccaggtcaatatcccgcacttccacgtcaagcaggtcgaagcgtgccatacggtcctgccacagcccgcgcagttgaaagccatacatccctttgtggtaatagtccggatgcacctgggtcatgatgccctcaatgtctttccagcagaaatcgcgggcaatgcctttcaggatatcctcgatgcggattttgtccatgtcttcgggactgctggccaaattgcaggacagcaggaacaaacagagcaacaggacgccaagctgcttcataggcggctcaaccaggccagagtctcaatgtgccaggtttggggaaacatgtcaaaggtctggatgccttccagtttgtaacgcccgctgccaagcaggatcttgaggtccctgtgcagtgtcatgggcgcgcagctcagatagaatatccgcttgatacccgtgtcgattatggcttgcaaggctgccggtttcactccggaacggggagggtccagaatgatcacatccggcgttttgcaggggctgctttgctggtctgaaagcagcgcgggcagggcgtcctcaactctggcgcagagatggtcaacattcgccaggtcgttcagttcggagttcagttccccatccagtgccgcttcccggcattcttccacgcagagcacgcgttctgcctgcgcggccaggttcagccccagcgccccgattccgctgtaggcgtcgaagaccagtcccgcgccgcccatcagtttctgcaggcgggcgatgatctgttccgccgtgccgcggttgatctgccaaaagctgcggtagtggatgcggaagcgtttgcccgccagttcgtcaaagagccagggattgccatacagcagtttgtcttccgggcccaggatcacgtttccccgttcccggttgatgttttgcacgatgccgctgatgcaggggaattccgcggtgatctgcttcacaaagaggttggaaaaaggcagcttggctcccctggtcaccaggatcagcagcaccgagctttgatctctgttgctgcggaggcctatgtggcgcaaagtgccggtgtggctggcttcagagtaggcctgcacacccgctttccggcagatttccaggcaacgctgggcgatggtgtcaaagagttggggatgcaggacgcagcgctgatgggggacgatcctgtgcgaccagcgcgcgtagatgccataatagaggccatcggcgccggaacccacgggcagaaaggctttgttgcggtagtttacgggatttggggaagcgggcatggcgccgatcttcaaatccggggccaggggctgcagcaattccctcaccagttcggtcttggctgccaactgcgccgggtagtccagcatcagccaatcgcagcctccgcaggggtcgtccaggtcaaaggaagcgcagtccgcttcccgcactcccttgccccgctccagccaacgcaggggcctggcaaaggcggtgtccttgcgttctttgaccagctccacttccgccaggtcgccgaccgccatccgctgggcaaagatcgccttgccctcgtgaaagcccaggccaaaaccgcccagagccagcttttctatccggaggatgaatctcttgttcacaccatcatcttacgcagggcttcaatccgcttctccaccggcggatgcgtcgcgaacagggagagggggctgaagttgttgatcttggcaatggcataggcgtctttgcggcgcgaaggcacgtaagctttgctgatcttttccagggcggtgatcatgtggccgggggtggtcagggcggctgagccggcgtccgccttgtattcccggtggcgcgaatgggctgccagcacgatgttggcaaggatcatcagcacattctggatgatcatcgcgatggcggcctggctggcggaatgcatcatcccggacgaagccccgtcatcatcgtttctgcctcttctgccgctcaggagggcggcgatgatattggccagaaagagcacaaaggtgttcatggtgcccatcagcagggtggtggtgaccatgtcgccttccgtgatatgcgtcatctcgtgccccgccacggcagccagttcctcctcatccaggttttgcatgatcccgctggaaaaggcgatcagcgatctgtttttggacgcgccggtggcaaaggcgttgttgtccgccgcctggtagatgccaaactccggcatcctgatgcctttgtgggcggccattttctctatcgtatcaaagagatagagctctttgccgcgggctgtctcccgggtgagcggtgtgatcctgtaggatgccttcgccatcgctttgctggaaagcagagaaatgaccgctccggcaaagccgaatatggcgcagtaaaccagcaacccgatccagtccgagcttttcacgcccacgatctgcatgataaaacccaagacagccaacaccaggatgttgactgtcaaaaacagcccccaacgtttaataatagtccacatggattatataatcctccttacaggtttatcggattcaggggcagccacgggaatgatctcagcccgtgccacccttggggtcacactaattgatagtgcgataacaaggcaagtaaaatttttggtgcccagagattagaaaggcttcatgcaaatatcggggcttcctttgaggtggaaaggtggaaaggagaccttcgtggtgaggtggtgtcgtggtgattgtaaaaaagagatagaacgcggatgacaggatcgacaggatcagcaggatatttgaaggtgaaatagcgaaaagaaggccacgaaacaagtccaccaagctatatacagtgtcatcccgggcaagccggggtcctcgacggatcggttacgatccgttggggtgggatagcttgacccgggatccagtcttttaataatgtccacgaattacacgaattatcacgaattaaaagaacaggataaggacagcgtccagcttcaaaaaaccacacaagacccaaaaaccgcgtcatcacggcctgccggggtcctcgccaaagcgcgtagcggtttggtggggtgtatagagccgggatccggtgcccaggggtggcaaagtctgtttgccacagagaccgaaggtctctccccaacaggcaactccgttgcctctgccgaacagacttcggcagcccacgaaacaaaccccaccaggctatatactgtgtcatcccgggcaagcttgcttgacccgggatccagtgctcagggggtggcaaagtccgtttgccacagagaccggaggtctctcccaaaaaggcaactccgttgcctctgccgaacagacttcggcagcccacgaaacaaaccccaacagactacataccgcgtcatcatgggcaagcttgcttgacccaggatccagtctttttatacaatactccccatttccggccagtttggccgctttttggccggattactttgtagttcggtaaactgtggatgggcccctaccctcacgggatacaaggccattctgagttaaagactccaagtatcttctaactgaacgaatgggaagttgcattgaatctgctatctgggttgatgataacacaccgtgcttctctattgtttgatatacagaccttttgagggaggaatatgcatcgggtctttcaaaccgatcccgagagatcaacttgagccttaataacagatcattctggactgtcatacatagtggcttcaagcgatgagctatgcgaggtatttatttggggaagtgctcgtgcatgatcttgatatcagcctggcttgcataattcacgataaagacctttacatttgcttgtgattcatacttaaccagcttgcctccggctattatttgggcgtttttctcttgcgatgcatattttacaaaatagaccttgtaatccgctttgcttgcgtatttcacgataaacactttagcctgacttgacattataacctccttgatttacatgatattgctttgcattcagacgtccaggattgttgcttttatcctgttggtcaatttctcgaccaaatcttcagcgttttcccagataatatgtttgtactgtcttgtgtcaaaaatatcagatatttgagttccttctttacaacaccagatcaccggttttctttggcccatcgcataaccggcttcaaagtggacgttgatattggggattgtggtatccgctataaggaaatcggatttgttaatctctgcaataatcttatcatcaattttgtcgttatactcttctttgtcaacacggtatggtatcagatcaagtgaaccaactgccttccgtattccattctcatatacgctatccagttctgtatctccaaatttcatagccacaaagacctgttttgttttcacactacccgagacaatctggctgattcgctcccagccttttagctctaatctgagagtatatgtcttagcgagaaaactatcattagaatcaacataccctatgttttttgcgaatctgactaagtaatacagttcttgtttgtcatgcataaacagcaagggacagtcagtttccgcaatggctttcacttgatcgactcgagtgatatgcttatgtaaatataacaataggatatctatcaactcaagtggaccggagggaaatctcacgctttgctttatcttgtcgatgtcttggtggtctgttattttcgaaataattttcgattcttcgtaaagatgcctgagcgcaatacaaagctccttatctctggctggtttgactcctggtttattaatattaaaatgacttaccatcctaaagccattgatctcaaattcaccacaataggcacagcggaaatggaaattattattgtaatctgtccctatgggtgattcactcagtgggttgcggcatatcggacattctgtaacaacgcagttcatgtgtgcatacctccttggtactatcgttacgttatgaatataaactgaaactgagcagggctaatctctgttattgaaaacctgggttggcgcaggaacagggaacccttgaaaagatcactttctttgaggacagaaagaacaacgggttccgccaaggttttgatgggcttgaaatccacgcacagacgttgcgtttcacaagcggtaaaatcctgaaaaggttcgcgggcaacttccaagactcccatgcaggaacgcttatgagggtcataatagatggccttatcatcgggaagcatagacgcaatcagtttttgagcgtatctacccttgatgccgtagaggctataactgtcccggaagagaacatcttcccagttatggtgcttatagggattcctgatcatccaataacgcattgttaaccaaacggggataacgtcgggcataccattgttccacaagctcaatatcttgatcacacagaccgtatagttcatagatgattttatctatttgcctttgttcattacttgaataatcgtagtatctatcagatatctgttttgttatgatcttacggactaatgagatgattttatcattgtttccacagataattggtatttctttgattgcatctatttctgcagctacaccatggtatatcaatgccttgaatataaatttacataattttgaacaaaggatagacaaaatgttgtctatttggagataaggggttgtaacattaattaatgatcctctaatatcataaacagaactactattgtatctaaatgttggggcatattgacctacaatcgaaaatgttattccgttactaaaatatgtgtcactgttctgaaaccttgaacagatagcatttgatcctttaccatccctttctctgatagtcagagttttcattcgagtgacagcccaagaactccaatctatgaagaaatcagttttaacatagtagtttggcagccaaccggattctgtataagaagcgccacctttgtcataggggacaatgtattttccaccgaaccaacggtcagggtcaaatggttgctcggagcgtgattgatgaaagccaaggttgattatcttgtggcggatattgtcattttgtgatattttttccagttctgcgtcggaaacgacatatttcaggtatggctcaatgcttctgtatgtgggtccagattcgggggtctggaaaagatacgatttattgtcgccagtggcaagtccttgagttaccgacgcaatatcagagagtttgacaagcgtgaccttcttaccattgatctctacagttctttcagctttattcttagggttccgatcaacgccaacatcatgcattaaactgaacaacttaggaggggcgacgaagaaaggcagcaaactgcatttatggataatgttttggtgataaatgaacacggcatggacattgtcggagtattcaactgctttttccgcgtctgaaatatcatacaggatttccaggaacttatccagatacttgtggatgctaatgttggtcatatccaccataaggcattgatgggaatctggtatgctataccctggctccgctttctggcacaggattaccacggtgttgaccacttgcttgaaggtgtccgggtgcatgcggattattttgtggatatagttgtcgagcaattgcctgcgcaattttttgtgggacttgatcgtcataaaagtgtcggaaacgatgtaagacaaaaccccatgcggtttcagcggagtgggaaaatcgttgaaattcatgaagcgggcgatgaaagcaccataagggtcatttgaacctaaaccaaggctacttctaacctccggggagattttatcgcctccatagggtggattaccgattacgatatcgaatcctccttccttcatcaccctgggaaagaaacattcgggatggaagaagggacaggcgatattgccatacataaaccatcgtttccaaaacactttgagcctgtctttgcttggatttttaagaccccacttgaagctttggtataagttgctaagttcagtggaaatacgttcagcgagctgttctttttctgccttggtatgttccgcctgatagtattcctcaatcgctcttgataagtcattagatactatttcttcgaatatatcagtttcaatatcgttgagagaatctgcgcagatcaggttggtctctaggttgggcagaggcatcactccaatgtctttgctacagtctgtattttggtcaaccaccagagatatgaagaatctcagttttgcgatatgtactgccaaaggttggatatccactccaaagattgagtcacgcaggatgccaatcttgcgggagtagtcgtcgtagtgttccttcaggtgtttgccaaaatcgtcgcgatattttccttccagcggttccagttttaggtgtaaccatttagagttatcgggatcgaccagattgagtatccgtgtgatcttgtgaagcatgcccatgggaaatgaaccgctgccgcaggctgggtcgaggatgcggattttatccagggcgtcaaccacaaaatcgtcaaaacgcttctcattggcattgacaacatcatggtaaactaggaatctgatgttgtctccatactccattagccccttttctttcgccttggactccagatacaacaccaacgagtcattgaccatgtaatcaatgacctccctgggagtgtaatacgcgccgctgcttctgcgagcgtttctggaaatgtcggggtccgggtcgagttcagccagaaggttttcgaagaccatacctaggagttccggatcaagcgcgacatcttcttccaggggtgtgttttcctcgatggtaaacttgaacttgcccagaatcacattcaacccgggaacatcatctgatctcctgtttccaggagcctgccagccgtagaagatcttgttgggtatgctgatatccgagtctgctatgttgttgttaagtatgcagtggtcttctaaaaactcatcgtcacggttgaacactcctccattcaaaaatggtattctttcgaaaacagtcaaatccagtgcaggatccaggtatttttcaattttgcctttatccagtttacgacttttcttaggctcgttcaggcaatcgaagaacactgtctgcagaatgccacgataatagctattgctttcgggattatcgttatcttttactatcggatagggaacatcggtgtctgagaacagctccagaatgctgctgtcaataaggcctttttcttttaggaaccaacagaacatcaaccggcaaagcaatttgaccagaaagtgcttcttggtctcgttttgctcttcttcagacagttgacactgaaacttgagcctgataatagaaagggaagtgcgataccaagctatgatttgattatagaattccctgtttagttcccggatagagagttgtttctgccaagctttatgcagttggttgatggatgaaacatccaagttcccaagacaaaacttctcaagaatgtcaatgtgccccctgtgcggagtggcgtatctgatatccttaaccaagctaactttatccaagacatctctcgtttcgtcgcgtttgttcagccttcggttgataacggatgtagtcagcagttcgccatatttgattagcagcagcacaggcatcgcgaagcagcggttgatttccctggttaatgcaaccaactcttttcttgtggcatgaagtcctttcagttcaattgatgcgaagatatacgacttaacctcattggagtcaaccgagttacttttaaaccccggtatagtcgtttgaacggagaaggagccagcttctctgatctcatcatttgtgagttgaaagtgcagattgatctttgtccagcgctctttcaaggcttgaacaggcctaagttgatggcgggtagaaaatgcttccgtaaattctgaataggtataggatacttcttcgaatctacgctgggattcatagcccaggactttccaaaaatcgtaggcggcatccacaaaaggacgggtttgaaagttattcaaagcctcctggatggaaagtttcatgtctgtctttgcgttcataggtcttctctctggtgcttatttgattatcagccaggtaatcagttcaaattcaccgccggggtcatgttgtttcaggggagggagcacagcatcgccatgggtttggagttgatcctgctttttctttgcaagggaggctttgatgctttttaaggctttctggatgagctcattataggctctcatgtcttcgcccgatttggtttcctggtcgaactggtcgcaaaggctttcgatgggacttcgccgtccgctggccaggatccggtacatatccaggatctgcttggcattaaagaaacggaaacggacggtgccgtcggtgcggatgtagatcataaaatagggatggagagggttgagcttttcgtattccctgccagattcgttgtggcggaggcagaagatcacaccgggccggatgatttccctgtgttcctggctgactttgaccgagtggtcccaaagttcgtggtcgggagagggcaccacggtgtacaggccaagaggggcttcgcgcagctctttttcgtttgctttgatatagttaagcagatcaacccggaaatcatccagagtgaaatcggtcaggctgatgccgtcttccatgtcttcgatgtcgataacctcttcctttagccttttcaactgcttggcgcggaacttcatttcgttggaaagcagttcttcaaattcctcttcggcgaagagattgtcctcgcctgtggcggtaatatccaccagagccatcctcgcctccactctcaacttgagggagatgtatttgtccaggtctttggtaggccagaagttcagcatctggattttggcattggggctgttgatgcgatcgatacgcccaaagcgctggattatcctcaccggattccagtggatgtcgtagttgaccacatagtcgcaatcctggaggttttgcccttccgagatgcaatccgtggcgatgatgatgtcaatctcttcatcctggggcaggatgggcatcttgtggcgctgcttggcaaaaggggcaaagcaggtgaggatggcgttgaagtcgttctggaaacctttgggcagcttgatggttgttttattatgagaacttccggtgaccagggcaacattgagaccaagctctttgtgaatgaaatccttgagctgctcatagaggtaatcggctgtgtcggcaaaggcggtgaagatcaatatctttttgttgtccttgtttaccggatgtttcagtttgttggtaatgatctgcttcagttcctcaagcttggcatccttgtccggagttaccaggctcgccgtgttgtaaagcgagatcaactggtctttgtccttgctcagggcttccttccatttctccagatcgaggtgttttagttcaaacttcagtttcttgccaactgtgaaatcatcgctgttatcctgttcttccggtgaaaccgcgtcctcatcgccaaaggagtaaatatccccatcttgagtttggccggattcaaatttggcgatcttgtcctgcaggctgttgatcttttccaaggcccgcccgagggtcagggtataggaatgaacgctgctttccaggcgcttgaggaagtttatcttcatcatctcaaccagaaaatcctcgcgttgggcttgggaaaactccttcactttctctgttggctcataaagttccttaaactcctccagaacgaagctggagggtttgaagagggaaagcttgtaagcctggatgtcttcattcactttgtcgtaggaacaaaaatccccttccaggtcgatattcgtgctcaccgagatcggcgttagccgcttgggaaagctctttttatcaatatccttgtagtaggagacaatatgcttgcggctgcgggctatggtaagttcgtcaaggagtttgaagagcgagctgtccagggcgctgaagagttgcgagcttttcttttgtcccgctttgttgctcttcacccagtttgtgaattggctctgggcttgtttcatggtgtaggagacactttctatacccaggctttcgtagaaggcgtcgtccctgccttcggtgatatagtgtatctggttgcgcaggtctttcaggttggtgttgaccggggtagcggagagcatcagcaccttggttttcaccccctctttgattaccttgtgcaaaagaaatccagcccggttatagctcaactcgtcgttttcgtcgatcttttcccgcggatttccccttagattgtgcgactcatctatcacgaccagatcccaggcgccccagttgaaattcgccaggtcgatggaattggcatccgaagttccccgcgctctgcccaggtcggtgtggtacataaccgtgtaggaatagcggtctctggtaaaggggctgagtttgttggcggccatggattggtaaacggtccaattatcttttaactttttggggcagagtaccagaaccctgtattgcagcctctcatagtattggatgattgccagggcttcaaaggtttttcccaggccgacactatcggcaataatacagccgttgtggcgttccaacttgttgatcgcccctttcacaccgtctttttggaagctgtagagcatgttccagatctcagtgtcgaaaaagccggtcttttcggttaacagccccttgtcagcttgctctcccaggaacttctcaaagaggtgatagagggttttataatagataaactctggggaattatgcacatagagttttgccaggtattttagaacttcgtctttgacatcctcaaccaaggatttatcctcgttccacagttcgtcaaaccaagccaggagatctgccctgtcgcgatcgtcggcaacctcgatattgagctcgatattgggtttgttcccgtatccgagaccattaactgtgaagttcgagctgccaagcagggctttctcaaccccgttttcatttgtgatgtgatagagtttgccgtggaggaaatttggcttgaccatggattttatctccaccttctccctgatccattccgcgcagtctcgggctgttttactctgcaccagcctgtttgccagggagatcaccagcttgttgtcctctatctcgaactgcttcttgtcggtcttgttgggatccatggaagccaggaatctgggctcgccaaagagaaagcgcaggtgatcgatcttgtccagcctgttcttcaactgctgataggcatagattgtaaaataggcggaaacaaaggccaacttgctgttgggagtaacgtttagggaaatgaagtcgcccactgtgccatatttacggttatcccgaatgcctgaattcttgttcataagatttatcctaatctccaaaataaagaaaaacctgttggcgtttatatgaagttccagagacgatttcatctataactcaaaacgcaaccccagtttgtttcgtctatttcagcaaggaaaatctgtcaacctaaaaaagcccggagttgagagctttactacaaacaataatcttaccatagatgaggcaggaaaaaactgaacccatatctcccgcaatgcgttagagaggcgttcccctcgtatttgggcaaacggactttgccattcccctcgggctgccgaagtccgttcggcagaggcaacggagttgcctgtttggaagagacctccggtctctgtggcaaacggactttgccacccctggacactggatcccgggtcgctgcccgggatgacgcggtttttgggtcttgtgtggttttttgaagctggacgcttgtccttgtatactgttttatttcgtgataattcgtgtaattcgtggatgtttcttttaaaagactggatcccgggtcaagctatcctaccccaacggatcgtaaccgatccgtcgagggccccgacatgccgggatgacgcggtttttgggtcttgtgtggttttttgaagccggacgcttgtccttgtattctgttttaattcgtgataattcgtgtaattcgtggatgtttcttttaaaagactggatcacgggtcggagcccgtgatgacacggttttttagtctggggggtggtctttttgggggtcggttgggacttgtatcgagagaacctttccaccattccaccattccacctttccacctcaaaaacacctttccaccttttcactatgataaaaataaaacgcaaacaatatagtattacattcaccaaaaacaccagcaatattccgcataatccttcatagcgccctcccttgctgctcctgcgtttgctgccatcatccttaggtcatccctcaccaagttaaggatgacctacggaaaatatagacttagcccaccctggcaaatgagggcaaagaggtgatcaatctacgctcattaaatgtataaaggttatccatagcagaggcggagcgcaaatgatcgcactggagatacacgattcgcgcagggcgcggattgccgggacaagaaaaacccccgggcagtgccgggggttgcaatctcagacagggtctgatcagtttactttgaaggttgtgtcgcctttttcaaagaaggcgatgatctgtttggcagccgccactccggcgttgacgttggcttccccggtctgggcgcccatcttttttggggtggcatagtagcggtcggcatagagttccatcagtttggcgccgcattccggttccacgtcgctcacatagcggaatttcttcttttcctcaaaggccttgagcagggcttcctcgtcaatcacctctttgcgggcggtgttgaccaggatgcagtcgggtttcaccaggctgagcaggttccagttgatggatttcttggtctcggcggtggcggggatgtgcagggagatgtagtctccggtgctgaagatgtcttccaccttatccaggtgtttgacgccgtctttggccatgatgtccgcgctgatgtagggatcgtaggcatagacgtccatgccaatgcctttggccattttggcgagaaagcggggcacatttccgaagccatggagcaccagcttcttgccagccagctcggagccgcttttgccgttgaacttgccgcgcgccatgtagatcatcatggccagcgccagctcggcgacggcgttggagttttggccgggggtgttcatggccaccacaccgtgggcggtggcagcggcgaggtcgatgttgtcatagcctgctccggcgcgcaccacgatcttgagttgtttggcggcgtcgaagacggcggcatccactttgtcgctgcggatgatgagggcttcggcatctgccacggcggcatggaagtctttcacgtcggtgtagctttccagccagctatggggatagccggccttgtccagttcagccttgatcttctgcacggcttccgcggcgaagggcttctctgtggcgatcagtacttttggcatattagcctccctatgtatattttatttctggtttcaagactttattttagtgcgttttatgtcaatgcaaatctctgtcatttgagcagcagcatacgccgtgactgcacctttccacccgcttgcaggcggtagagatagactccgctggagaccgggtcgccggaggcgtcgaggccatcccaggtgacggtgtgtgagccgcgggaacgatggccgtcgctcaggacgcgcaccaactggcctttgaggttgtaaattgcgagccggacggagccttcggatgccagttggaaacggatgctggtgctgggattaaagggattgggaaagttttgcagcagggcggtgcgcagggcgggagcttcttccgcgggattggagacgttaccggtggagacgtagctgccctggcgggtgagtgagccgcggtaaacggtccagggccggttgtccttttccgcgcggcgcaggttcagcaccagcactccggtggaatagccgctcaccagcttgagccagccgtcgccgtccagatcgcatagcgtggagggcgtgcagccgttgaagctggtctggaatggaaatccgtccaatacgctgccgtcgtggttgaagccataaaccgagttcacatagctggaaacgaggatttccaggttgggatcgtcgtcgaggtcagcgatgatgggcggggtctgcagcacggcgccggtctgcaccgggaagccgggaaggtctattccgctctggctgaccgcgtagagtgagccattggcggtgccgaacacgatatccagcgcgccgtcggcattgatgtccgccagggcggggctgccgcccatcgcggagctgatcggcttgctgaagaccaggctgcctgcgggcgttgccagatgcaggtggctggaggtgccgaaggctatcctgcggttggcgaggatggtgggcgcgccgttgattgcgccggagacctggagggggaaacccgccaggggagtgccgtcggatttgatcacgtgcagcttgccgttggagcagccgacgatgatctcattgccgccgtcgccgtcgatgtccgccacagccagttcgctgtggaaggcggagccaaggtcaagcgggaagcccggcagcaggtttccggaggaatccaggacgtggatcttgccatccagggagtgcgccaccacttccatcccgccctgccagtcgatctgggcgatcacgggggtgaagaggaactggctgccgccatcgtaatcgaaaagcacttcatcgcctgccagtgccagcactttaccggtgcggctggtgagtaccagagccggttcctggccgtcaatcaactggccataggcggcgctgcgcatcacatcctgctggagaggcgcgggaatggagccggtctgctgccctgcgttatccagcagatggctgttgccgaaattatcggtgtaaagtatgtcgaggctgccgtcgccgtcaaaatcgaagacgatcggggcggatttgctgcccacggggcaatcccagggaaagctgccgtcaatgagggtgatttcatattcgagctggaatctgcgggttccagtgctcaagttggtgacgggatgcagcgattgcagctccagggtgatctgatagctgccataatcgatgccggacggaagttgcacacggaaatagaggccgggatcggcggtctggcctggcaacaactgtggtatcaccagcgggtcgctcaaaagctgcgctccggctggcaggccgctgagggtggcggtcacgttgtgggccgcggcccaattctgatggttgctgatcacggggtggatgcggatgatctcgccgggattgatggtgccgtcgccgtcgccctccacatcgtcgatagtgtagctttccaggctgagcaggggcagggcggggtcaggcagtttgacctcgatggaaggatcgccaaatagcaccatctgatagtagcaccagcgcatcacgtcatagctgatggcggcattgaggttctgctcgcgggaatagctgagcgcggagccaaactgggtgttggccgtttggtagagaccgatgaagtagtcgcggtcatagaactgggaggcgccattggtgttgccgggggaataccagccatagcgggtgtttccgaggaaggcaaagacgccgcccgaggctgtgagcatgtgttccgcgatgctctcgccgtcgccgctggtggcctggtcgaaagcggcgggatagcagccctgggtgtaaagaaagccatattcggtgttctggagctgctggatgctgccgttgctctgtcccatcaggaaggtttggttggcgtgtcccatgtggttcatcacgtggacgccctcgttgatggcgttccagacgccctgctcgctgtaggtgccgtcgcgctgatacatggtgcgcaggtggtacagttccgggacgctggtggccacttcgtccttgtaatctccgccccaggtgagggggttgttgttcaggttttctccgaacatgatggcggtgttgttgctgaacgtggaattgctggtgtagtattggattttgcggatgatgttttcaaactcgggttgggtctcggcgggaaagcgtccgatatgcacttccggcagcatgtccacctggtcctgcggttcgccccagatgtcgtttccattggcgttccagtctccatccagattgctgaaatagaggtcggtaggcattctgagatcaaccgtgtcgcccacctggccgtagcagccgcgcaggggcacgatctcgtcatcgccgcccaggatcacatattgcagaggctggggggtgcttgcccaggcttgataggcgtcgctgatgaaggcgcgcaccttggcggcgttgtcggttccgggatagctggcatagatatccgcggtctggaatacgccggtgctgatgtcgttgccgtcacgccagttggcatagctttgcagccaggaggaggcggtggagttggtaatgatgaccatttggcgcggagtggaaaggtcaatcaggcggctttggggagcgtggttccgatagcgggaagcctgctggtagctggccagggcctgggggttgagggcaaatccttccacagagcgggcagccagggcgggggcgtagaagttggcctgttgggtggccagggcatcatcccatccggtttctatctcgatgctgaattcggaagccgcgtgaatctggcgggaaaccggattgtatttccaggggaagaggtccagcacggcatattggaggccgcgctgcaactgggtgcccagataacggtgattggcggccgggaacagcgcgtcgctctgccagatcgcgggatcgggctgagtagcgtccggacggggctgcgaagtgggctgctgctggcgcgcgtagtccagatacacgccatcgcgctgcaacaggtaaggggagctttgcacgctcacgttgagcaccttttccccaaaggggatcagcacccgcacggggtaatagttgagcgcgggaacgccgggctccagcaggggtgccgtgggctggccgcgcaggctgccatcccaggcggaggggtcaacgcttacattgagggtgagcgccaggctgattccgcagagcagcgtcaggccgatcagggcggtaagttttttcataatctgtattccatcttggtttatcgaaatgtagtcgaaaaattcttatgtgagaaatggcagaatcagtcaagtagttttttgagggcaaagaaaacagacgtctgggctgcgtttgtgatctgtgaatacctgcggaagacaagggatatgaaccaatccttagaacaatgctgccctagcaatttcagctcgcaatgggcgcctcacgctgtatatccggcgccttataaattttaaagaaagaagttgcgaatatggcggacttgtttaaactatcattctgtaagctgtttgttttgcgtctttatgtaagggcagcgcctgcccgcgggacttgttatcttttccaatctatttgaaaaggagtctttttcatgaaacacacggctatgctactactgctgctcgccaccagcctggcttttgccaaccctgtctggactgaggacgtcgtggtgcgggaagcgcaggatctgagttacactggctgcacgcagcaagcagatgacggcagcctgatcacgctctggacgcagatactggatggagaaaactgcctgatggcaaaccggatcagcgcgctgggcgaggaggtgtgggattccccactgcgtatagcgggttgcggcctgggcatcggcggagagcagatgaagagacctccggtctctgtggcaaacagactttcccacccctgggcaccggatcccgggtcaagcacgcttgcccatgatgacacggtatatagtctggtagggtctgtttcggggtctggtggacttgtatccaccattccaccttttcaccttttcacaaaatacttagaataatctccataatccttcatagcgccctcccttgctgctactgcgtttggtgccatcatccttaggtcatccctcaccgggttaaggatgaccccaggaagacagagacttagctgtctcgcgcgcgcgagagcggactgacaccagtcttagttttttgcgcccttgttttagaattgatttatccactcagtgttagagatagcctgattttctgccagaaaaggaataagctcaagtccctcccggcatttcctccgtgccagatcgtaaaatccgtttagattattcaatatcaagccttaaaaggagtatccctatgctaacagatcaagagatcgcgcgcagcgtaaccttgaaacccatagatgagatcgccgcccagattgggctaagcccccaggaactggaacattacggcgagcataaagccaagctcagctattccgcgctggagcgcatcaaagacaaccccagaggcaagctgatcctggtctccgccatcacgccgacccccgccggggaaggcaagaccacggtcgccatcggcctttcccaagccctcaaccagatcggcaaaaagagcatcgtcgccatccgcgaaccctctttgggccccgtgtttggcatcaagggcggagctgccggcggaggctggagccaggtgttgccgatggaggacatcaacctccacttcacaggcgacttccatgccgtcaccgccgccaacaacaccctcgcggccctggtggacaaccatgtttactttgacaactcgctaaatatcgatccccgccgcatgacctggaaacgggtgctggacgtgaacgaccgcatgctgcgcaagatcgtcatcggcctcggcggcagcaagcagggcttcccccgcgaagacggtttcgacatcacccccgccagcgagatcatggccatcctctgcctggcaaacaacatggacgagctcaaggagcgcatcggcaacattaccgtgggcttcaccttcgacggagaaccggtctatgtgaggcaactgggctatgaaggcgccatcgccgccctgctcaaggacgccctcaaaccaaacatcgtgcagaccaccgaaaacacagccgccttcgtgcacggcggcccctttgccaacatcgcccagggcgccaacagcatccttgccaccaagagcgcgctgcggctgtcggaatacactgtcaccgaggcgggcttcggtttcgacctgggcgcggaaaagtttttcgatatcgtctgcaaatatggcgggctctgcaccgacgccgtggtcttggtggcaaccgtccgcgcgctcaaggtgcatggaggggtcaagctcaaagacctcgccacccccaatcccgcggcggtggaagctggcctggccaatctgggcaaacatctggaaaatatcgacaagttcggcatgaagtccattgtcgccatcaaccgcttcgcaaccgacaccgatgaggagatcagattgatccgcgactatgccagctcccgcggattcgattcatctgtggtggaataccacgcccggggcggaaaaggcgggctggacctcgcccaacaggtggtggatatggtggacagggaaatctgccactaccacgggctttacgactgggacagcccggtggaagacaagattcacactatcgcccacgaaatctacggagcggagaaggtggattactccgcggacgccaaagcggacttgaagaggatcgccaaattcggcttcgacaagctgcccatctgcatcgccaagacccagaagtcgctttccgacaatcccgacctcatcggacgccccaaggacttcctggtcaccgtccgcaagatagtcatctcgagcggagcgggcttcctggtgcccatcaccggagagatcatgcgcatgcccggcctgcccagacacccctccgccgaaaccatctccgtggaagacgatggcgacatcagcggcctgttctgattaaccctaaagaccttgtgccgggacactaaaaacttaggttccggctttttttgcccttatcgccaaggcgcggatcgacagggtctttgaaggtggaaaggattatagaacgcggataacaggatcaacaggatatttaaggtgaaacagcgaaaagaaggccacgaaacaagcgtcaccaagctacattccgtgtcatcccgggcaagccggggtcctcgacggatcggttacgatccggtggggtgaaatagcttgacccgggatccagtgcccaggggtggcaaagtctgtttgccacagagaccggaggtctcttccaaacaggcaactccgttgcctctgccgaacagacttcggcagcccaatccgcgccttttatccgcgtatatctgcgtgaaccgtttgacccgggatccagtcttttgaggctccaaacagccatcctgtctttgaaaaatgccttccaaaaaataaagattcaacctgccgatatttttcttgacaaatctactaaaacccatccagtatatttccaaatgggaaacccatcatagggaggaaaaaatgaaagccttgcgaaactcatttttgtgtcttatcctgctctgcggagcgatggttttgggagcgcaggcgccccagtggcagtgggcagtccgcgcggggggaactgactatgaagaaagcatatccatagcgaccgacagccagggcaaccagtacatcactggtatgtttgatgaaatcgctacattcggcagccataccctgacgaccagcggtggcggtgatatctttgttgccaagctggatgcctccggtaattggctctgggcggtcagggcaggaggaacagagaatgactggggattgttcatcaccgtggatggagccgacaacgcttatgtgaccgggtatttccagaacacagctaccttcggtaaccataccctgacgacaaatggagagcatgatatctttgccgccaagctggatccctccggcaactggctttgggcggtcaaagcagggggtattgactgggatataggaggtggcatcgacgtggatgaagcgggtaacgtttatgtgacaggatacttttgctacaccgccactttcggcagccataccctgacagcaagcggaggcgctgatatttttgccgccaagcttgacccctcaggcaactggctctgggcggtaaaggcaggagggtcaggcaatgactttggaattagaattgccttggatggaacgggtaacgcttatgtgaccggattatttcaaggcacagtctctttcggcagccataccctgacggcaaacggagaatcggatatattcattgccaagcttgacccgtcaggtaactggttatgggctgtaatggggggagggaataacgatataaatgtatttggcttcgttgtggatggctcgggtaacgcctgggtgaacggttctttttatgacaccgccactttcggcagccataccctgacggcaaacggagagaaggacatcgttgttgccaggcttgaccctgccggcaactggctttgggcggtcaaagcgggaggaatagactatgataatggctatggcatcgctctggatagtgcgggtaacgcttatgcgtgcggttctttttgcgaaaccgccacttttggcagccatcccttgtctgcagtcggatggatagatatctttgttgccaaacttgactcctccggtaactggctctgggcgatcaatgtgggaggaaatgaatatataaataacgctggatctggtatcgctgtggatggcgcgggtaacgcctgtgtgaccggatatttttacgaaaccgctactttcggcatccataccctgactgcaagtggagaatctgatatctttgtcgccaagttgggaagcggaacccccgtggaagatgaactcgctccgcaagcggttgccaggctgcataacgcctatcccaatcccctaaacagagatggaagcgcgctgatcaaagctgacattccggaacgctcctccgctacactgagcatctttaacctgcgcggacagatcgtagcccgccacaagctgggttccggttcgcagcagatatccttcagcggggaagggcttcccgcgggggtctatctctacagcctgcaatgcggggactaccgggaaaccaggaagctggtgcttttgaagtaagataaaatggtggaatggaaccgtccgcgttctgtttccatttctccttccggctttagcatcataaatccgtaaatcggttaaatccgtcaatccgtataagattggcatgccaggcatcatacggatgaaacggattacacggattaacggataatactgtttagcttgcattattacaattgaatacaattatactattttacctttccacggccatttcaaaagactggatcacgggtcaagcggttcacgcagatcagcgcggataattgaagggctgccgaagtctgttcggcagaggcaacggagttgcctgtttggaagagacctccggtctctgtggcaaacagactttgccaccccccctgcgactggatcccgggtcaagcatacgcttgcccgggatgacacagtatatagcttgatggacttgtttcgggggaacctttccaccattccacctttccacctaaaaaacccctttccacggcgatagccaagatcgccatcggtaaaggcttggggggcagagcgaggttttttgttgacaaaaaagggctgcaatttgctattgcatcctgtcctgggtgattagctcagcttggttagagcgctacgttgacatcgtagaggtcactggttcgagtccagtatcacccaccaccctgattgttgggtgattagctcagctggttagagcgctacgttcacatcgtagaggtcactggttcgaatccagtatcacccaccactttcccccgcaaagcaacccggtcagagaaatttcttgacagaaagcttgcggagatatctactgttcatgttaatcacgagcaaacgaaagaagaggcaaaatccaacattatatacggaacacaggcatttacgcggtatgctgctgttgtgaataatatattttttcttacaccgagatttggagcatagctaatgatcaaagaaatgggacgtctgaatctggacgactacaaaataatggacgcccaggtggaaaagattttcaaaagcctggacaagggcaaacgggaacaggccatcaaggaaattgaggaaatggccaacacggcgaactatttcgtgcgcgaagaaatgggcaagaggctggccacctaccagggcaaggggcccttggacgagatttgcgccgaaatgctggatgatttcatctacggtatccgcgccacggcgctgttctatttctattacaagaggcaggacgacccgcgggtgatcgtgaagaccctggaaaagaccgtggagaccgttccctgggaaagcgagaccatctgtttcgagctatggaagaactatcccgaggtcatgaaggaagagatgccccattgggcgatgtctcccaacgaaaacaagcgttccatgtccatgcacggcatggaaaacatcgcggataaaaacccgcaatacatcctcaccttcatcggcaggctgctggacgacgaaagcgaagaagtgcaaaaaaagatcggccacatcctcacccaggtgggacggcaacgcccgctgcagacctatgccaatatccggcgctggctggtgggggccagtgaagaacgggtggacgccatctggcagaccctgcgcaaattgggcagcatcttcagccaaaagaaccagcgcgacaagggattcgactttatgaacgtcaccaagcgggtgatccaggaatggaaaaacgatcccgaccccaacgtggcgcagatgagcaaccgcctgggacaactgctgcgtaaacaatgatccacgtaatcctggtggaacccatctatgagggcaatgtgggcgccgtcgcccgcatcatgaacaactttggtttcaccagcctgcgcatcgtgggcagcgtgcccaaaaagaacgacttttacctggccatgcactccgaacatatcctggaggaggcgcaggtctttgacagcctcaaagatgccagcgccgacctggacaggctgatcgccttttcccgccgcgtgggacgctataaaccggtggatctgaacccgccccagatggcggactactgcgccaaaatccccaaactggagattggtctggtgtttggccgcgaaacattcggcctcaccgacgaagaggccgacctctgccccctgcgttgccacatccccgccaatcctgcctttccctccatcaacctcgcccaggcggtcaccatcgccctgtggcagatctacagcctccccctgcagggagcaaaaccgcggcagttaagggcggtggatggaaatgaacttgacagaatccgcaactatatgcttgatgtaatgcgcgactgcggttttttccgcagccacgagaccacgaactgggagcttttcctggacaagatgctggcacagctcaaccccggcaagatgatggtctggcgcctgcggcagatgtttaaccgctggcacgtgctggtaaccggcaagggaaagggctacggccaggatcaatagattgcgcggggcgattcagatgccccgcaagttatgcctacaaggaaacaagagatgatagcactcaccgccgtcacggaaatgaatgaacgccagttggaaatcttttgccactgcgaaaagtttttcttcgaccacgaaaaaccagcgttggtcaacaaatatgcccattatttcaccgaaggctatgacgcctttggcattagcgaagaagagatgaaacagctgcgcgacgaagtcctgtcaaaatgggagcccagcgtgcaggaactggcggaactgggcaggcacttctttgccacgggaaaatatgagttcggctcgctcgccatcatgctgctcaagaaacaccgtccccgcttcgaccgcgaggtatatgagagcgtcaaacgcttcaccgaggagtcccttgccaactgggcccacgcagacctgatctcgaccaagatcacccccgtgtttttggagctggagatagccaacatggaggatttcgcggagtggcggagttcgcccagcaaatggagccgccgggtgtccgcggtgaccatgctttggcagcgggggaaattgcctccggccgagctgctggactttatgcgccccctgatgtccgatccggaacgcgtggtgcatcagggcgtgggctggtttctgagagaactttggaggctgtttcccactgaggtggaagaattcctccttgaacacaaggacagcgcgccgcgcctgatcatccagtatgccacggaaaagatgagcaaggacaagaagaagcgcttccgcaagaccacggcgcgcgaacgctcccaggaccgccagggcaaaaagaacttcgcggacaagcggaacttaaaaaaccgcggcaaatcccaaaacaggcaggggttcaaatcccgtcgccgttccgcggacgatgccggcatgcccttcaggatcaggcacacggaggaatccgatgaataagctttgcaccatcttgctgctgtccctgcccctgctgctgtggggtggaaacctttccctgagcgtcgatctcggcctgcccgcctcctccagggatatggaactgcagggttggggcagcctcagcgccccgggatacccacaacttccatataagactataaatgtgatcctgccacccgcggcggaggaactgagcttcagctacaactggagcggagcgcagacctctggcctgcccgccccggaacgcaacggagcctttttgggtggagaacgcctgctggacagccccgcccgcgaagcccgggccggacaggtgcactatctgggcaagggacgctggggcgacgtgagctacgcccgcttccgcgtgctgcccgcggtctggaatggaaactcctggcagggttacagcaggttggaactcgatctgaactggagcgaatccgagcccgcgcccaaccgcatcccgcctgtcctggcagaactgagcaaatccaacgcgaacctgcgggcgaacttctttgccaatccccgtgatctggacaaatggtatcagcccccggcaggcaaaaactacgactacctgatcgtcaccactcccgcgctctatgacgtgttgtccccgttggtcagctttcgccagagccagggcctggtcacctccttcgcggatatctccgtgatcctggcctccaccccgggcgccaacgcggcggacaagctgcgcaactacctttgcaatcaatataacagccatcctttcacttatctgctgctggtgggcgatcacgacaccgtgccggtgatgtatctgacgccggagccggatggcggcgatacagtggcttccgacttctattatggtgacctcagcagtatcgtggacacggacggagacaaccgcctgggcgagtattcaccggttgaaggagtggatgactacctttgcgactataccccggaactgtttgtgggacgcatttcctccaataatcccgtccacgtgtatgacgttgccaaccgcaccgtgctctacgagcagagcgacgccccctggaagcgcagcgccctactgcccgctgcctacctgaactacggcggcgaaccggaaactatctatctgcagacggatggcgcggactttatggaatacgccaaagccaccgccctggcaggattccagaataccaccctgtacgagcaaaccggctggctgccctcccatccctgcgatcatcccctggactaccaaggactgcgaaacctgctcaacacccaaagctacgggctggtgaactggagcgcgcacggctcttccggttactctgtccgcaaggtgtggatgaacgatgacaactccaacggcttgccggacagttgggaaatggagtggatgagcatggtggacaggcagagctttgacaacctgaacaacagcgacggcacggtcatcttcatggcctcctgctacaacggcatgatcgacagcagtcagcagtgcatcgcggaatacgcgctgcaaaggaaggctgtggcggcgatggcggccacccgcacaggctggtacaagatcggctggcgcaatcccggctggggagggctaagctcctataacctgcactatctggaaaactttgcccgcaacgggctgtcctcgggagcttcactggcctgggccaacctcctccacacccaatattacctctttggcgatccggtggacggcgggggaatcatatatcccgaactgcaaaacgtttacacctacctccactacggcgatccagccatcggccacagcggcagccagatccagcccctgggcgaaatcctggtctatgaaccctcccgtcatggcggcttgagagtggtggatgcgctgaaccagatcggcgggctgaacgtggtctataccgataagctgatcccggattatgactatatcaaccgctttgaagccgtgttttgcctctttggctggggcgacgccgcctatgtcccgcatcccgattccctggactactcgctgctgcacggctatctgaacggcggcggcaagctctatctggaaggggatgtggcctggaatagccaggatcctttctggagcaagttcggcgccaacgccccgctgaatatgttcaccaatattgaagctgtaaaatgctatcaggatggcgaagcctggatctgggactacaacccccagtccaaccccaacgcgcaggtcttgctgcccgccctgcccgccgccgagaccatcttcagcacccacggcgccgcctccgcggatgccagcatcggaatcctgcacgcggttccggagcatagcaccatcgcctcctcctttgctttggcaggcctgcaaaacggcgagtgggaactgaaagacatgctgggcctcatcctggatcgctttggcgttttggaatacgtcaatacccaagtggacgagccacagataccgatggtgcaaacctccctgcgcggctatcccaaccccttccgcagccagaccagtctgcgcctggaactgcccgccaaagccagggtggacttgaacatctataacctgcggggacagaaggtgcgctccctggcaaggctcgacctggacgccggcaagcacgaactcaactgggacgggcgcgacaactccggaaaccggcttgctcccgggatctatttctggcgcttgaaagcgggtgacaccctacgtcaggggaaactgctcaaactggccgactgacctcccccacgactccccaatactatatatggataggtgcgatatgtcttgttgcaaaagaatcttcctgctcttcgccttgatctttgccgtcctgagcctcagcgccgccggacttcccgccgccttcaccaaaggcggcaatccatccctttacaaggaactgcacagccttgccaaagagaacctgaaacgcctgcgaaacgggcagggaaaagcctaccgccgcttgctgaaccggtacccggatgtggtgatggcctatctgctggcctatgaatcggacgctaacctgcaatgcgccgctcccgcggatgtggcaagcaactaccgggagatagtcaaactgcttgcggagcaaggctgcaaacacagcccggaattctttctttcctatgtggcggatcagactgtatccgatgaacgcatcgaggcctaccgcgccgcgctgctggatgacggcctgcgccagatcatgcgcgactccgtcgatgagctcgagctctaccgcaagatctcccaatggtgtgtgagcaaactcaagtttcaacagacctccgggcgcgaccagtcgcccctggacatcacccgcaggagcatcgtgggacgctgcgaggaaatgcaaatcctcttcgtggcagccgcccgcaccgttggcctgccatcccgcccggccagcaccccctggtgggcgcatatggacaacaaccacgcctgggcggaagtgtggctggacaacgcctggcactacacgggagacatggatgccgcctactatcccgatcagacctggtttagcggcatgatcgacaagacggtgctgatccttgccgacggttcccttccttcagaacaggacgaggtgctgagccgcggccgctacgactgtgtgatcaactcggtgcgcaactatgccggggaacgcgcccgcaccatcaggatcagaaccctggacgcgcagggcaatcccctgggcaaggtgccggtgcgcgtgatggtttacaactggtattccctgcgcgtgctggcggagtttatcaccgcggaggacggttctttcacgctcagcaccggtcgcggaggcttctatctctgcgccagcctggatggccgtcaggcgctggttcccgtcccttccaccgagcaaaacgagcttgatgtcgatctggttctgaacgaaggccccctgccacctcaagatatctttttggagtatccctccaaccccttcacctggaaacaggctccccctgagtgggatctgggcgtgaaggaagccaaggctctgtgggacgggcaggatagctcgtttaccgagcggggagcagcctgcgcggacaccctgcaaggcaaggtactgagcgcctgccggggcaatcatgccgcctgggaaggctttctgaagatgcagccccagcccggcccggactttttgaactatctgctggagagcgaccccaagttcctctggcaggcgaacgcggcgcagttcgcggcgctctatcagaactttcagcgcttcgatgccggacagttgaatccggaagaacagtcttcgctgctctcgccctcagttttttatgaagagctgccccgcccctttggcaagccagacagccccagcctctatcccacttcctttgccaaagcgggaaacaacgatctggagcggctgcacaacgccatgcgctggctgaagaaaaagcaccggatcgaccccgccaaagccctgcgcggcctcctgcccctggaagaggcatcccgcagcaagtatctgagcaactaccaatactgcatcctggctgtcagcctggcacgcgccaacggcatccccgcccagttcacccgcatccccgacctgatctatgtgctggtgaacgaccagtggcgctattgcaatgtccggctctgcgaatttgaggatggcgggaagaaggattctgcctccagcttcaccctgcgggtgcgcactctggatgaacagggcgcccctctggacatcgatccccaaaacctttccctggcacgctggcagaacgggctgctctacccgctcaaccacaaattcaccgccacaggaggcggaacggccacggcaaacctgccccggggagaatactatctgcaggcgggctaccgcgtctccgacgccaggacagcttaccagttgcagcatctcactgtggaaagtgagcttagccttgacctggtgctgcgcgagtttccccgcaaatgggaagaactgccggaagactccgaattgcgccccctactggctgaagcgggagattgcgactgcctgctgatcggcaactttgaccgcgaaaacagcctgcgcctggcggagaagctgaacgcggagggagtggtattcctctggctgggctatgaggaagctgccgccgcacccgccaattaccgggtcagccccgcctggcagactctggtggcggcagatcagatcaattcagtgcgcagcctgaccctgctacgcaaggacggcgtttggcaataccatcagggcatctgggaaaagctgccccgttaaacgttctttacagcttgccgcggctgaagcggtaaaactggttgcgcagcgccttcacgtgcattcccgtgatagatttgcgcattttgtccggaggatggatcaccgagattccgtccgggttgatgccgccgatctccaccaggaaagcgcccgtgtagtggatgtggaaaaagtagttgcgcgcgttgccttcccttgaactggggccggtggcaacctcatagcgtccgccgccaaaggccttgcgcgtctttttggcataggcctgggcaaagcgcagcagcgagtcgtaacgctctttctggctggcgacggagctgtcgatggcgggcaaaaatatcttttcggaataggctccggtggcagaactatggaagaagatcgccagttcaaaattgttttcctgggccagtaagacgctcgccttcacctctgcttcggacatcggagtgctgcctttgaaattctcgtgcgagcccggcacaaccgcgccctgttcccaaaacaccggatagttgcggttgaggtccaccccgtccgtccgccagtccaaacctttcctgccgtctgtttcctgattgtttttccgtttgaactgatattgcccgctggtcaccacccggtagccttccggattgagggtggggatgatggtgaactcgaactccgccaggatttttttgatcttgccggagtgcttgtaattcaccgccagttctcgtgcccatgccagggcggtttccacacccaaaacctcgcttccgtggtgctgcccgatgatcaggactttgcgccgggcgtccggtgtgccgatgcagagggcgtggatgggcagcttttccgtgccgctgaagccgatcacccgcagggtcaccagatcgggatgcttgctggaaagcgcctgcatctctttttgcaaactttcccaagtctgatatcccttgggaaggggataaacgttgccaaccgctgcggcaaaagcgctcgcgctcaacgccagcaggggcagaatgagtaaaatactgtatttattcatcatgagaccaagctgccgcagccccgcatttcgtcaacaaaatccgatcttatgaaaagtagtggaaaggtggaaaggtgaaatggtggaaaggaactcgtggtgaagtggtgtcgtggtgacgtgtagatggtggatgcagcccagaacaagcccccaagccccaaaaccgtgtcatcccgggcaagccggggtcctcgacggatcggcaacgatccggtggggtgggatagcttgacccgggatccagtcttttagaaacaaccacccagccccgaaacaacctccccacagactatatccgtgtcatcccgggcagacggggtcctcgccaaagcgcgtagcggtttggcggggtgatttgacccgggatccagtcttttgaagcccaaaaacaaccaccagaatcccaaagcaaccgccccttttataaccccaatccgcgctcatctgcgcctctatcccgtatatctgcatgaaccacttgaaccttgatcctgtcttttcaagtcccaaacaagcacccagaccaaaaacaaccggcatcatttatttgacaaccgcaaaaaatatccaatacattccgcaatatccttcacacctccctcctttgctgctactggctttggtgccatcatccttaggtcatccctcaccaggttaaggatgactgccggaagacccacgccggagagggggatgcaaatgaggccgccctctataatatataggtgctatgcccgaaaggtcatggaaggatgaaagcaaacgcgaaccgccaaacccaaatttccaattgacaaatatctgccgcccagatattggttcagtaaggtaaggaataaactatatgtgtataaacagcaagaagataagtgataaatataataccctgaatagaacaaaagcatttgcaaatcagcagatgctttttttttaccccggaggatagcatggatctggacaagatcataaaacttgccctggccgaagacatcggcagcggcgacatcagcacccagtatctggaactggaacccctcaacagcaacgcctacatgatcgccaaggcggaaggtgtgctggctggggtggaagtggcgaaagccgtgttcctgcaggtggacggcggcctcaagatcaccctctaccgcaaggacggagaccgcgtggttcccggcaacgagatcatgcgcctggaaggcaaagccgccagcatcctgcagggcgaacgcaccgcgctcaactttttgcagcgcctgagcggcatcgcaaccctcaccgactcctacgtccagcgcctcaaaggcaccaaagccaggctgttggatacccgcaagaccactcccctgctgcgcggactggaaaagtacgccgtgcgcgtgggcggcggtttcaaccaccgctttggcctctacgacatggtcatgctcaaggaaaaccacatccgcgcctgccgcggcatcaccgaggccgttaaacgcatcaaacgccacaacaccagctacaagatcgaggtggaagtcacctgccttgaagaactggaagaagccgtgaaagccggtgttgaccgcgtcatgctggacaatatggacctcgcccagatcaaagactgcgtgaaaaagttcggctcccaagtggaactggaaatctccggaggcgtcaccgcgtccaacatccgctccctcgcccgcaccggagtgcagtatatctccagcggagccctcacccactcatataaatctttggatataagcctgctttttgataaggagtaaaatatggaagaacaactgcgcaccctggttcaaatgcaaaaactggatgaccgcatcggcgctctgcgggtcctgcaaaaggaactgccccagcagcttaacgaaatcatcgggcatgtggaccaggcaaccgcgaatttgcttgcctgcgaaacagaacgcgccgaactggccaaaaaacaacgctcgctggaaagcgacatcaaacagcatcaggaacagatcaaaaaatacagcaaccaactctccgaaatcaagaccaacaaagaatataaggccctcaacagcgagatcgcctttctcaaggaaaagatttcagagcaggaaagccaccaactggaactgatggatgccgaaaaccaggccgcggcgcgggtgaacgaagccaaacaggaactggacaaagcggaaaaagctaaaagcgaacaggaaggcgaactgcgccgccaaatcgactcgctggaaggacagatcgaggatctgcgcgcccaacgcaacaccatggcacgcaccctgcccttgcagatcgtgaagctctatggcaacatgatcaaaaacaaaggcaacctggcggtggtcttctgccgcaagggcacctgcggaggctgcggtttcgtgatccgcccccaagtccgcatcgagctgcagttgcgcaaaaagataaactattgcgaaagctgcggccgcatcctggtggaaccgtttgaagacagctcatcccccaatgcggcggattagccccgtccttttctgctaaaggcttttgagccactatgcttggctactttggtgtccgaaataatggacggcaagcccgtttgccgcggcaaaagtttatgagcaaagttgggcatggaaaggccaaaaaagcactttaacaagttaacccaaacattatacttgacagatttatagaatgtaggcattagaatttaagagccaaaatatgctggcataccatagcagtgaaagactatatattaagtgattatataacgactgatggcataaatgtctctatcggcctggaggaagagtccgccggtaaagactcccgaaaatcggtcaataattagaaacaacccaaatagaaaacgggaataaggagatatcctatgagaaaaacccttcttttcgcgctgttgctgatcctgggcttcggcctgatcagtaatgtctatgcccaggttaacgttaccataggcagcgggaccagcaccaataccacaaccggtgctccagccccctatggaacctactggaagaatttccgccagcagttcctgctactggcctcggaaatcgaggatgccggcggcggagcgggcaacatcaattcagtcgccttcaatgtggccaacctgaacaactgttccccgatgccgaactacaacatccggctcaaacacaccacccagaccaccctgaccaccgcgtttgaggatggggactaccagaccgtgtacacgcaggctgagtatatgcctaccgttggctggaacacccacaccttcacgacccccttcgtctgggacggcacttcgaacatacttgtcgatatctacacctccatcattccgggatcctggacccagaatgcctctgtttattactccaccacagctttcaatagttccctgcgcttccaaagcgacagcgctgatgccagcaccgccaccagcggaaccacaagcaccaaccgctccaacatcagattcaacatggaagccctggtggttaccgatccgcccaacccggcgctgctcatttcacccgcggacggcgctgtggacgtgatgagctctgctaccctcaactgggcttccggcggcggagcacccactggttacaaggtgcattttggcacaaccaacccaccccccttcatcgaaaacaccattgaaaacagctacgcccccaccctggacctccacaccacctactactggcagataattcccttcaacgccattggtgacgcggcaaactgccctgtttggagctttaccacgggtggcccggtggtcatcatgaccaacggcacacagtcggtgccggatggaatggtctattccttctacgattcaggcggccccgacggcaattatcaaaactcagagaactacaccttcaccttctcagccgccaaccccaactcgatcatttacgtgttgttcacagaattcaatacggaaaacagctgggattacctgaagatctacaacggaccggatacctccgccccgcagatcggacctgctgacggctacaccggtaccactctgcctgaagagatctttggctccaacgctgtgaccttcgtcttcacttccgacacctctgtccagcgccccggctggtcggccttagtgactgctggaaatctcgaccacgaccttggcgcgaagagcatttccggtaacagcactccctccgtgggcgatcccactacctacacggtggcagtcaagaataacggaaacaacaccgaaaacacctacaccgtgaagctgatgggcaccggaaacgtggagctcgcctccattcccggcaccaccatcgctcctcagcagaccatcgaattcggcctcacctggactcccaccgaaaccggcccgatacagatttggggtgaagtggtgcttgccaatgacggcatcgctgccaacaatcaaaccttgcctctaaacgtggccgtgcaggcagcgggaatcgtggccattaccctcggtgacggcagcgctgtcggccgcatgcccatggacatgtactggaagaactccctgttcgaggccatttacctgggctccgagctcaacattggtggcctgataaccggcatccagttctacaacgacttcgtcagcaacctgcccaacatgcccactaatatttggttaggcgagaccacccagaccgatctgtcggctggctggatcccttcaacccagctcaccgcggtgttcgccggtaacgtcgattatcccagcggtccgaacaacatcaacattgccttcaccaccccttacacctacgcgggcggtaacctggtattgctggtggaacgcccgatggataccgaatggcacaattacaacgataacttcctcacccagactggggaccttgcggcccgttctctgaaggtccagtcggactcccaggactacgatcctgccgctcctcctaccggtacaagtccctccgctatgttccccaagaccactttcttcctggtcgtggacgacatgggcgcgcttaccggtaccgtgcgtgacgcgaacaacgttgccatgcccggcgctacggtttccatcactggaacccccctcaccaccctcaccgacgccaacggcgtttacaacttcccctacgtggcgatgggaccccagagcgtcgtggccaccaaacacggctacaacgtcgttacccacaacgtaaccatcatcgaagatgaaactgtcacccaggacttcgtgctcacccaactgcctcaggtcaccgtgaccggccgcatcgtgggcagcgaccaacccacagttggcctggctgacgccaccatcagcctcacaggttacgagccttaccaggctacaaccaacgccagcggccaattcaccatcactggcgtctatgccagccagacttacgaatacaccgctcaagccatcggttaccaagctgccatcggccaagccgtggttggcaccaccgacctgaacatgggcgacatcaccgtgaacgaactggccttccctccctgccaagtggttgccacagaagcagcggactattcgcacgtaaccgtcacctggatggctccggatcccaatgctcagggtatctccgaagactttgaggaatacgaagacttctccctcaccttcgatccctgggttctggtggacgttgatcaaagcggcacttatggtatgaccggctacacttggccgaacgtctattcccccatggcttacatgatcttcaaccccagcgctgccactccgccggttaccactattaccgcccacagcggaaacaaaatggctgcctgcttcgccagcactgatgctgtcaacgacgattggctgatctctccgccgatgatcgcgaccgcaagtcagttcctgaacttctacgcgaggtcctacagcgatgcttacggcctggaacgcttcaaagtgggtatttccaccggcggcactgcccccgcggacttcaccatcatcagcggccccagctacatccaggcgcccattgaatggacactgtacagctatgacctcagcgcttacgctggccagaacatccgcttcgccatccagtgcgtttccgacgacgccttctacttcgtggtggacgatgtgagcgtgggccccgttcctacagccaaggaacactttgcctccgcttcctccttcagctcccgtaataccaacacccagagcttctccaccagttcaattgttaccagaagcattggaaacgcggcttcggcatcccgcaacgtgggaaccagccatgccaataacccccgtattcaggtaccagacttccagatgttcactccttccaattcggaccgcgtacttggtggatacaaggtctatcgcctgcttgctgacaaccaggacaacgagtcactctggacgaccctgaccccatctgtcattcccagcactaccaccacctataccgacaacgcctgggccccgctgccttccggcgtttacaaatatgcagtcaaagctgtttacaccaacaacgtcctgtcccccgccgtcttctccggtgagatacacaaaggcatgatgggcaccctgaccggtaccgtgaccgaattcggcaccaacgtcccgatcgaaggagctaccatcaccgccggcgattacagcggcacctccgacaacaacggacattattccttcagcgtctatcagggagtttacaccgtcacctgctcgaaagtcggctatcaggccgcttcccagaccggtgtgagcgttaccggactgcaaaccaccacccaggacttcgtactcacagagatcaccctgcctccttgcgcggtggaagccgtggcagtgagcaacagcttggtcaacttgacctggatggagcctggcactggcggcggcgaatggatctactacgacaccggcgaaaacgatgacagcatcggcctcgtctccggtggtgaattcagtgtcgccattcgtttcccgccctccgctcttaccgactatgccggcatgagcctccacgccatatccctcttcccaggcgatgtgggcacctactccctgcgtgtctggaccggtggcaccgccagcgctcccgaaacccaggttgttgaccaacccttcaccgtgcaagccgtagacacgttccaaaccgtggttttggataaccccgtgcttatttcaggcaacgaggaactctggtttggctacaacgtcagccatgctgcgggcgcctatcccgcaggctgtgacggcggccccgccaccaacggcttcggcaacatgatctacaactccggtgaatgggcaactctgaccgacctggctccgagcctcaactacaactggaacatccgcggctacgtgggatattcagctcccaacgatgtgtgcgcgatcgatcccagcatcctcaaacacatcccgtccgacaacatcaaagccagcaaagacatcagtgcctgcaaagacaacgaccgtgtcctcgtcggctacagagtctggcgcttgctgcaaggccaggaaaacaacgattcagcctggactcagctcaccaccggacccatcaccgcgactgcctggccggacaacggatggggcggcgtgcctgacggctggtacaaatgggctgtgaaagccatctacaccggcgaagcgcaatccctgccagccttctccaatgctgtgcagaaacttacccagatcggaaccattgccggtatcgtccgcgatatggccaacgcccccatcatgggagcaaccgtatcttgcggcgacgtgactgccaccaccaacgccagcggagcctacagcatgcaggttcccgcgggcacctggagcgtaaccgccagccacccgaactacacacctgtcacccaggacggagtgattgtcgttaccaaccagaccaccacggtgaacttccagctgccgatcagcaatgtgctgctctcggacggatttgagtcctacgaaaacttcgttatcgaattcgcgccctggaccacggttgacgttgacggcagcgcgacctatggcatgaccaataccacctggcctaacacccaaacaccacaggcctacatcatcttcaatcccagtgccaccactcctcccgccactaccatcgtacctcacggaggagataaaatggcagcctgtatcgccgcaactacccctcccaacaacgactggttgattactcccgtactccacaatccgctggaacttcgcttctgggcacgctccctgacggcgcagtacggaggactggaaaagttcaagatcggtgtctccaccactggaaccaacccctccgacttcaccatcatcagcggcagcactcccctcgaagctccccttgattggacagagtatgtgtataatctcagcaactacgatggtgacacctacgtgggcatccagtgcgtgtcccatgaccactggatcttcatgctggatgacttccatatcaccggcagaactgacagcgacgatcctatcgtccctgtggtcgccaccgagttgcacggaaactacccgaaccccttcaacccggaaaccaccatcagcttcagcgttaaggataaaggccacgtaaaggtcaatatctacaacgtgaaaggccaactggtgaagaccctcgtgaacgacaacatgaacgccggcaagcacaccattgtgtggaacggccgtgacaatgctggtaaagctgtctccagtggcgtctacttctacaagatgagcgctggcaaatacagcagcaccaaaaagatgatcatgatgaagtaattcatcgggatataacctataaccaagccccgggaccgaaaggttccggggctttttctactctcctgaaaagaacgtggatgacaggatcgactggatctttgaaggtggaaaggtgaaaaggtggaatggtggaaaggttcccccgaaacaagtccaccaggctatatactgtgtcatcacgagtggggtggcaaagtccgtttgccacagagaccggaggtctctcccaaaaaggcaactccgttgcctctgccgaacagacttcggcagcccttaagttatctgcgtatatctgcgtgaaccgcgtgaaccacttgaaccttgattctgtcttttcaagtcccaaacaagcacccagaccaaaaacaaccggcatcaattatttgacaatcgcattaaatatccaacacattccgcaatatgcttcatagcgccgtcccttgctgctactggctttggagtcatcatccttaggtcatccctcaccgggttaaggatgactgccggatgacccacgccggagaggggaatgcaaatgaggcccatccctctataatatataggtgctacgataggtggaaaggaggacttcgtggtgacgtggtgtcgtggtaacgtggtgctgtcggaaaagagatagaacgcggatgacaggatcgactggatctttgagagtggaaaggtgaaaaggtggaatggaggaaagtttcccccgaaacaagtccaccatgctatatactgtgtcatcatgagtggggtggcaaagtccgtttgccacagagaccggaggtctctcccaaaaaggcaactccgttgcctctgccgaacagacttcggcagccctggtccgaaacctccccccataatactaatccgcgctcatctgcgcctttatccgcgtatatctgcgtgaaccgcttgacccgggatccagtcaccccagaggagccacccccgtttcccgcctgttcagcgtgcagacagcagtcgtgtcaggaaagcttgtccagttcttcgcggacgtttttgcagcggggatagtctttgccaaaggtgttttcccagatgctcagcaccctggtcagtagttcccgggcggtgtttgtgtcgccttgtctggcgcgcagcctgcccagagagaagaggtaatgggctgtctgggaatggttttcgccatagtggagggtatggccgtctatcgcctgcttgagcagtggttccgcttcttccaggcgtccctggcgcagcagcacactgcccagatttccggcgcagaccgccgtaaaccagtgcccctgtgggaaaaggctttccatcatttccagcgcggcgcggagcatctcctccgctttgtccggcctgtccatcagactgtagagcgaggcgaggttgttcatgcggtctgccacgttggaactgggcccggggcgtttttcgatattcagcgagcggcgcagcagtttttcagcctgctcgtagcggctggtatctttgtaaaagcgtcccaggttgttcagatagggggagaggcgggggctgcgtggcccgagctggcgggttctggcctccaccaccttcagatagagcggctcggcatcgtccatgcggtgcatatagtgatagagcagggccagatggaagagccgttcgatgtgttccgggctgtccccgccccaggcctggcaggacaactcggctgccagcagcatacattcctcaatcttggccagcagcatgcggtcccagaagtaatcggccgccatctcatagtaatgggcggcttttttgagttccccggcggctttgaagtggcgggcgatctccgcggaatgctccttgagtgcctgttcaaagacggtttccatggcttcggcggccgccaggtgcagttttttaagctccttttcgcggatgctggcatagaccgccttctgtaacaggctgtgggaaaagatgtaaaagagttcatcggcatcctgccagattttccgtccccccgctttgcccagttgctggatggggttgccttcgagcatgtgggagaggaggacaacattgaagcggaagcccagcacactggcgccgcggacgctttcctgaacctttttggagagccgggcaatgcgccgggaaatcacctcgtcgatgcctcccgccgccgcttccaagccctcttgcgctatttcgccgtggggactgagcagcttgttttccagcagataagcggcaagctgttcggcattgaaaggattgccgcccgcgcaggcgtggaaagcggaaaaggcctcgcggggcaggcggggaaggcccagcagattgaggtagagcttgcggctggcgctggagttgagggagcccagggcgaggctctccaagccatcttttttgacggcaagctccgcgggcagcctgcccttttccgtccgggcggtagccagcagaaagagcgggcgcacgccgtgttgccacagcagttccaggaattgacggctcaggggatcgagccattggacatcgtcaataaagataagcacaggggatttggcgcacagccagcgcaggtaatccagccaggcctgctgctgacggggcagcctggcttcgggggcgatcccgcgccagggcgagccatcccaggagagattcagcagcgaggcgagggcggcttcgcaatcctgtcccagcgaggaaccgcgggtgcgcttttgccacgcttcgcggaaatgctgcaccgcctgcgcgggagcctcatcctccaaaagccccaaactggcacgcagcaactgggatacgatatccagagggaggggggaatcctgcctgcaagccagcagatacacctgccgccggggagtctcgaaggcgcgcaaagcttcgcgtgccaacctgcttttgcccactcccgccgttccatgcaccaccatcgcctggggcgaggaggccgccaaaccatcgcgtatcctgctatgcagcagagcggtctccttctccctgccaatcatgcaaagcggttgtccggtgatcagttgccccggcagcatgcccagacggtaggcgcggggcgcggcttttgaggcggctttttcccttttgaggggggtgaagatgaaggagttgtgctgctggttgcgcagcttgtggtcggcgagggcttcgccggggcgggcaagctccaggagcttctgggcgcgggtgatggcttcgcccgggaagaaggttgccttccacaggtctttgccggcagccatggaaaagatgtagccggtgcagcaggcggcgcgggctttgtggcgcgtggcagcttccaaagccaggcggcaggcgcgctgcattttgttgaccttgttgtgggggaaatcgaagagcaggatggcatgcagccgcttgtgccgcacatagatggctgccaaaaaggcgtcgtagatcaccgccagcagttccagcgcctggatggttggctccagggggccgtccggaggctcgtccaggctgaggcagcagcaaacgctgtgccggacgtcagccgcgggattgagtctgtgaaagcgggaatgaatgaagtggtggccgtgttgcttgcccaagcgcttcctttccggaatatcaggcaactggggaaagggcggatgctcggcaagtttgccaggcctggcatccaactcccagcccagtctgttcaatgcctggggagagtaataaggttggttgggctggccggggttttcacgcaggacatccagttggggagaccagaacacatattcaaactggagggggttctcaaagatgcgccaggacagggtgccaaaacccacggccaggcggattacattcggcattccatgatgggggctggcgtagctgttgatcgcaccgatagtgtgattgatgcgtgccagcagcgccgcgatcagcaccggagtgctttccggcaacagggcgtggatgcagtttccctcatactggaagagcagtccgcctgcgttcctgatcaggctcagcatcctttcataggcttcggtgaaagttgcttccatcctgtcaatcacctgctgccgctgcttgagccttactcctttgatattgtaagtggcaacggtgcaaaagcgcaggatatagccggtgatctgcccctgcaggatgttttgctcatactgctgcaggatgtagctgggcaccacgcggttcatatctggctacctgccttgcctggcttaactataatctcctttctgcctacttatcccccaggctcagattggcgaaggcggtgagggtgatctccgcgtccgcgctttccagatagctgacgcgtgcccggtcgcccgcgcgggtgatgggcagacggctgctcaggttgctggaggcgataaagattatatccggcgcttcggtcagggtaaggtagtagtaggtgcgtccatccgtggtgtccgagccaaagcgggcgatggagcctgtgagggtggcctgcttgtccgctgcctccggggatatccccatccggcttccggccagggccatctgatagttgtcgcgcgcgctgcgcacgctttcacccactcccaccagggaaaagtcgcgcactgaaacgaagctgaacatcttgattagcccggcgctgtccttgagggtcataaaataggtcggcttgccgttcatgttcaccaggatggggaaggtggcatagtatttgaagttttgcaccttgccttcggcggagcgcatggcggcagtctcggtggcaccggagaccaggtagaggtggctgcttttggtgcgggtgtccgtgagcgcaaagcccaccgttccctcgtccgaacccacgctggtgaggccggagtagaaatagctgcgctgatcgcggccatagatcacgttgtaaccgggcgtcacccgcagcaggtcgcgtttgccgaacacgctgttccaaaagccgtgcacatatttgccccaccaggaaagctggggaagcacaaagtaggagggctggatgcggtcaacccaggcgggaatcttgctgtcgtcatagatgccgccgctttttttgaggggaaagtatttgatctcacccgtgccggcatgcacgatggcgagtccggtggcttccggggcactcactccgatcttgtgggtgtaggtggtgatggtccagtagggttcgccattgtcgtccagttcaaaggtatcgcctgccaggccgatgcccgcgaagccgttccaccagagatggcggtagaggtcttgtccaaagtaggcgttgcgctgatagcggatttggatgggtttgcctttcagctcgcgcacaaaggtgatatcctgcggattggtggccgagaccttgatgtagcccggggtgcctttgcttgtgttggtgatccacttccagaagccgctgtgcagcaggggacagacccagaaaagcttgccatccaccatctggatggtcgggttgccgagcaccacccggctgccgagggcgaagtcctcgcccagtttcttggctgccaaatccttggcgaaagcggaatccaggatcggcacctgatccagattgaccggcgccaccaggtcggaaaactcggtcttttccacctcgccgatcatgcggcggtagctgccggaattgaagatgccggaagagaagaagggcgccaagatcagccacagcgccagaaggggatagaccacatagaggatcttgcgcaggcgccggattgccagcagcggagccaggcagatcatcagggggacgatccagtccaaaaagcggatatgcagcaccggaagcacaaagtaaagcataaaacccagcagcaggacggacagcactatggcaggcagggctttgatcctgaacttgggaaacttgatcacgacaggtttgggcgtttgttgttgaaacatggtaacctccctgaactaagctttgtttttatactctaccagatggcggcggatttgtcaagccggaatcgctgcccgcctccaatacagaatggaaaaaagtggactcggctcgaagaccgctcctatccttgcggatacagaggcgcgaccgcccgctcaaacactccctgaaccttggaaatggccagcccgtaattggtgatcggcactccgcgccgctgggcttccacgatgcggcggctcatctccatctggttgagcatgcaggctccgcagtggatcaccagcgcgaattcctccagattgggcggaaagtcgtgtcccgcgtaaacttcatactccagttccttgcccgtgaactggctcagccagcgcggaatcttcacccgcccgatgtcatccgcctgcacgtggtgggaacaggcttcggcgatcaggatcttgtcgccgtcgcgcagcttgtcgatctgcctcaccccttccgccaggacgtccagatcgcctttgtagcgggcaaagaggatggaaaaggtggtcatcttcacctcggggggcaggtcattcaccaccttcagcaccacctgcgaatccgtgatcaccagatcaggcggctccttcagggtttgcaaggcataggccagttcccgctctttcaccaccgtcaccaccgcgtcgtgatccagcagttcgcgaatcacctgcacctgcggcaggatcaggcgtcccttgggcgcggcgaggtcgatgggagtcaccagcagcaccctgtccccggccttcaccaagtcacccgccagggggcgctcctccagcagatgggcgggcgccagcttgatcagcagttccttggcggcatcgatgttttcccccttgagggcggagacggagacccagggcagtccccgttcctcgcaccaggcgatattggcgggggcaggctcgcgcaaatccctgtggttaaagaccattaacagcggtatcttcatctcgcggatgcgtttcagggaggacagctcgctctccgcgaaggggcggccatcgttcacaaacacggctatgtccgtgcggtaaagtatcttataggtggcgagtacccgtttttcgcccagttcgccgctgtcgtccagtccagcggtgtcaaagaaggtcaccgggcccaggggcagaagttcatagcgtttgtccaccgggtctgtggtggtgcccggggtgctggaaacgatggctatctcctgtcctgccagggcgttgatcaaggacgattttccagcgttgcggttacccagcagggtgatgtttacgcgttctccgcggggtgtgctcatctatcttctcccaaaaagtcttgcggcttgcggccgctaatagcttttattatcagttctttcatgtttctttccttgtcggactggataccagcccatgtaaaaataatatatgtgaaaagcgcgaatctgtcaagcaaagagaattctggcagacaggggcctgtgtttttgatatatccacaaattacacaaattaacacggattaaaagaacagaataaggacaagtgtccagcctaaaaacaacaaccagaccctgaaacaaaccgccaccaagccctaaagccgtgtcatcccgggctgtcggggtcaccgccaaagcgcgaagcggtttggtggggtggcttgacccgggatccagtcttttaaaaacaaccagcaagccccgaaacaaagcacaacagactaaaaaccgtgtcatcccgggctgtcggggtccccgccaaagcgcgaagcggtttggtggggtggcttgacccgggatccagtcttttagaaacaaacgcgtaaggttttaaaaaagcaggcacctttccacctcaaaacacctttccacaaattctccccccatatatataggtgctacgaccccttcatgccaggcgggaagcggatcccagggcaagtatatatatacttgcccgtaattgcgcggccatgggctggctgccctccctttcccctcgcgcgcgggtggctctcatttgcatccagcgttttggcgtgagtcttccttaggtcatccttataatttataaggttgacctaaggatgatggcatcaaatccagtagcagcaaaggagggcggtatgaaggattatgcggaaggttgtggtatttttgtggaaaggtggaaaggtgcccccgaaacaagtccaccaagttatattttgtgtcatcacgggaagtcggggccccctctggggtggcttacccgtgatccagtctttttaaaagaaacatccacaaattacacaaattaacacgaattaaaagaacattaaagagtcaacacacccgactccggaacaaaaccctccagactaaaaaccgtgtcatcacagcctgcgagccgtgatccagtgcccaggtgtggcaaagtccgtttgccacagagaccggaggtctcttccaaacaggcaactccgttgcctctgccgaacggacttcggcaacccttatattacaccaatccgtgtcaatctgcgccctttatccgcgtttatctgcgtgaaccgtggaacccgggatccagtcttttggaatgtttgaacttcgctgaaaacatttttcgctaccaggaatgaaaactggacaacaaacgcagcttgggatatctgacactaagagtgtaattcacacgatcaataagaacatagcgtgctgtgcatacaaaacatattaccgacggacttctgttctgaaatatggacgttttgaacttggtaaacagtccgtatatggactaccagctgggacttgccattaggcatatgcccgaatgtaaagctatattcttatataacgcattgtagacagcacaggttgttctctgctctttccatattacactagtggtcatcatttcaccagtaggggtttttttacgcttttttcccgggagttttcatgtaaagcaccctactggacaaagagatgggagccggaaaacacagcctgaactgggacggcaccgactccaacggcgcccaactggcaagcggagtctatatctaccgcctcagcaccggaaagacgagcgccagccgcaaaatgatattgctgaagtgacggacagccgcccttccaagtccgataattaacttgaaccgccgcgcattacacacggcggttctttccaacaagccaagtatcagcagcgggaaaactgcgctgaaaaagccgctggtggggctccgtaaaatgggagtggaagccgccgcatggaacaccttgaaagtaacaagataccgccccaaattgatctttcctaacccaaaatccgcaaagcaaatttcttgacaatgatctttggcttaaatataaggttcctatcgaacaaaaggagcatgttatgtacaatcttctttgtgataattgggtaaacgtggtctatctttcgggcaaaccagatagaatatctttagttcaaactcttgaagacgcacactgtctgcaactggcatacagcaatcctatggaccggttcgctgttttcagattcctgcttgctcttggctactggtgtttcgccaacaccaacggggagcctgaacctgataagccgcttccgacctcctggatatcctggctggaagaaaacaaggggtatttcgagctttttggggatggacagagatttttccaagccgatcccagttccaggatcagagccattaccgaccttattcatgagataccaacagctcacaacctatgccatttcaatcatgtcaccgactatatcgatgggctctgcgaagcttgctgcatcaagggactgctgagattacctgtctttaccactgtcggtggcagagggataggcgcgggaatcaacaacactcctccattttacctgctctggcatgcaaatgacctcgctggcatgctggttcaaaattggcaaccctgggataatatggggattccggcatggttgggttcttttcaaaaagaaagcaggaaagtgggcttacttgccggaatgacctggctgccgcgcaaggtgcatctgcatgatcctgtctcaggtcaggcagcatgttgttcctgcggcttaccctccaaagctctcgtctattcctgcagcataaaacctgaaccagtgccggaaggccttaaatggaaagaccctcatggtgtttacaccgatcagggaaaaagtctccagtccaaaatcaaactgatgtccaatgatagatacactttcgcggaccgggattggtatagcccgttgttcagctatttgcacgcggaaggaaactccagacaaggaaaactatggttggttggatttgccagcgataaagcaaaaagcatagacatctgggacaagatcatcgagcttgagggaactgatacaaatgatgagctactggctcaattggcaaacagggctactgcccttaatgccatgcgcaagaagcctctcagaggtgatttcaaaaagtcagtgggcactccccagattgctgacattatcccccacgccgaaagcagaattgccatcaatgcgggtaaaatgactgagaacaggggctattcctggcaggatgccgatactgaatacggagaactgctcaccaaggttgcatgctctttggagccggctcaaacagtggacgccaggctcaagagaggtaaattcatttcccgcaagccctggccagttataccagaatccaaaacaaaacccgcagaggaggaccagaatgaatagaggaaccgttgacttcattgcaagcctggagaacctcaaagaaggcgatttgggcattcttagaaaactcaggggagcccggcttgatgaaaagcttcccggatttgacctgttttccgccctatggtggcctttgcggcaaaagaatcaacgcgctcccaagcgtgaagtggcttggttgatcgccaaactttttgctgaattccgctttgaacagcgcgagggagccacattgcccattcttatgggaggcatctgccggaagttggaacccaaaaaggaattaccccgtgtattggcacgctttgatcaactcgcatcgcttgacattatgcagatggaagagccgctgtcggtcattatgggtatcttgcgcaagcaccagcaggtctgcctggactgggtagggcttactgatgttctgtcattttgggagcaggaacctgtcaaaagagaatggtcggattcatttattaaagcatacaagatcaacaaggaggattcagatgttgattgaaattcatatgattcagaatcacagcccggcaaatcttaaccgggacgacttgggcgcccccaagacctgttatttcggtggagtattacgttctcgcatctccagccaatgcatcaagcgcagcatccgttttgccccggaattcgcggaccttagaggaggtatccgaacaaggcgtctggcagagaaacttgaagaaatgctggaaaacaaagataagaagctggttgccaagtttcttgaagcctgcggaatcaaaaccaaatcttccaagaaagctgcaaaaaagtccgaaaagatacccgcggaagccgatgaagatcaggatgagcagcaggcggctgatacatctgacatgctggtttttaccacttatgatgccctgcgccaaatggcagagctgctttccgactccaaactaagtgaaagcgaaaaactgctgcagttcaaagatttgctcacaaactgcgtccattctccggatatagcactttgcggcaggatgttggagaccaaagagcttaaaaacactggcgttgaaggcgccctacaggttgcacatgcgatctccacccacattgccagacctgagatagactattttgtggcggccgatgatgttcccggtgaagacgccggagcgggtcatattggcgaatccatgtttgcctcagcctgtttctacaaatacttctccattgattgggaacagttggtcaagaacctgaaaggggacacgaatctggcagcccacaccgtgggtgcctttctcctcgccgctgccaaaaccaaccccagtggcaaacagaacagcttcgccgctcataactatcccgatggcatccttgttgagttcaagaattcccctattagctacgccaacgcattcgtcaggccagtttccgtggtcaaggaatcggacctggtggaacaaagcatcggccagctttccaactacgtgaacgacatcaggcttggctattatgatgagcaatccccagttatcagcttctggttttctccaaacaatcgctattcccttggcaatgagcattccaaactggcttccagaaacattggcaacctcaatgagcttgtaggcgctgtgttggattatattggcggcttcaagtgggaagaagttcagaaaagcaaggcttatgttggcggctgacatgagtgcgccacccaacaccttattcttgcgcttggagggggctttgcagtcttggggcagcaacgaggctaagtttgctttgcgcaggactaccgacgctcccacaaaatcaggtgtcctggggctgctttgcgcggccatgggaattgggcgcgcggaggctgctgattcatggctcccaaaactcgccaacctgcgcatgggcgtgcggatagaccgccccggcatacgctggtgggacttccatactgttggagcgggacaaagaatgcgcatggcagagctgaaggcacccaaaaaaccttccatggttggagctgccctggctgataccctgacaccaagcaaagtaaaaaccagggcagagaccttgctctcacgccgcgaatatcttgccgacgccagttttctggtcgccttgcagggtgagccggaacttgtggaaaagctctccgccgctctggccaagccggtctgggcaatttatctggggcgcaaatcctgtcccccttcacgtcccgtgggcgagcatgctccgggcttttataacactttggaggaggcgctgtccgcggttcccctgcaaaagcgctggcacaatgaacccctgccgcaaatactgccttgcgtcatggactggatccccagccaggacggagaacatgcgcctgatgacgcggagattcattacgatctgccggtttcttttcagccgccccgccatttgccgcgcttcgtgatcaggcgtgagctggttgtgggagaggatgtgcaagtgagcagggaaaccggaaccagcgtttggaggcccaaaggaacccgggcggattataacaattccgagtataagaaggtcagggcggagcggcttgtgatggaccatgccgcgtgcatggtatgcaaagctcccgccacgactgttcaacacgtgaattaccgcagggcgggaggcaaggaaataccggaagacctgcgggcgctgtgccgcctctgccacgacgcctgcaccatgctggaatacggttccggcatgaccaccgaccgcatcgacccctgcgaccccatctggcgggagcgaatactggcaaagcgcaaagatatagtcgagttccgttcgcgcgggcagcgtttccgcaaaatgaagccagaggaggaaaacggatgatctacttgtccaagctattgatcgatactggaggcaatccagaccgtccccgccccggcagaaagtggctggacaatatctataacgtccaccgccgcctttccatggcgttcccttcaggtttgcgccgggagcaggatccgcatttcctgaagcccttttcgccaaacgacttccaaaaaactcccttccttttccgggtcgataacaacatcgacggaaacgataaaagggcgattattatcgtccagtccgttcttgagccggattgggattattgcttccaaaacgcgcttgatttcctggcagcgccaccggaaacaaaggagtataatccagagtttcaagcgggacaactgctccggttcaggctgcgggtaaacgccagcgtacgccgtcatattcctgagaaggtgcaacaggacggtcaaaccatagaaactggcaacatcctgcacaaaagggtttctctcacctgggatccctcttccaccccggatcaggcccttgccgactggctggctgccaaaagcccaaagctgggcttcacccttcagcgctgtgagcttcttcaactgggttgggtttatggctccaagcctgaacctaaaaatgtcaaagcaaaggaacagggacagggctactggcgtgaacacacatacaatcctctgcgcttccgttcggctctactggagggaattctcaaagtggatgacccgaaactgttcctggaaacgcttagaagcggcattggaaaagcgaaaagcttcggctttggcctgctgtccgttctgccaatcaggaatgatgaataaagacctgcactctatcccccggatcagagatcggcttagctatctctatgtggagcatgccaaaattgatcagaacgggcaagccatcgccattcacgatgccctgggagaaaccccggttccttgtgccggcttggctatgctgatgctgggaccgggcataaccatcacccatgcggcaatactttcactggctgcctgtggctgtctggtagcctgggtgggggaacatggcgtcaggttctatgccgcaggcacaggtacaacccgtagcgccgtcaatcttatgaaacaggcaaagtactgggcagacccggttttgcatttacgggttgtgcgctccatgtatcagttgaggttccaggatgagctttctcctgatttaactttgaaccagatcaggggcaaggaaggtgcccgggtgcgcgatacatatttccaactctcccaaaagtatggtgtgcccatgcagggcagaaactatcaaagagacaactggaacaaagcagaccccataaaccgggctttatctgtggcaaactcatgcctctacggcatatcacacgctgccatcgtagcggcaggattctctcccggattgggctttgtccacactggcaagcaactgtcgtttgtctatgatatcgcggatctatacaaaatggagatggctgctcccgccgcattccgggcgaccgctgaagggatcggcgaactcgaccgcagagtcaggcttgcctgccgtgatgaattccacaggcagaatctactcaaacgcattgtcgctgacattagttctctcttcggtgatattatgccagaggatagcccggatgactgttttgccgaagaaccagccttgcctggaggactctggtctccagatggagaagtgtccccagggggcatatcttacgggcaggatgatctgccaaaggaagattgatggtggttttggttttggaaaacgtgccgaactccttgcggggtcagatcacacgttggctgctggaagtaaaggcgggggtgtttgtgggtaaagtctcagcaatggttagagacaaactgtgggacaaggttagaagcaactgcagcggtgggacttgcctgatgatctggagtagccagaccgaacagggttttgatatcgaattctggggtgccgcatcaagagtcgttacggaatgggagggtatcaaactaatgaccaaacatccttgaactaaggcttgaaggagctcaatgacctgttagctctctattgatcaagtgtattccccacgcatgtgggggtgaaccaggagaattaaaatgaatctcaaccagtatcaagtattccccacgcatgtgggggtgaaccgtgatagagcagctgggagaccagtcgtctatcgtat

SEQ ID NO: 523 - DNA, 86981 bp, Artificial Sequence
  Synthetic Oligonucleotide
tacctaacactttacaatacgtttgcctgttgaaccggttcacccccacatgcgtggggaatacaacacgattgtcgtttgaagcagcaatttggtcggttcacccccacatgcgtggggaatacacatcagcgcgctctgcaatcggagtgttgaacggttcacccccacatgcgtggggaatacgatagacgactggtctcccagctgctctatcacggttcacccccacatgcgtggggaatacttgatactggttgagattcattttaattctcctggttcacccccacatgcgtggggaatacacttgatcaatagagagctaacaggtcattgagctccttcaagccttagttcaaggatgtttggtcattagtttgataccctcccattccgtaacgactcttgatgcggcaccccagaattcgatatcaaaaccctgttcggtctggctactccagatcatcaggcaagtcccaccgctgcagttgcttctaaccttgtcccacagtttgtctctaaccattgctgagactttacccacaaacacccccgcctttacttccagcagccaacgtgtgatctgaccccgcaaggagttcggcacgttttccaaaaccaaaaccaccatcaatcttcctttggcagatcatcctgcccgtaagatatgccccctggggacacttctccatctggagaccagagtcctccaggcaaggctggttcttcggcaaaacagtcatccgggctatcctctggcataatatcaccgaagagagaactaatgtcagcgacaatgcgtttgagtagattctgcctgtggaattcatcacggcaggcaagcctgactctgcggtcgagttcgccgatcccttcagcggtcgcccggaatgcggcgggagcagccatttccattttgtatagatccgcgatatcatagacaaatgacagttgcttgccagtgtggacaaagcccaatccgggagagaatcctgcagcaacaatggcagcgtgcgatatgccgtagaggcaggagtttgccacagataatgcccggtttatgggatccgctttattccagttgtctctttgatagtttctgccctgcatgggcacaccatacttttgggagagttggaaatatgtatcgcgcacccgggcaccttccttgcccctgatctggttcaaagttaaatcaggagaaagctcatcctggaacctcaactgatacatggagcgcacaacccgtaaatgcaaaaccgggtctgcccagtactttgcctgtttcataagattgacggcgctacgggttgtacctgtgcctgcggcatagaacctgacgccatgttcccccacccaggctaccagacagccacaggcagccagtgaaagtattgccgcatgggtgatggttatgcccggtcccagcatcagcatagccaagccggcacaaggaaccggggtttctcccagggcatcgtgaatggcgatggcttgcccgttctgatcaattttggcatgctccacatagagatagctaagccgatctctgatccgggggatagagtgcaggtctttattcatcattcctgattggcagaacggacagcaggccaaagccgaagcttttcgcttttccaatgccgcttctaagcgtttccaggaacagtttcgggtcatccactttgagaattccctccagtagagccgaacggaagcgcagaggattgtatgtgtgttcacgccagtagccctgtccctgttcctttgctttgacatttttaggttcaggcttggagccataaacccaacccagttgaagaagctcacagcgctgaagggtgaagcccagctttgggcttttggcagccagccagtcggcaagggcctgatccggggtggaagagggatcccaggtgagagaaacccttttgtgcaggatgttgccagtttctatggtttgaccgtcctgttgcaccttctcaggaatatgacggcgtacgctggcgtttacccgcagcctgaaccggagcagttgtcccgcttgaaactctggattatactcctttgtttccggtggcgctgccaggaaatcaagcgcgttttggaagcaataatcccaatccggctcaagaacggactggacgataataatcgcccttttatcgtttccgtcgatgttgttatcgacccggaaaaggaagggagttttttggaagtcgtttggcgaaaagggcttcaggaaatgcggatcctgctcccggcgcaaacctgaagggaacgccatggaaaggcggcggtggacgttatagatattgtccagccactttctgccggggcggggacggtctggattgcctccagtatcgatcaatagcttggacaagtagatcatccgttttcctcctctggcttcattttgcggaaacgctgcccgcgcgaacggaactcgactatatctttgcgctttgccagtattcgctcccgccagatggggtcgcaggggtcgatgcggtcggtggtcatgccggaaccgtattccagcatggtgcaggcgtcgtggcagaggcggcacagcgcccgcaggtcttccggtatttccttgcctcccgccctgcggtaattcacgtgttgaacagtcgtggcgggagctttgcataccatgcacgcggcatggtccatcacaagccgctccgccctgaccttcttatactcggaattgttataatccgcccgggttcctttgggcctccaaacgctggttccggtttccctgctcacttgcacatcctctcccacaaccagctcacgcctgatcacgaagcgcggcaaatggcggggcggctgaaaagaaaccggcagatcgtaatgaatctccgcgtcatcaggcgcatgttctccgtcctggctggggatccagtccatgacgcaaggcagtatttgcggcaggggttcattgtgccagcgcttttgcaggggaaccgcggacagcgcctcctccaaagtgttataaaagcccggagcatgctcgcccacgggacgtgaagggggacaggatttgcgccccagataaattgcccagaccggcttggccagagcggcggagagcttttccacaagttccggctcaccctgcaaggcgaccagaaaactggcgtcggcaagatattcgcggcgtgagagcaaggtctctgccctggtttttactttgcttggtgtcagggtatcagccagggcagctccaaccatggaaggttttttgggtgccttcagctctgccatgcgcattctttgtcccgctccaacagtatggaagtcccaccagcgtatgccggggcggtctatccgcacgcccatgcgcaggttggcgagttttgggagccatgaatcagcagcctccgcgcgcccaattcccatggccgcgcaaagcagccccaggacacctgattttgtgggagcgtcggtagtcctgcgcaaagcaaacttagcctcgttgctgccccaagactgcaaagccccctccaagcgcaagaataaggtgttgggtggcgcactcatgtcagccgccaacataagccttgcttttctgaacttcttcccacttgaagccgccaatataatccaacacagcgcctacaagctcattgaggttgccaatgtttctggaagccagtttggaatgctcattgccaagggaatagcgattgtttggagaaaaccagaagctgataactggggattgctcatcataatagccaagcctgatgtcgttcacgtagttggaaagctggccgatgctttgttccaccaggtccgattccttgaccacggaaactggcctgacgaatgcgttggcgtagctaataggggaattcttgaactcaacaaggatgccatcgggatagttatgagcggcgaagctgttctgtttgccactggggttggttttggcagcggcgaggagaaaggcacccacggtgtgggctgccagattcgtgtcccctttcaggttcttgaccaactgttcccaatcaatggagaagtatttgtagaaacaggctgaggcaaacatggattcgccaatatgacccgctccggcgtcttcaccgggaacatcatcggccgccacaaaatagtctatctcaggtctggcaatgtgggtggagatcgcatgtgcaacctgtagggcgccttcaacgccagtgtttttaagctctttggtctccaacatcctgccgcaaagtgctatatccggagaatggacgcagtttgtgagcaaatctttgaactgcagcagtttttcgctttcacttagtttggagtcggaaagcagctctgccatttggcgcagggcatcataagtggtaaaaaccagcatgtcagatgtatcagccgcctgctgctcatcctgatcttcatcggcttccgcgggtatcttttcggacttttttgcagctttcttggaagatttggttttgattccgcaggcttcaagaaacttggcaaccagcttcttatctttgttttccagcatttcttcaagtttctctgccagacgccttgttcggatacctcctctaaggtccgcgaattccggggcaaaacggatgctgcgcttgatgcattggctggagatgcgagaacgtaatactccaccgaaataacaggtcttgggggcgcccaagtcgtcccggttaagatttgccgggctgtgattctgaatcatatgaatttcaatcaacatctgaatcctccttgttgatcttgtatgctttaataaatgaatccgaccattctcttttgacaggttcctgctcccaaaatgacagaacatcagtaagccctacccagtccaggcagacctgctggtgcttgcgcaagatacccataatgaccgacagcggctcttccatctgcataatgtcaagcgatgcgagttgatcaaagcgtgccaatacacggggtaattcctttttgggttccaacttccggcagatgcctcccataagaatgggcaatgtggctccctcgcgctgttcaaagcggaattcagcaaaaagtttggcgatcaaccaagccacttcacgcttgggagcgcgttgattcttttgccgcaaaggccaccatagggcggaaaacaggtcaaatccgggaagcttttcatcaagccgggctcccctgagttttctaagaatgcccaaatcgccttctttgaggttctccaggcttgcaatgaagtcaacggttcctctattcattctggtcctcctctgcgggttttgttttggattctggtataactggccagggcttgcgggaaatgaatttacctctcttgagcctggcgtccactgtttgagccggctccaaagagcatgcaaccttggtgagcagttctccgtattcagtatcggcatcctgccaggaatagcccctgttctcagtcattttacccgcattgatggcaattctgctttcggcgtgggggataatgtcagcaatctggggagtgcccactgactttttgaaatcacctctgagaggcttcttgcgcatggcattaagggcagtagccctgtttgccaattgagccagtagctcatcatttgtatcagttccctcaagctcgatgatcttgtcccagatgtctatgctttttgctttatcgctggcaaatccaaccaaccatagttttccttgtctggagtttccttccgcgtgcaaatagctgaacaacgggctataccaatcccggtccgcgaaagtgtatctatcattggacatcagtttgattttggactggagactttttccctgatcggtgtaaacaccatgagggtctttccatttaaggccttccggcactggttcaggttttatgctgcaggaatagacgagagctttggagggtaagccgcaggaacaacatgctgcctgacctgagacaggatcatgcagatgcaccttgcgcggcagccaggtcattccggcaagtaagcccactttcctgctttctttttgaaaagaacccaaccatgccggaatccccatattatcccagggttgccaattttgaaccagcatgccagcgaggtcatttgcatgccagagcaggtaaaatggaggagtgttgttgattcccgcgcctatccctctgccaccgacagtggtaaagacaggtaatctcagcagtcccttgatgcagcaagcttcgcagagcccatcgatatagtcggtgacatgattgaaatggcataggttgtgagctgttggtatctcatgaataaggtcggtaatggctctgatcctggaactgggatcggcttggaaaaatctctgtccatccccaaaaagctcgaaataccccttgttttcttccagccaggatatccaggaggtcggaagcggcttatcaggttcaggctccccgttggtgttggcgaaacaccagtagccaagagcaagcaggaatctgaaaacagcgaaccggtccataggattgctgtatgccagttgcagacagtgtgcgtcttcaagagtttgaactaaagatattctatctggtttgcccgaaagatagaccacgtttacccaattatcacaaagaagattgtacataacatgctccttttgttcgataggaaccttatatttaagccaaagatcattgtcaagaaatttgctttgcggattttgggttaggaaagatcaatttggggcggtatcttgttactttcaaggtgttccatgcggcggcttccactcccattttacggagccccaccagcggctttttcagcgcagttttcccgctgctgatacttggcttgttggaaagaaccgccgtgtgtaatgcgcggcggttcaagttaattatcggacttggaagggcggctgtccgtcacttcagcaatatcattttgcggctggcgctcgtctttccggtgctgaggcggtagatatagactccgcttgccagttgggcgccgttggagtcggtgccgtcccagttcaggctgtgttttccggctcccatctctttgtccagtagggtgctttacatgaaaactcccgggaaaaaagcgtaaaaaaacccctactggtgaaatgatgaccactagtgtaatatggaaagagcagagaacaacctgtgctgtctacaatgcgttatataagaatatagctttacattcgggcatatgcctaatggcaagtcccagctggtagtccatatacggactgtttaccaagttcaaaacgtccatatttcagaacagaagtccgtcggtaatatgttttgtatgcacagcacgctatgttcttattgatcgtgtgaattacactcttagtgtcagatatcccaagctgcgtttgttgtccagttttcattcctggtagcgaaaaatgttttcagcgaagttcaaacattccaaaagactggatcccgggttccacggttcacgcagataaacgcggataaagggcgcagattgacacggattggtgtaatataagggttgccgaagtccgttcggcagaggcaacggagttgcctgtttggaagagacctccggtctctgtggcaaacggactttgccacacctgggcactggatcacggctcgcaggctgtgatgacacggtttttagtctggagggttttgttccggagtcgggtgtgttgactctttaatgttcttttaattcgtgttaatttgtgtaatttgtggatgtttcttttaaaaagactggatcacgggtaagccaccccagagggggccccgacttcccgtgatgacacaaaatataacttggtggacttgtttcgggggcacctttccacctttccacaaaaataccacaaccttccgcataatccttcataccgccctcctttgctgctactggatttgatgccatcatccttaggtcaaccttataaattataaggatgacctaaggaagactcacgccaaaacgctggatgcaaatgagagccacccgcgcgcgaggggaaagggagggcagccagcccatggccgcgcaattacgggcaagtatatatatacttgccctgggatccgcttcccgcctggcatgaaggggtcgtagcacctatatatatggggggagaatttgtggaaaggtgttttgaggtggaaaggtgcctgcttttttaaaaccttacgcgtttgtttctaaaagactggatcccgggtcaagccaccccaccaaaccgcttcgcgctttggcggggaccccgacagcccgggatgacacggtttttagtctgttgtgctttgtttcggggcttgctggttgtttttaaaagactggatcccgggtcaagccaccccaccaaaccgcttcgcgctttggcggtgaccccgacagcccgggatgacacggctttagggcttggtggcggtttgtttcagggtctggttgttgtttttaggctggacacttgtccttattctgttcttttaatccgtgttaatttgtgtaatttgtggatatatcaaaaacacaggcccctgtctgccagaattctctttgcttgacagattcgcgcttttcacatatattatttttacatgggctggtatccagtccgacaaggaaagaaacatgaaagaactgataataaaagctattagcggccgcaagccgcaagactttttgggagaagatagatgagcacaccccgcggagaacgcgtaaacatcaccctgctgggtaaccgcaacgctggaaaatcgtccttgatcaacgccctggcaggacaggagatagccatcgtttccagcaccccgggcaccaccacagacccggtggacaaacgctatgaacttctgcccctgggcccggtgaccttctttgacaccgctggactggacgacagcggcgaactgggcgaaaaacgggtactcgccacctataagatactttaccgcacggacatagccgtgtttgtgaacgatggccgccccttcgcggagagcgagctgtcctccctgaaacgcatccgcgagatgaagataccgctgttaatggtctttaaccacagggatttgcgcgagcctgcccccgccaatatcgcctggtgcgaggaacggggactgccctgggtctccgtctccgccctcaagggggaaaacatcgatgccgccaaggaactgctgatcaagctggcgcccgcccatctgctggaggagcgccccctggcgggtgacttggtgaaggccggggacagggtgctgctggtgactcccatcgacctcgccgcgcccaagggacgcctgatcctgccgcaggtgcaggtgattcgcgaactgctggatcacgacgcggtggtgacggtggtgaaagagcgggaactggcctatgccttgcaaaccctgaaggagccgcctgatctggtgatcacggattcgcaggtggtgctgaaggtggtgaatgacctgccccccgaggtgaagatgaccaccttttccatcctctttgcccgctacaaaggcgatctggacgtcctggcggaaggggtgaggcagatcgacaagctgcgcgacggcgacaagatcctgatcgccgaagcctgttcccaccacgtgcaggcggatgacatcgggcgggtgaagattccgcgctggctgagccagttcacgggcaaggaactggagtatgaagtttacgcgggacacgactttccgcccaatctggaggaattcgcgctggtgatccactgcggagcctgcatgctcaaccagatggagatgagccgccgcatcgtggaagcccagcggcgcggagtgccgatcaccaattacgggctggccatttccaaggttcagggagtgtttgagcgggcggtcgcgcctctgtatccgcaaggataggagcggtcttcgagccgagtccacttttttccattctgtattggaggcgggcagcgattccggcttgacaaatccgccgccatctggtagagtataaaaacaaagcttagttcagggaggttaccatgtttcaacaacaaacgcccaaacctgtcgtgatcaagtttcccaagttcaggatcaaagccctgcctgccatagtgctgtccgtcctgctgctgggttttatgctttactttgtgcttccggtgctgcatatccgctttttggactggatcgtccccctgatgatctgcctggctccgctgctggcaatccggcgcctgcgcaagatcctctatgtggtctatccccttctggcgctgtggctgatcttggcgcccttcttctcttccggcatcttcaattccggcagctaccgccgcatgatcggcgaggtggaaaagaccgagttttccgacctggtggcgccggtcaatctggatcaggtgccgatcctggattccgctttcgccaaggatttggcagccaagaaactgggcgaggacttcgccctcggcagccgggtggtgctcggcaacccgaccatccagatggtggatggcaagcttttctgggtctgtcccctgctgcacagcggcttctggaagtggatcaccaacacaagcaaaggcaccccgggctacatcaaggtctcggccaccaatccgcaggatatcacctttgtgcgcgagctgaaaggcaaacccatccaaatccgctatcagcgcaacgcctactttggacaagacctctaccgccatctctggtggaacggcttcgcgggcatcggcctggcaggcgatacctttgaactggacgacaatggcgaaccctactggaccatcaccacctacacccacaagatcggagtgagtgccccggaagccaccggactcgccatcgtgcatgccggcacgggtgagatcaaatactttcccctcaaaaaaagcggcggcatctatgacgacagcaagattcccgcctgggttgaccgcatccagccctcctactttgtgcttccccagctttcctggtggggcaaatatgtgcacggcttttggaacagcgtgttcggcaaacgcgacctgctgcgggtgacgcccggttacaacgtgatctatggccgcgatcagcgcagctatttctactccggcctcaccagcgtgggttcggacgagggaacggtgggctttgcgctcacggacacccgcaccaaaagcagccacctctacctggtctccggtgccaccgagactgccgccatgcgctccgccgaaggcaaggtgcaaaacttcaaatactatgccaccttccccatcctggtgaacatgaacggcaagccgacctattttatgaccctcaaggacagcgccgggctaatcaagatgttcagcttcgtttcagtgcgcgacttttccctggtgggagtgggtgaaagcgtgcgcagcgcgcgcgacaactatcagatggccctggccggaagccggatggggatatccccggaggcagcggacaagcaggccaccctcacaggctccatcgcccgctttggctcggacaccacggatggacgcacctactactaccttaccctgaccgaagcgccggatataatctttatcgcctccagcaacctgagcagccgtctgcccatcacccgcgcgggcgaccgggcacgcgtcagctatctggaaagcgcggacgcggagatcaccctcaccgccttcgccaatctgagcctgggggataagtaggcagaaaggagattatagttaagccaggcaaggcaggtagccagatatgaaccgcgtggtgcccagctacatcctgcagcagtatgagcaaaacatcctgcaggggcagatcaccggctatatcctgcgcttttgcaccgttgccacttacaatatcaaaggagtaaggctcaagcagcggcagcaggtgattgacaggatggaagcaactttcaccgaagcctatgaaaggatgctgagcctgatcaggaacgcaggcggactgctcttccagtatgagggaaactgcatccacgccctgttgccggaaagcactccggtgctgatcgcggcgctgctggcacgcatcaatcacactatcggtgcgatcaacagctacgccagcccccatcatggaatgccgaatgtaatccgcctggccgtgggttttggcaccctgtcctggcgcatctttgagaaccccctccagtttgaatatgtgttctggtctccccaactggatgtcctgcgtgaaaaccccggccagcccaaccaaccttattactctccccaggcattgaacagactgggctgggagttggatgccaggcctggcaaacttgccgagcatccgccctttccccagttgcctgatattccggaaaggaagcgcttgggcaagcaacacggccaccacttcattcattcccgctttcacagactcaatcccgcggctgacgtccggcacagcgtttgctgctgcctcagcctggacgagcctccggacggccccctggagccaaccatccaggcgctggaactgctggcggtgatctacgacgcctttttggcagccatctatgtgcggcacaagcggctgcatgccatcctgctcttcgatttcccccacaacaaggtcaacaaaatgcagcgcgcctgccgcctggctttggaagctgccacgcgccacaaagcccgcgccgcctgctgcaccggctacatcttttccatggctgccggcaaagacctgtggaaggcaaccttcttcccgggcgaagccatcacccgcgcccagaagctcctggagcttgcccgccccggcgaagccctcgccgaccacaagctgcgcaaccagcagcacaactccttcatcttcacccccctcaaaagggaaaaagccgcctcaaaagccgcgccccgcgcctaccgtctgggcatgctgccggggcaactgatcaccggacaaccgctttgcatgattggcagggagaaggagaccgctctgctgcatagcaggatacgcgatggtttggcggcctcctcgccccaggcgatggtggtgcatggaacggcgggagtgggcaaaagcaggttggcacgcgaagctttgcgcgccttcgagactccccggcggcaggtgtatctgctggcttgcaggcaggattcccccctccctctggatatcgtatcccagttgctgcgtgccagtttggggcttttggaggatgaggctcccgcgcaggcggtgcagcatttccgcgaagcgtggcaaaagcgcacccgcggttcctcgctgggacaggattgcgaagccgccctcgcctcgctgctgaatctctcctgggatggctcgccctggcgcgggatcgcccccgaagccaggctgccccgtcagcagcaggcctggctggattacctgcgctggctgtgcgccaaatcccctgtgcttatctttattgacgatgtccaatggctcgatcccctgagccgtcaattcctggaactgctgtggcaacacggcgtgcgcccgctctttctgctggctaccgcccggacggaaaagggcaggctgcccgcggagcttgccgtcaaaaaagatggcttggagagcctcgccctgggctccctcaactccagcgccagccgcaagctctacctcaatctgctgggccttccccgcctgccccgcgaggccttttccgctttccacgcctgcgcgggcggcaatcctttcaatgccgaacagcttgccgcttatctgctggaaaacaagctgctcagtccccacggcgaaatagcgcaagagggcttggaagcggcggcgggaggcatcgacgaggtgatttcccggcgcattgcccggctctccaaaaaggttcaggaaagcgtccgcggcgccagtgtgctgggcttccgcttcaatgttgtcctcctctcccacatgctcgaaggcaaccccatccagcaactgggcaaagcggggggacggaaaatctggcaggatgccgatgaactcttttacatcttttcccacagcctgttacagaaggcggtctatgccagcatccgcgaaaaggagcttaaaaaactgcacctggcggccgccgaagccatggaaaccgtctttgaacaggcactcaaggagcattccgcggagatcgcccgccacttcaaagccgccggggaactcaaaaaagccgcccattactatgagatggcggccgattacttctgggaccgcatgctgctggccaagattgaggaatgtatgctgctggcagccgagttgtcctgccaggcctggggcggggacagcccggaacacatcgaacggctcttccatctggccctgctctatcactatatgcaccgcatggacgatgccgagccgctctatctgaaggtggtggaggccagaacccgccagctcgggccacgcagcccccgcctctccccctatctgaacaacctgggacgcttttacaaagataccagccgctacgagcaggctgaaaaactgctgcgccgctcgctgaatatcgaaaaacgccccgggcccagttccaacgtggcagaccgcatgaacaacctcgcctcgctctacagtctgatggacaggccggacaaagcggaggagatgctccgcgccgcgctggaaatgatggaaagccttttcccacaggggcactggtttacggcggtctgcgccggaaatctgggcagtgtgctgctgcgccagggacgcctggaagaagcggaaccactgctcaagcaggcgatagacggccataccctccactatggcgaaaaccattcccagacagcccattacctcttctctctgggcaggctgcgcgccagacaaggcgacacaaacaccgcccgggaactactgaccagggtgctgagcatctgggaaaacacctttggcaaagactatccccgctgcaaaaacgtccgcgaagaactggacaagctttcctgacacgactgctgtctgcacgctgaacaggcgggaaacgggggtggctcctctggggtgactggatcccgggtcaagcggttcacgcagatatacgcggataaaggcgcagatgagcgcggattagtattatggggggaggtttcggaccagggctgccgaagtctgttcggcagaggcaacggagttgcctttttgggagagacctccggtctctgtggcaaacggactttgccaccccactcatgatgacacagtatatagcatggtggacttgtttcgggggaaactttcctccattccaccttttcacctttccactctcaaagatccagtcgatcctgtcatccgcgttctatctcttttccgacagcaccacgttaccacgacaccacgtcaccacgaagtcctcctttccacctatcgtagcacctatatattatagagggatgggcctcatttgcattcccctctccggcgtgggtcatccggcagtcatccttaacccggtgagggatgacctaaggatgatgactccaaagccagtagcagcaagggacggcgctatgaagcatattgcggaatgtgttggatatttaatgcgattgtcaaataattgatgccggttgtttttggtctgggtgcttgtttgggacttgaaaagacagaatcaaggttcaagtggttcacgcggttcacgcagatatacgcagataacttaagggctgccgaagtctgttcggcagaggcaacggagttgcctttttgggagagacctccggtctctgtggcaaacggactttgccaccccactcgtgatgacacagtatatagcctggtggacttgtttcgggggaacctttccaccattccaccttttcacctttccaccttcaaagatccagtcgatcctgtcatccacgttcttttcaggagagtagaaaaagccccggaacctttcggtcccggggcttggttataggttatatcccgatgaattacttcatcatgatcatctttttggtgctgctgtatttgccagcgctcatcttgtagaagtagacgccactggagacagctttaccagcattgtcacggccgttccacacaatggtgtgcttgccggcgttcatgttgtcgttcacgagggtcttcaccagttggcctttcacgttgtagatattgacctttacgtggcctttatccttaacgctgaagctgatggtggtttccgggttgaaggggttcgggtagtttccgtgcaactcggtggcgaccacagggacgataggatcgtcgctgtcagttctgccggtgatatggaagtcatccagcatgaagatccagtggtcatgggacacgcactggatgcccacgtaggtgtcaccatcgtagttgctgagattatacacatactctgtccaatcaaggggagcttcgaggggagtgctgccgctgatgatggtgaagtcggaggggttggttccagtggtggagacaccgatcttgaacttttccagtcctccgtactgcgccgtcagggagcgtgcccagaagcgaagttccagcggattgtggagtacgggagtaatcaaccagtcgttgttgggaggggtagttgcggcgatacaggctgccattttatctcctccgtgaggtacgatggtagtggcgggaggagtggtggcactgggattgaagatgatgtaggcctgtggtgtttgggtgttaggccaggtggtattggtcatgccataggtcgcgctgccgtcaacgtcaaccgtggtccagggcgcgaattcgataacgaagttttcgtaggactcaaatccgtccgagagcagcacattgctgatcggcagctggaagttcaccgtggtggtctggttggtaacgacaatcactccgtcctgggtgacaggtgtgtagttcgggtggctggcggttacgctccaggtgcccgcgggaacctgcatgctgtaggctccgctggcgttggtggtggcagtcacgtcgccgcaagatacggttgctcccatgatgggggcgttggccatatcgcggacgataccggcaatggttccgatctgggtaagtttctgcacagcattggagaaggctggcagggattgcgcttcgccggtgtagatggctttcacagcccatttgtaccagccgtcaggcacgccgccccatccgttgtccggccaggcagtcgcggtgatgggtccggtggtgagctgagtccaggctgaatcgttgttttcctggccttgcagcaagcgccagactctgtagccgacgaggacacggtcgttgtctttgcaggcactgatgtctttgctggctttgatgttgtcggacgggatgtgtttgaggatgctgggatcgatcgcgcacacatcgttgggagctgaatatcccacgtagccgcggatgttccagttgtagttgaggctcggagccaggtcggtcagagttgcccattcaccggagttgtagatcatgttgccgaagccgttggtggcggggccgccgtcacagcctgcgggataggcgcccgcagcatggctgacgttgtagccaaaccagagttcctcgttgcctgaaataagcacggggttatccaaaaccacggtttggaacgtgtctacggcttgcacggtgaagggttggtcaacaacctgggtttcgggagcgctggcggtgccaccggtccagacacgcagggagtaggtgcccacatcgcctgggaagagggatatggcgtggaggctcatgccggcatagtcggtaagagcggagggcgggaaacgaatggcgacactgaattcaccaccggagacgaggccgatgctgtcatcgttttcgccggtgtcgtagtagatccattcgccgccgccagtgccaggctccatccaggtcaagttgaccaagctgttgctcactgccacggcttccaccgcgcaaggaggcagggtgatctctgtgagtacgaagtcctgggtggtggtttgcagtccggtaacgctcacaccggtctgggaagcggcctgatagccgactttcgagcaggtgacggtgtaaactccctgatagacgctgaaggaataatgtccgttgttgtcggaggtgccgctgtaatcgccggcggtgatggtagctccttcgatcgggacgttggtgccgaattcggtcacggtaccggtcagggtgcccatcatgcctttgtgtatctcaccggagaagacggcgggggacaggacgttgttggtgtaaacagctttgactgcatatttgtaaacgccggaaggcagcggggcccaggcgttgtcggtataggtggtggtagtgctgggaatgacagatggggtcagggtcgtccagagtgactcgttgtcctggttgtcagcaagcaggcgatagaccttgtatccaccaagtacgcggtccgaattggaaggagtgaacatctggaagtctggtacctgaatacgggggttattggcatggctggttcccacgttgcgggatgccgaagccgcgtttccaatgcttctggtaacaattgaactggtggagaagctctgggtgttggtattacgggagctgaaggaggaagcggaggcaaagtgttccttggctgtaggaacggggcccacgctcacatcgtccaccacgaagtagaaggcgtcgtcggaaacgcactggatggcgaagcggatgttctggccagcgtaagcgctgaggtcatagctgtacagtgtccattcaatgggcgcctggatgtagctggggccgctgatgatggtgaagtccgcgggggcagtgccgccggtggaaatacccactttgaagcgttccaggccgtaagcatcgctgtaggacctcgcgtagaagttcaggaactgacttgcggtcgcgatcatcggcggagagatcagccaatcgtcgttgacagcatcagtgctggcgaagcaggcagccattttgtttccgctgtgggcggtaatagtggtaaccggcggagtggcagcgctggggttgaagatcatgtaagccatgggggaatagacgttcggccaagtgtagccggtcataccataagtgccgctttgatcaacgtccaccagaacccagggatcgaaggtgagggagaagtcttcgtattcctcaaagtcttcggagataccctgagcattgggatccggagccatccaggtgacggttacgtgcgaatagtccgctgcttctgtggcaaccacttggcagggagggaaggccagttcgttcacggtgatgtcgcccatgttcaggtcggtggtgccaaccacggcttggccgatggcagcttggtaaccgatggcttgagcggtgtattcgtaagtctggctggcatagacgccagtgatggtgaattggccgctggcgttggttgtagcctggtaaggctcgtaacctgtgaggctgatggtggcgtcagccaggccaactgtgggttggtcgctgcccacgatgcggccggtcacggtgacctgaggcagttgggtgagcacgaagtcctgggtgacagtttcatcttcgatgatggttacgttgtgggtaacgacgttgtagccgtgtttggtggccacgacgctctggggtcccatcgccacgtaggggaagttgtaaacgccgttggcgtcggtgagggtggtgaggggggttccagtgatggaaaccgtagcgccgggcatggcaacgttgttcgcgtcacgcacggtaccggtaagcgcgcccatgtcgtccacgaccaggaagaaagtggtcttggggaacatagcggagggacttgtaccggtaggaggagcggcaggatcgtagtcctgggagtccgactggaccttcagagaacgggccgcaaggtccccagtctgggtgaggaagttatcgttgtaattgtgccattcggtatccatcgggcgttccaccagcaataccaggttaccgcccgcgtaggtgtaaggggtggtgaaggcaatgttgatgttgttcggaccgctgggataatcgacgttaccggcgaacaccgcggtgagctgggttgaagggatccagccagccgacagatcggtctgggtggtctcgcctaaccaaatattagtgggcatgttgggcaggttgctgacgaagtcgttgtagaactggatgccggttatcaggccaccaatgttgagctcggagcccaggtaaatggcctcgaacagggagttcttccagtacatgtccatgggcatgcggccgacagcgctgccgtcaccgagggtaatggccacgattcccgctgcctgcacggccacgtttagaggcaaggtttgattgttggcagcgatgccgtcattggcaagcaccacttcaccccaaatctgtatcgggccggtttcggtgggagtccaggtgaggccgaattcgatggtctgctgaggagcgatggtggtgccgggaatggaggcgagctccacgtttccggtgcccatcagcttcacggtgtaggtgttttcggtgttgtttccgttattcttgactgccaccgtgtaggtagtgggatcgcccacggagggagtgctgttaccggaaatgctcttcgcgccaaggtcgtggtcgagatttccagcagtcactaaggccgaccagccggggcgctggacagaggtgtcggaagtgaagacgaaggtcacagcgttggagccaaagatctcttcaggcagagtggtaccggtgtagccgtcagcaggtccgatctgcggggcggaggtatccggtccgttgtagatcttcaggtaatcccagctgttttccgtattgaattctgtgaacaacacgtaaatgatcgagttggggttggcggctgagaaggtgaaggtgtagttctctgagttttgataattgccgtcggggccgcctgaatcgtagaaggaatagaccattccatccggcaccgactgtgtgccgttggtcatgatgaccaccgggccacccgtggtaaagctccaaacagggcagtttgccgcgtcaccaatggcgttgaagggaattatctgccagtagtaggtggtgtggaggtccagggtgggggcgtagctgttttcaatggtgttttcgatgaaggggggtgggttggttgtgccaaaatgcaccttgtaaccagtgggtgctccgccgccggaagcccagttgagggtagcagagctcatcacgtccacagcgccgtccgcgggtgaaatgagcagcgccgggttgggcggatcggtaaccaccagggcttccatgttgaatctgatgttggagcggttggtgcttgtggttccgctggtggcggtgctggcatcagcgctgtcgctttggaagcgcagggaactattgaaagctgtggtggagtaataaacagaggcattctgggtccaggatcccggaatgatggaggtgtagatatcgacaagtatgttcgaagtgccgtcccagacgaagggggtcgtgaaggtgtgggtgttccagccaacggtaggcatatactcagcctgcgtgtacacggtctggtagtccccatcctcaaacgcggtggtcagggtggtctgggtggtgtgtttgagccggatgttgtagttcggcatcggggaacagttgttcaggttggccacattgaaggcgactgaattgatgttgcccgctccgccgccggcatcctcgatttccgaggccagtagcaggaactgctggcggaaattcttccagtaggttccatagggggctggagcaccggttgtggtattggtgctggtcccgctgcctatggtaacgttaacctgggcatagacattactgatcaggccgaagcccaggatcagcaacagcgcgaaaagaagggtttttctcataggatatctccttattcccgttttctatttgggttgtttctaattattgaccgattttcgggagtctttaccggcggactcttcctccaggccgatagagacatttatgccatcagtcgttatataatcacttaatatatagtctttcactgctatggtatgccagcatattttggctcttaaattctaatgcctacattctataaatctgtcaagtataatgtttgggttaacttgttaaagtgcttttttggcctttccatgcccaactttgctcataaacttttgccgcggcaaacgggcttgccgtccattatttcggacaccaaagtagccaagcatagtggctcaaaagcctttagcagaaaaggacggggctaatccgccgcattgggggatgagctgtcttcaaacggttccaccaggatgcggccgcagctttcgcaatagtttatctttttgcgcaactgcagctcgatgcggacttgggggcggatcacgaaaccgcagcctccgcaggtgcccttgcggcagaagaccaccgccaggttgcctttgtttttgatcatgttgccatagagcttcacgatctgcaagggcagggtgcgtgccatggtgttgcgttgggcgcgcagatcctcgatctgtccttccagcgagtcgatttggcggcgcagttcgccttcctgttcgcttttagctttttccgctttgtccagttcctgtttggcttcgttcacccgcgccgcggcctggttttcggcatccatcagttccagttggtggctttcctgctctgaaatcttttccttgagaaaggcgatctcgctgttgagggccttatattctttgttggtcttgatttcggagagttggttgctgtattttttgatctgttcctgatgctgtttgatgtcgctttccagcgagcgttgttttttggccagttcggcgcgttctgtttcgcaggcaagcaaattcgcggttgcctggtccacatgcccgatgatttcgttaagctgctggggcagttccttttgcaggacccgcagagcgccgatgcggtcatccagtttttgcatttgaaccagggtgcgcagttgttcttccatattttactccttatcaaaaagcaggcttatatccaaagatttatatgagtgggtgagggctccgctggagatatactgcactccggtgcgggcgagggagcggatgttggacgcggtgacgcctccggagatttccagttccacttgggagccgaactttttcacgcagtctttgatctgggcgaggtccatattgtccagcatgacgcggtcaacaccggctttcacggcttcttccagttcttcaaggcaggtgacttccacctcgatcttgtagctggtgttgtggcgtttgatgcgtttaacggcctcggtgatgccgcggcaggcgcggatgtggttttccttgagcatgaccatgtcgtagaggccaaagcggtggttgaaaccgccgcccacgcgcacggcgtacttttccagtccgcgcagcaggggagtggtcttgcgggtatccaacagcctggctttggtgcctttgaggcgctggacgtaggagtcggtgagggttgcgatgccgctcaggcgctgcaaaaagttgagcgcggtgcgttcgccctgcaggatgctggcggctttgccttccaggcgcatgatctcgttgccgggaaccacgcggtctccgtccttgcggtagagggtgatcttgaggccgccgtccacctgcaggaacacggctttcgccacttccaccccagccagcacaccttccgccttggcgatcatgtaggcgttgctgttgaggggttccagttccagatactgggtgctgatgtcgccgctgccgatgtcttcggccagggcaagttttatgatcttgtccagatccatgctatcctccggggtaaaaaaaaagcatctgctgatttgcaaatgcttttgttctattcagggtattatatttatcacttatcttcttgctgtttatacacatatagtttattccttaccttactgaaccaatatctgggcggcagatatttgtcaattggaaatttgggtttggcggttcgcgtttgctttcatccttccatgacctttcgggcatagcacctatatattatagagggcggcctcatttgcatccccctctccggcgtgggtcttccggcagtcatccttaacctggtgagggatgacctaaggatgatggcaccaaagccagtagcagcaaaggagggaggtgtgaaggatattgcggaatgtattggatattttttgcggttgtcaaataaatgatgccggttgtttttggtctgggtgcttgtttgggacttgaaaagacaggatcaaggttcaagtggttcatgcagatatacgggatagaggcgcagatgagcgcggattggggttataaaaggggcggttgctttgggattctggtggttgtttttgggcttcaaaagactggatcccgggtcaaatcaccccgccaaaccgctacgcgctttggcgaggaccccgtctgcccgggatgacacggatatagtctgtggggaggttgtttcggggctgggtggttgtttctaaaagactggatcccgggtcaagctatcccaccccaccggatcgttgccgatccgtcgaggaccccggcttgcccgggatgacacggttttggggcttgggggcttgttctgggctgcatccaccatctacacgtcaccacgacaccacttcaccacgagttcctttccaccatttcacctttccacctttccactacttttcataagatcggattttgttgacgaaatgcggggctgcggcagcttggtctcatgatgaataaatacagtattttactcattctgcccctgctggcgttgagcgcgagcgcttttgccgcagcggttggcaacgtttatccccttcccaagggatatcagacttgggaaagtttgcaaaaagagatgcaggcgctttccagcaagcatcccgatctggtgaccctgcgggtgatcggcttcagcggcacggaaaagctgcccatccacgccctctgcatcggcacaccggacgcccggcgcaaagtcctgatcatcgggcagcaccacggaagcgaggttttgggtgtggaaaccgccctggcatgggcacgagaactggcggtgaattacaagcactccggcaagatcaaaaaaatcctggcggagttcgagttcaccatcatccccaccctcaatccggaaggctaccgggtggtgaccagcgggcaatatcagttcaaacggaaaaacaatcaggaaacagacggcaggaaaggtttggactggcggacggacggggtggacctcaaccgcaactatccggtgttttgggaacagggcgcggttgtgccgggctcgcacgagaatttcaaaggcagcactccgatgtccgaagcagaggtgaaggcgagcgtcttactggcccaggaaaacaattttgaactggcgatcttcttccatagttctgccaccggagcctattccgaaaagatatttttgcccgccatcgacagctccgtcgccagccagaaagagcgttacgactcgctgctgcgctttgcccaggcctatgccaaaaagacgcgcaaggcctttggcggcggacgctatgaggttgccaccggccccagttcaagggaaggcaacgcgcgcaactactttttccacatccactacacgggcgctttcctggtggagatcggcggcatcaacccggacggaatctcggtgatccatcctccggacaaaatgcgcaaatctatcacgggaatgcacgtgaaggcgctgcgcaaccagttttaccgcttcagccgcggcaagctgtaaagaacgtttaacggggcagcttttcccagatgccctgatggtattgccaaacgccgtccttgcgtagcagggtcaggctgcgcactgaattgatctgatctgccgccaccagagtctgccaggcggggctgacccggtaattggcgggtgcggcggcagcttcctcatagcccagccagaggaataccactccctccgcgttcagcttctccgccaggcgcaggctgttttcgcggtcaaagttgccgatcagcaggcagtcgcaatctcccgcttcagccagtagggggcgcaattcggagtcttccggcagttcttcccatttgcggggaaactcgcgcagcaccaggtcaaggctaagctcactttccacagtgagatgctgcaactggtaagctgtcctggcgtcggagacgcggtagcccgcctgcagatagtattctccccggggcaggtttgccgtggccgttccgcctcctgtggcggtgaatttgtggttgagcgggtagagcagcccgttctgccagcgtgccagggaaaggttttggggatcgatgtccagaggggcgccctgttcatccagagtgcgcacccgcagggtgaagctggaggcagaatccttcttcccgccatcctcaaattcgcagagccggacattgcaatagcgccactggtcgttcaccagcacatagatcaggtcggggatgcgggtgaactgggcggggatgccgttggcgcgtgccaggctgacagccaggatgcagtattggtagttgctcagatacttgctgcgggatgcctcttccaggggcaggaggccgcgcagggctttggcggggtcgatccggtgctttttcttcagccagcgcatggcgttgtgcagccgctccagatcgttgtttcccgctttggcaaaggaagtgggatagaggctggggctgtctggcttgccaaaggggcggggcagctcttcataaaaaactgagggcgagagcagcgaagactgttcttccggattcaactgtccggcatcgaagcgctgaaagttctgatagagcgccgcgaactgcgccgcgttcgcctgccagaggaacttggggtcgctctccagcagatagttcaaaaagtccgggccgggctggggctgcatcttcagaaagccttcccaggcggcatgattgccccggcaggcgctcagtaccttgccttgcagggtgtccgcgcaggctgctccccgctcggtaaacgagctatcctgcccgtcccacagagccttggcttccttcacgcccagatcccactcagggggagcctgtttccaggtgaaggggttggagggatactccaaaaagatatcttgaggtggcagggggccttcgttcagaaccagatcgacatcaagctcgttttgctcggtggaagggacgggaaccagcgcctgacggccatccaggctggcgcagagatagaagcctccgcgaccggtgctgagcgtgaaagaaccgtcctccgcggtgataaactccgccagcacgcgcagggaataccagttgtaaaccatcacgcgcaccggcaccttgcccaggggattgccctgcgcgtccagggttctgatcctgatggtgcgggcgcgttccccggcatagttgcgcaccgagttgatcacacagtcgtagcggccgcggctcagcacctcgtcctgttctgaaggaagggaaccgtcggcaaggatcagcaccgtcttgtcgatcatgccgctaaaccaggtctgatcgggatagtaggcggcatccatgtctcccgtgtagtgccaggcgttgtccagccacacttccgcccaggcgtggttgttgtccatatgcgcccaccagggggtgctggccgggcgggatggcaggccaacggtgcgggcggctgccacgaagaggatttgcatttcctcgcagcgtcccacgatgctcctgcgggtgatgtccaggggcgactggtcgcgcccggaggtctgttgaaacttgagtttgctcacacaccattgggagatcttgcggtagagctcgagctcatcgacggagtcgcgcatgatctggcgcaggccgtcatccagcagcgcggcgcggtaggcctcgatgcgttcatcggatacagtctgatccgccacataggaaagaaagaattccgggctgtgtttgcagccttgctccgcaagcagtttgactatctcccggtagttgcttgccacatccgcgggagcggcgcattgcaggttagcgtccgattcataggccagcagataggccatcaccacatccgggtaccggttcagcaagcggcggtaggcttttccctgcccgtttcgcaggcgtttcaggttctctttggcaaggctgtgcagttccttgtaaagggatggattgccgcctttggtgaaggcggcgggaagtccggcggcgctgaggctcaggacggcaaagatcaaggcgaagagcaggaagattcttttgcaacaagacatatcgcacctatccatatatagtattggggagtcgtgggggaggtcagtcggccagtttgagcagtttcccctgacgtagggtgtcacccgctttcaagcgccagaaatagatcccgggagcaagccggtttccggagttgtcgcgcccgtcccagttgagttcgtgcttgccggcgtccaggtcgagccttgccagggagcgcaccttctgtccccgcaggttatagatgttcaagtccaccctggctttggcgggcagttccaggcgcagactggtctggctgcggaaggggttgggatagccgcgcagggaggtttgcaccatcggtatctgtggctcgtccacttgggtattgacgtattccaaaacgccaaagcgatccaggatgaggcccagcatgtctttcagttcccactcgccgttttgcaggcctgccaaagcaaaggaggaggcgatggtgctatgctccggaaccgcgtgcaggattccgatgctggcatccgcggaggcggcgccgtgggtgctgaagatggtctcggcggcgggcagggcgggcagcaagacctgcgcgttggggttggactgggggttgtagtcccagatccaggcttcgccatcctgatagcattttacagcttcaatattggtgaacatattcagcggggcgttggcgccgaacttgctccagaaaggatcctggctattccaggccacatccccttccagatagagcttgccgccgccgttcagatagccgtgcagcagcgagtagtccagggaatcgggatgcgggacataggcggcgtcgccccagccaaagaggcaaaacacggcttcaaagcggttgatatagtcataatccgggatcagcttatcggtatagaccacgttcagcccgccgatctggttcagcgcatccaccactctcaagccgccatgacgggagggttcatagaccaggatttcgcccaggggctggatctggctgccgctgtggccgatggctggatcgccgtagtggaggtaggtgtaaacgttttgcagttcgggatatatgattcccccgccgtccaccggatcgccaaagaggtaatattgggtgtggaggaggttggcccaggccagtgaagctcccgaggacagcccgttgcgggcaaagttttccagatagtgcaggttataggagcttagccctccccagccgggattgcgccagccgatcttgtaccagcctgtgcgggtggccgccatcgccgccacagccttcctttgcagcgcgtattccgcgatgcactgctgactgctgtcgatcatgccgttgtagcaggaggccatgaagatgaccgtgccgtcgctgttgttcaggttgtcaaagctctgcctgtccaccatgctcatccactccatttcccaactgtccggcaagccgttggagttgtcatcgttcatccacaccttgcggacagagtaaccggaagagccgtgcgcgctccagttcaccagcccgtagctttgggtgttgagcaggtttcgcagtccttggtagtccaggggatgatcgcagggatgggagggcagccagccggtttgctcgtacagggtggtattctggaatcctgccagggcggtggctttggcgtattccataaagtccgcgccatccgtctgcagatagatagtttccggttcgccgccgtagttcaggtaggcagcgggcagtagggcgctgcgcttccagggggcgtcgctctgctcgtagagcacggtgcggttggcaacgtcatacacgtggacgggattattggaggaaatgcgtcccacaaacagttccggggtatagtcgcaaaggtagtcatccactccttcaaccggtgaatactcgcccaggcggttgtctccgtccgtgtccacgatactgctgaggtcaccataatagaagtcggaagccactgtatcgccgccatccggctccggcgtcagatacatcaccggcacggtgtcgtgatcgcccaccagcagcagataagtgaaaggatggctgttatattgattgcaaaggtagttgcgcagcttgtccgccgcgttggcgcccggggtggaggccaggatcacggagatatccgcgaaggaggtgaccaggccctggctctggcgaaagctgaccaacggggacaacacgtcatagagcgcgggagtggtgacgatcaggtagtcgtagtttttgcctgccgggggctgataccatttgtccagatcacggggattggcaaagaagttcgcccgcaggttcgcgttggatttgctcagttctgccaggacaggcgggatgcggttgggcgcgggctcggattcgctccagttcagatcgagttccaacctgctgtaaccctgccaggagtttccattccagaccgcgggcagcacgcggaagcgggcgtagctcacgtcgccccagcgtcccttgcccagatagtgcacctgtccggcccgggcttcgcgggcggggctgtccagcaggcgttctccacccaaaaaggctccgttgcgttccggggcgggcaggccagaggtctgcgctccgctccagttgtagctgaagctcagttcctccgccgcgggtggcaggatcacatttatagtcttatatggaagttgtgggtatcccggggcgctgaggctgccccaaccctgcagttccatatccctggaggaggcgggcaggccgagatcgacgctcagggaaaggtttccaccccacagcagcaggggcagggacagcagcaagatggtgcaaagcttattcatcggattcctccgtgtgcctgatcctgaagggcatgccggcatcgtccgcggaacggcgacgggatttgaacccctgcctgttttgggatttgccgcggttttttaagttccgcttgtccgcgaagttctttttgccctggcggtcctgggagcgttcgcgcgccgtggtcttgcggaagcgcttcttcttgtccttgctcatcttttccgtggcatactggatgatcaggcgcggcgcgctgtccttgtgttcaaggaggaattcttccacctcagtgggaaacagcctccaaagttctctcagaaaccagcccacgccctgatgcaccacgcgttccggatcggacatcagggggcgcataaagtccagcagctcggccggaggcaatttcccccgctgccaaagcatggtcaccgcggacacccggcggctccatttgctgggcgaactccgccactccgcgaaatcctccatgttggctatctccagctccaaaaacacgggggtgatcttggtcgagatcaggtctgcgtgggcccagttggcaagggactcctcggtgaagcgtttgacgctctcatatacctcgcggtcgaagcggggacggtgtttcttgagcagcatgatggcgagcgagccgaactcatattttcccgtggcaaagaagtgcctgcccagttccgccagttcctgcacgctgggctcccattttgacaggacttcgtcgcgcagctgtttcatctcttcttcgctaatgccaaaggcgtcatagccttcggtgaaataatgggcatatttgttgaccaacgctggtttttcgtggtcgaagaaaaacttttcgcagtggcaaaagatttccaactggcgttcattcatttccgtgacggcggtgagtgctatcatctcttgtttccttgtaggcataacttgcggggcatctgaatcgccccgcgcaatctattgatcctggccgtagccctttcccttgccggttaccagcacgtgccagcggttaaacatctgccgcaggcgccagaccatcatcttgccggggttgagctgtgccagcatcttgtccaggaaaagctcccagttcgtggtctcgtggctgcggaaaaaaccgcagtcgcgcattacatcaagcatatagttgcggattctgtcaagttcatttccatccaccgcccttaactgccgcggttttgctccctgcagggggaggctgtagatctgccacagggcgatggtgaccgcctgggcgaggttgatggagggaaaggcaggattggcggggatgtggcaacgcagggggcagaggtcggcctcttcgtcggtgaggccgaatgtttcgcggccaaacaccagaccaatctccagtttggggattttggcgcagtagtccgccatctggggcgggttcagatccaccggtttatagcgtcccacgcggcgggaaaaggcgatcagcctgtccaggtcggcgctggcatctttgaggctgtcaaagacctgcgcctcctccaggatatgttcggagtgcatggccaggtaaaagtcgttctttttgggcacgctgcccacgatgcgcaggctggtgaaaccaaagttgttcatgatgcgggcgacggcgcccacattgccctcatagatgggttccaccaggattacgtggatcattgtttacgcagcagttgtcccaggcggttgctcatctgcgccacgttggggtcgggatcgtttttccattcctggatcacccgcttggtgacgttcataaagtcgaatcccttgtcgcgctggttcttttggctgaagatgctgcccaatttgcgcagggtctgccagatggcgtccacccgttcttcactggcccccaccagccagcgccggatattggcataggtctgcagcgggcgttgccgtcccacctgggtgaggatgtggccgatctttttttgcacttcttcgctttcgtcgtccagcagcctgccgatgaaggtgaggatgtattgcgggtttttatccgcgatgttttccatgccgtgcatggacatggaacgcttgttttcgttgggagacatcgcccaatggggcatctcttccttcatgacctcgggatagttcttccatagctcgaaacagatggtctcgctttcccagggaacggtctccacggtcttttccagggtcttcacgatcacccgcgggtcgtcctgcctcttgtaatagaaatagaacagcgccgtggcgcggataccgtagatgaaatcatccagcatttcggcgcaaatctcgtccaagggccccttgccctggtaggtggccagcctcttgcccatttcttcgcgcacgaaatagttcgccgtgttggccatttcctcaatttccttgatggcctgttcccgtttgcccttgtccaggcttttgaaaatcttttccacctgggcgtccattattttgtagtcgtccagattcagacgtcccatttctttgatcattagctatgctccaaatctcggtgtaagaaaaaatatattattcacaacagcagcataccgcgtaaatgcctgtgttccgtatataatgttggattttgcctcttctttcgtttgctcgtgattaacatgaacagtagatatctccgcaagctttctgtcaagaaatttctctgaccgggttgctttgcgggggaaagtggtgggtgatactggattcgaaccagtgacctctacgatgtgaacgtagcgctctaaccagctgagctaatcacccaacaatcagggtggtgggtgatactggactcgaaccagtgacctctacgatgtcaacgtagcgctctaaccaagctgagctaatcacccaggacaggatgcaatagcaaattgcagcccttttttgtcaacaaaaaacctcgctctgccccccaagcctttaccgatggcgatcttggctatcgccgtggaaaggggttttttaggtggaaaggtggaatggtggaaaggttcccccgaaacaagtccatcaagctatatactgtgtcatcccgggcaagcgtatgcttgacccgggatccagtcgcagggggggtggcaaagtctgtttgccacagagaccggaggtctcttccaaacaggcaactccgttgcctctgccgaacagacttcggcagcccttcaattatccgcgctgatctgcgtgaaccgcttgacccgtgatccagtcttttgaaatggccgtggaaaggtaaaatagtataattgtattcaattgtaataatgcaagctaaacagtattatccgttaatccgtgtaatccgtttcatccgtatgatgcctggcatgccaatcttatacggattgacggatttaaccgatttacggatttatgatgctaaagccggaaggagaaatggaaacagaacgcggacggttccattccaccattttatcttacttcaaaagcaccagcttcctggtttcccggtagtccccgcattgcaggctgtagagatagacccccgcgggaagcccttccccgctgaaggatatctgctgcgaaccggaacccagcttgtggcgggctacgatctgtccgcgcaggttaaagatgctcagtgtagcggaggagcgttccggaatgtcagctttgatcagcgcgcttccatctctgtttaggggattgggataggcgttatgcagcctggcaaccgcttgcggagcgagttcatcttccacgggggttccgcttcccaacttggcgacaaagatatcagattctccacttgcagtcagggtatggatgccgaaagtagcggtttcgtaaaaatatccggtcacacaggcgttacccgcgccatccacagcgataccagatccagcgttatttatatattcatttcctcccacattgatcgcccagagccagttaccggaggagtcaagtttggcaacaaagatatctatccatccgactgcagacaagggatggctgccaaaagtggcggtttcgcaaaaagaaccgcacgcataagcgttacccgcactatccagagcgatgccatagccattatcatagtctattcctcccgctttgaccgcccaaagccagttgccggcagggtcaagcctggcaacaacgatgtccttctctccgtttgccgtcagggtatggctgccgaaagtggcggtgtcataaaaagaaccgttcacccaggcgttacccgagccatccacaacgaagccaaatacatttatatcgttattccctccccccattacagcccataaccagttacctgacgggtcaagcttggcaatgaatatatccgattctccgtttgccgtcagggtatggctgccgaaagagactgtgccttgaaataatccggtcacataagcgttacccgttccatccaaggcaattctaattccaaagtcattgcctgaccctcctgcctttaccgcccagagccagttgcctgaggggtcaagcttggcggcaaaaatatcagcgcctccgcttgctgtcagggtatggctgccgaaagtggcggtgtagcaaaagtatcctgtcacataaacgttacccgcttcatccacgtcgatgccacctcctatatcccagtcaataccccctgctttgaccgcccaaagccagttgccggagggatccagcttggcggcaaagatatcatgctctccatttgtcgtcagggtatggttaccgaaggtagctgtgttctggaaatacccggtcacataagcgttgtcggctccatccacggtgatgaacaatccccagtcattctctgttcctcctgccctgaccgcccagagccaattaccggaggcatccagcttggcaacaaagatatcaccgccaccgctggtcgtcagggtatggctgccgaatgtagcgatttcatcaaacataccagtgatgtactggttgccctggctgtcggtcgctatggatatgctttcttcatagtcagttccccccgcgcggactgcccactgccactggggcgcctgcgctcccaaaaccatcgctccgcagagcaggataagacacaaaaatgagtttcgcaaggctttcattttttcctccctatgatgggtttcccatttggaaatatactggatgggttttagtagatttgtcaagaaaaatatcggcaggttgaatctttattttttggaaggcatttttcaaagacaggatggctgtttggagcctcaaaagactggatcccgggtcaaacggttcacgcagatatacgcggataaaaggcgcggattgggctgccgaagtctgttcggcagaggcaacggagttgcctgtttggaagagacctccggtctctgtggcaaacagactttgccacccctgggcactggatcccgggtcaagctatttcaccccaccggatcgtaaccgatccgtcgaggaccccggcttgcccgggatgacacggaatgtagcttggtgacgcttgtttcgtggccttcttttcgctgtttcaccttaaatatcctgttgatcctgttatccgcgttctataatcctttccaccttcaaagaccctgtcgatccgcgccttggcgataagggcaaaaaaagccggaacctaagtttttagtgtcccggcacaaggtctttagggttaatcagaacaggccgctgatgtcgccatcgtcttccacggagatggtttcggcggaggggtgtctgggcaggccgggcatgcgcatgatctctccggtgatgggcaccaggaagcccgctccgctcgagatgactatcttgcggacggtgaccaggaagtccttggggcgtccgatgaggtcgggattgtcggaaagcgacttctgggtcttggcgatgcagatgggcagcttgtcgaagccgaatttggcgatcctcttcaagtccgctttggcgtccgcggagtaatccaccttctccgctccgtagatttcgtgggcgatagtgtgaatcttgtcttccaccgggctgtcccagtcgtaaagcccgtggtagtggcagatttccctgtccaccatatccaccacctgttgggcgaggtccagcccgccttttccgccccgggcgtggtattccaccacagatgaatcgaatccgcgggagctggcatagtcgcggatcaatctgatctcctcatcggtgtcggttgcgaagcggttgatggcgacaatggacttcatgccgaacttgtcgatattttccagatgtttgcccagattggccaggccagcttccaccgccgcgggattgggggtggcgaggtctttgagcttgacccctccatgcaccttgagcgcgcggacggttgccaccaagaccacggcgtcggtgcagagcccgccatatttgcagacgatatcgaaaaacttttccgcgcccaggtcgaaaccgaagcccgcctcggtgacagtgtattccgacagccgcagcgcgctcttggtggcaaggatgctgttggcgccctgggcgatgttggcaaaggggccgccgtgcacgaaggcggctgtgttttcggtggtctgcacgatgtttggtttgagggcgtccttgagcagggcggcgatggcgccttcatagcccagttgcctcacatagaccggttctccgtcgaaggtgaagcccacggtaatgttgccgatgcgctccttgagctcgtccatgttgtttgccaggcagaggatggccatgatctcgctggcgggggtgatgtcgaaaccgtcttcgcgggggaagccctgcttgctgccgccgaggccgatgacgatcttgcgcagcatgcggtcgttcacgtccagcacccgtttccaggtcatgcggcggggatcgatatttagcgagttgtcaaagtaaacatggttgtccaccagggccgcgagggtgttgttggcggcggtgacggcatggaagtcgcctgtgaagtggaggttgatgtcctccatcggcaacacctggctccagcctccgccggcagctccgcccttgatgccaaacacggggcccaaagagggttcgcggatggcgacgatgctctttttgccgatctggttgagggcttgggaaaggccgatggcgaccgtggtcttgccttccccggcgggggtcggcgtgatggcggagaccaggatcagcttgcctctggggttgtctttgatgcgctccagcgcggaatagctgagcttggctttatgctcgccgtaatgttccagttcctgggggcttagcccaatctgggcggcgatctcatctatgggtttcaaggttacgctgcgcgcgatctcttgatctgttagcatagggatactccttttaaggcttgatattgaataatctaaacggattttacgatctggcacggaggaaatgccgggagggacttgagcttattccttttctggcagaaaatcaggctatctctaacactgagtggataaatcaattctaaaacaagggcgcaaaaaactaagactggtgtcagtccgctctcgcgcgcgcgagacagctaagtctctgtcttcctggggtcatccttaacccggtgagggatgacctaaggatgatggcaccaaacgcagtagcagcaagggagggcgctatgaaggattatggagattattctaagtattttgtgaaaaggtgaaaaggtggaatggtggatacaagtccaccagaccccgaaacagaccctaccagactatataccgtgtcatcatgggcaagcgtgcttgacccgggatccggtgcccaggggtgggaaagtctgtttgccacagagaccggaggtctcttcatctgctctccgccgatgcccaggccgcaacccgctatacgcagtggggaatcccacacctcctcgcccagcgcgctgatccggtttgccatcaggcagttttctccatccagtatctgcgtccagagcgtgatcaggctgccgtcatctgcttgctgcgtgcagccagtgtaactcagatcctgcgcttcccgcaccacgacgtcctcagtccagacagggttggcaaaagccaggctggtggcgagcagcagtagtagcatagccgtgtgtttcatgaaaaagactccttttcaaatagattggaaaagataacaagtcccgcgggcaggcgctgcccttacataaagacgcaaaacaaacagcttacagaatgatagtttaaacaagtccgccatattcgcaacttctttctttaaaatttataaggcgccggatatacagcgtgaggcgcccattgcgagctgaaattgctagggcagcattgttctaaggattggttcatatcccttgtcttccgcaggtattcacagatcacaaacgcagcccagacgtctgttttctttgccctcaaaaaactacttgactgattctgccatttctcacataagaatttttcgactacatttcgataaaccaagatggaatacagattatgaaaaaacttaccgccctgatcggcctgacgctgctctgcggaatcagcctggcgctcaccctcaatgtaagcgttgacccctccgcctgggatggcagcctgcgcggccagcccacggcacccctgctggagcccggcgttcccgcgctcaactattaccccgtgcgggtgctgatcccctttggggaaaaggtgctcaacgtgagcgtgcaaagctccccttacctgttgcagcgcgatggcgtgtatctggactacgcgcgccagcagcagcccacttcgcagccccgtccggacgctactcagcccgatcccgcgatctggcagagcgacgcgctgttcccggccgccaatcaccgttatctgggcacccagttgcagcgcggcctccaatatgccgtgctggacctcttcccctggaaatacaatccggtttcccgccagattcacgcggcttccgaattcagcatcgagatagaaaccggatgggatgatgccctggccacccaacaggccaacttctacgcccccgccctggctgcccgctctgtggaaggatttgccctcaacccccaggccctggccagctaccagcaggcttcccgctatcggaaccacgctccccaaagccgcctgattgacctttccactccgcgccaaatggtcatcattaccaactccaccgcctcctcctggctgcaaagctatgccaactggcgtgacggcaacgacatcagcaccggcgtattccagaccgcggatatctatgccagctatcccggaaccgacaacgccgccaaggtgcgcgccttcatcagcgacgcctatcaagcctgggcaagcaccccccagcctctgcaatatgtgatcctgggcggcgatgacgagatcgtgcccctgcgcggctgctacggccaggtgggcgacacggttgatctcagaatgcctaccgacctctatttcagcaatctggatggagactggaacgccaatggaaacgacatctggggcgaaccgcaggaccaggtggacatgctgccggaagtgcatatcggacgctttcccgccgagacccaacccgagtttgaaaacatcatccgcaaaatccaatactacaccagcaattccacgttcagcaacaacaccgccatcatgttcggagaaaacctgaacaacaaccccctcacctggggcggagattacaaggacgaagtggccaccagcgtcccggaactgtaccacctgcgcaccatgtatcagcgcgacggcacctacagcgagcagggcgtctggaacgccatcaacgagggcgtccacgtgatgaaccacatgggacacgccaaccaaaccttcctgatgggacagagcaacggcagcatccagcagctccagaacaccgaatatggctttctttacacccagggctgctatcccgccgctttcgaccaggccaccagcggcgacggcgagagcatcgcggaacacatgctcacagcctcgggcggcgtctttgccttcctcggaaacacccgctatggctggtattcccccggcaacaccaatggcgcctcccagttctatgaccgcgactacttcatcggcctctaccaaacggccaacacccagtttggctccgcgctcagctattcccgcgagcagaacctcaatgccgccatcagctatgacgtgatgcgctggtgctactatcagatggtgctatttggcgatccttccatcgaggtcaaactgcctgaccccgccctgcccctgctcagcctggaaagctacactatcgacgatgtggagggcgacggcgacggcaccatcaatcccggcgagatcatccgcatccaccccgtgatcagcaaccatcagaattgggccgcggcccacaacgtgaccgccaccctcagcggcctgccagccggagcgcagcttttgagcgacccgctggtgataccacagttgttgccaggccagaccgccgatcccggcctctatttccgtgtgcaacttccgtccggcatcgattatggcagctatcagatcaccctggagctgcaatcgctgcatcccgtcaccaacttgagcactggaacccgcagattccagctcgaatatgaaatcaccctcattgacggcagctttccctgggattgccccgtgggcagcaaatccgccccgatcgtcttcgattttgacggcgacggcagcctcgacatactttacaccgataatttcggcaacagccatctgctggataacgcagggcagcagaccggctccattcccgcgcctctccagcaggatgtgatgcgcagcgccgcctatggccagttgattgacggccaggaaccggctctggtactcaccagccgcaccggtaaagtgctggcactggcaggcgatgaagtgcttttcgattacgatggcggcagccagttcctcttcacccccgtgatcgcccagatcgactggcagggcgggatggaagtggtggcgcactccctggatggcaagatccacgtcctggattcctccggaaacctgctgccgggcttcccgcttgaccttggctccgccttccacagcgaactggctgtggcggacatcgacggcgacggcggcaatgagatcatcgtcggctgctccaacggcaagctgcacgtgatcaaatccgacggcactcccctggcgggtttccccctccaggtctccggcgcaatcaacggcgcgcccaccatcctcgccaaccgcaggatagccttcggcacctccagccacctgcatctggcaacgcccgcaggcagcctggtcttcagcaagccgatcagctccgcgatgggcggcagccccgccctggcggacatcaatgccgacggcgcgctggatatcgtgttcggcaccgccaatggctcactctacgcggtcagccagagcggaatagaccttcccggcttcccggtgcagaccggcgccgtgctgcagaccccgcccatcatcgctgacctcgacgacgatcccaacctggaaatcctcgtttccagctatgtgaactcggtttatggcttcaaccacgacggcagcgtattggacggatttccattccagaccagcttcaacggctgcacgccctccacgctatgcgatctggacggcgacggctggctcaagctggtgagcggctattccaccggagtgctggtgctgaacctgcgccgcgcggaaaaggacaaccggccctggaccgtttaccgcggctcactcacccgccagggcagctacgtctccaccggtaacgtctccaatcccgcggaagaagctcccgccctgcgcaccgccctgctgcaaaactttcccaatccctttaatcccagcaccagcatccgtttccaactggcatccgaaggctccgtccggctcgcaatttacaacctcaaaggccagttggtgcgcgtcctgagcgacggccatcgttcccgcggctcacacaccgtcacctgggatggcctcgacgcctccggcgacccggtctccagcggagtctatctctaccgcctgcaagcgggtggaaaggtgcagtcacggcgtatgctgctgctcaaatgacagagatttgcattgacataaaacgcactaaaataaagtcttgaaaccagaaataaaatatacatagggaggctaatatgccaaaagtactgatcgccacagagaagcccttcgccgcggaagccgtgcagaagatcaaggctgaactggacaaggccggctatccccatagctggctggaaagctacaccgacgtgaaagacttccatgccgccgtggcagatgccgaagccctcatcatccgcagcgacaaagtggatgccgccgtcttcgacgccgccaaacaactcaagatcgtggtgcgcgccggagcaggctatgacaacatcgacctcgccgctgccaccgcccacggtgtggtggccatgaacacccccggccaaaactccaacgccgtcgccgagctggcgctggccatgatgatctacatggcgcgcggcaagttcaacggcaaaagcggctccgagctggctggcaagaagctggtgctccatggcttcggaaatgtgccccgctttctcgccaaaatggccaaaggcattggcatggacgtctatgcctacgatccctacatcagcgcggacatcatggccaaagacggcgtcaaacacctggataaggtggaagacatcttcagcaccggagactacatctccctgcacatccccgccaccgccgagaccaagaaatccatcaactggaacctgctcagcctggtgaaacccgactgcatcctggtcaacaccgcccgcaaagaggtgattgacgaggaagccctgctcaaggcctttgaggaaaagaagaaattccgctatgtgagcgacgtggaaccggaatgcggcgccaaactgatggaactctatgccgaccgctactatgccaccccaaaaaagatgggcgcccagaccggggaagccaacgtcaacgccggagtggcggctgccaaacagatcatcgccttctttgaaaaaggcgacacaaccttcaaagtaaactgatcagaccctgtctgagattgcaacccccggcactgcccgggggtttttcttgtcccggcaatccgcgccctgcgcgaatcgtgtatctccagtgcgatcatttgcgctccgcctctgctatggataacctttatacatttaatgagcgtagattgatcacctctttgccctcatttgccagggtgggctaagtctatattttccgtaggtcatccttaacttggtgagggatgacctaaggatgatggcagcaaacgcaggagcagcaagggagggcgctatgaaggattatgcggaatattgctggtgtttttggtgaatgtaatactatattgtttgcgttttatttttatcatagtgaaaaggtggaaaggtgtttttgaggtggaaaggtggaatggtggaatggtggaaaggttctctcgatacaagtcccaaccgacccccaaaaagaccaccccccagactaaaaaaccgtgtcatcacgggctccgacccgtgatccagtcttttaaaagaaacatccacgaattacacgaattatcacgaattaaaacagaatacaaggacaagcgtccggcttcaaaaaaccacacaagacccaaaaaccgcgtcatcccggcatgtcggggccctcgacggatcggttacgatccgttggggtaggatagcttgacccgggatccagtcttttaaaagaaacatccacgaattacacgaattatcacgaaataaaacagtatacaaggacaagcgtccagcttcaaaaaaccacacaagacccaaaaaccgcgtcatcccgggcagcgacccgggatccagtgtccaggggtggcaaagtccgtttgccacagagaccggaggtctcttccaaacaggcaactccgttgcctctgccgaacggacttcggcagcccgaggggaatggcaaagtccgtttgcccaaatacgaggggaacgcctctctaacgcattgcgggagatatgggttcagttttttcctgcctcatctatggtaagattattgtttgtagtaaagctctcaactccgggcttttttaggttgacagattttccttgctgaaatagacgaaacaaactggggttgcgttttgagttatagatgaaatcgtctctggaacttcatataaacgccaacaggtttttctttattttggagattaggataaatcttatgaacaagaattcaggcattcgggataaccgtaaatatggcacagtgggcgacttcatttccctaaacgttactcccaacagcaagttggcctttgtttccgcctattttacaatctatgcctatcagcagttgaagaacaggctggacaagatcgatcacctgcgctttctctttggcgagcccagattcctggcttccatggatcccaacaagaccgacaagaagcagttcgagatagaggacaacaagctggtgatctccctggcaaacaggctggtgcagagtaaaacagcccgagactgcgcggaatggatcagggagaaggtggagataaaatccatggtcaagccaaatttcctccacggcaaactctatcacatcacaaatgaaaacggggttgagaaagccctgcttggcagctcgaacttcacagttaatggtctcggatacgggaacaaacccaatatcgagctcaatatcgaggttgccgacgatcgcgacagggcagatctcctggcttggtttgacgaactgtggaacgaggataaatccttggttgaggatgtcaaagacgaagttctaaaatacctggcaaaactctatgtgcataattccccagagtttatctattataaaaccctctatcacctctttgagaagttcctgggagagcaagctgacaaggggctgttaaccgaaaagaccggctttttcgacactgagatctggaacatgctctacagcttccaaaaagacggtgtgaaaggggcgatcaacaagttggaacgccacaacggctgtattattgccgatagtgtcggcctgggaaaaacctttgaagccctggcaatcatccaatactatgagaggctgcaatacagggttctggtactctgccccaaaaagttaaaagataattggaccgtttaccaatccatggccgccaacaaactcagcccctttaccagagaccgctattcctacacggttatgtaccacaccgacctgggcagagcgcggggaacttcggatgccaattccatcgacctggcgaatttcaactggggcgcctgggatctggtcgtgatagatgagtcgcacaatctaaggggaaatccgcgggaaaagatcgacgaaaacgacgagttgagctataaccgggctggatttcttttgcacaaggtaatcaaagagggggtgaaaaccaaggtgctgatgctctccgctaccccggtcaacaccaacctgaaagacctgcgcaaccagatacactatatcaccgaaggcagggacgacgccttctacgaaagcctgggtatagaaagtgtctcctacaccatgaaacaagcccagagccaattcacaaactgggtgaagagcaacaaagcgggacaaaagaaaagctcgcaactcttcagcgccctggacagctcgctcttcaaactccttgacgaacttaccatagcccgcagccgcaagcatattgtctcctactacaaggatattgataaaaagagctttcccaagcggctaacgccgatctcggtgagcacgaatatcgacctggaaggggatttttgttcctacgacaaagtgaatgaagacatccaggcttacaagctttccctcttcaaaccctccagcttcgttctggaggagtttaaggaactttatgagccaacagagaaagtgaaggagttttcccaagcccaacgcgaggattttctggttgagatgatgaagataaacttcctcaagcgcctggaaagcagcgttcattcctataccctgaccctcgggcgggccttggaaaagatcaacagcctgcaggacaagatcgccaaatttgaatccggccaaactcaagatggggatatttactcctttggcgatgaggacgcggtttcaccggaagaacaggataacagcgatgatttcacagttggcaagaaactgaagtttgaactaaaacacctcgatctggagaaatggaaggaagccctgagcaaggacaaagaccagttgatctcgctttacaacacggcgagcctggtaactccggacaaggatgccaagcttgaggaactgaagcagatcattaccaacaaactgaaacatccggtaaacaaggacaacaaaaagatattgatcttcaccgcctttgccgacacagccgattacctctatgagcagctcaaggatttcattcacaaagagcttggtctcaatgttgccctggtcaccggaagttctcataataaaacaaccatcaagctgcccaaaggtttccagaacgacttcaacgccatcctcacctgctttgccccttttgccaagcagcgccacaagatgcccatcctgccccaggatgaagagattgacatcatcatcgccacggattgcatctcggaagggcaaaacctccaggattgcgactatgtggtcaactacgacatccactggaatccggtgaggataatccagcgctttgggcgtatcgatcgcatcaacagccccaatgccaaaatccagatgctgaacttctggcctaccaaagacctggacaaatacatctccctcaagttgagagtggaggcgaggatggctctggtggatattaccgccacaggcgaggacaatctcttcgccgaagaggaatttgaagaactgctttccaacgaaatgaagttccgcgccaagcagttgaaaaggctaaaggaagaggttatcgacatcgaagacatggaagacggcatcagcctgaccgatttcactctggatgatttccgggttgatctgcttaactatatcaaagcaaacgaaaaagagctgcgcgaagcccctcttggcctgtacaccgtggtgccctctcccgaccacgaactttgggaccactcggtcaaagtcagccaggaacacagggaaatcatccggcccggtgtgatcttctgcctccgccacaacgaatctggcagggaatacgaaaagctcaaccctctccatccctattttatgatctacatccgcaccgacggcaccgtccgtttccgtttctttaatgccaagcagatcctggatatgtaccggatcctggccagcggacggcgaagtcccatcgaaagcctttgcgaccagttcgaccaggaaaccaaatcgggcgaagacatgagagcctataatgagctcatccagaaagccttaaaaagcatcaaagcctcccttgcaaagaaaaagcaggatcaactccaaacccatggcgatgctgtgctccctcccctgaaacaacatgaccccggcggtgaatttgaactgattacctggctgataatcaaataagcaccagagagaagacctatgaacgcaaagacagacatgaaactttccatccaggaggctttgaataactttcaaacccgtccttttgtggatgccgcctacgatttttggaaagtcctgggctatgaatcccagcgtagattcgaagaagtatcctatacctattcagaatttacggaagcattttctacccgccatcaacttaggcctgttcaagccttgaaagagcgctggacaaagatcaatctgcactttcaactcacaaatgatgagatcagagaagctggctccttctccgttcaaacgactataccggggtttaaaagtaactcggttgactccaatgaggttaagtcgtatatcttcgcatcaattgaactgaaaggacttcatgccacaagaaaagagttggttgcattaaccagggaaatcaaccgctgcttcgcgatgcctgtgctgctgctaatcaaatatggcgaactgctgactacatccgttatcaaccgaaggctgaacaaacgcgacgaaacgagagatgtcttggataaagttagcttggttaaggatatcagatacgccactccgcacagggggcacattgacattcttgagaagttttgtcttgggaacttggatgtttcatccatcaaccaactgcataaagcttggcagaaacaactctctatccgggaactaaacagggaattctataatcaaatcatagcttggtatcgcacttccctttctattatcaggctcaagtttcagtgtcaactgtctgaagaagagcaaaacgagaccaagaagcactttctggtcaaattgctttgccggttgatgttctgttggttcctaaaagaaaaaggccttattgacagcagcattctggagctgttctcagacaccgatgttccctatccgatagtaaaagataacgataatcccgaaagcaatagctattatcgtggcattctgcagacagtgttcttcgattgcctgaacgagcctaagaaaagtcgtaaactggataaaggcaaaattgaaaaatacctggatcctgcactggatttgactgttttcgaaagaataccatttttgaatggaggagtgttcaaccgtgacgatgagtttttagaagaccactgcatacttaacaacaacatagcagactcggatatcagcatacccaacaagatcttctacggctggcaggctcctggaaacaggagatcagatgatgttcccgggttgaatgtgattctgggcaagttcaagtttaccatcgaggaaaacacacccctggaagaagatgtcgcgcttgatccggaactcctaggtatggtcttcgaaaaccttctggctgaactcgacccggaccccgacatttccagaaacgctcgcagaagcagcggcgcgtattacactcccagggaggtcattgattacatggtcaatgactcgttggtgttgtatctggagtccaaggcgaaagaaaaggggctaatggagtatggagacaacatcagattcctagtttaccatgatgttgtcaatgccaatgagaagcgttttgacgattttgtggttgacgccctggataaaatccgcatcctcgacccagcctgcggcagcggttcatttcccatgggcatgcttcacaagatcacacggatactcaatctggtcgatcccgataactctaaatggttacacctaaaactggaaccgctggaaggaaaatatcgcgacgattttggcaaacacctgaaggaacactacgacgactactcccgcaagattggcatcctgcgtgactcaatctttggagtggatatccaacctttggcagtacatatcgcaaaactgagattcttcatatctctggtggttgaccaaaatacagactgtagcaaagacattggagtgatgcctctgcccaacctagagaccaacctgatctgcgcagattctctcaacgatattgaaactgatatattcgaagaaatagtatctaatgacttatcaagagcgattgaggaatactatcaggcggaacataccaaggcagaaaaagaacagctcgctgaacgtatttccactgaacttagcaacttataccaaagcttcaagtggggtcttaaaaatccaagcaaagacaggctcaaagtgttttggaaacgatggtttatgtatggcaatatcgcctgtcccttcttccatcccgaatgtttctttcccagggtgatgaaggaaggaggattcgatatcgtaatcggtaatccaccctatggaggcgataaaatctccccggaggttagaagtagccttggtttaggttcaaatgacccttatggtgctttcatcgcccgcttcatgaatttcaacgattttcccactccgctgaaaccgcatggggttttgtcttacatcgtttccgacacttttatgacgatcaagtcccacaaaaaattgcgcaggcaattgctcgacaactatatccacaaaataatccgcatgcacccggacaccttcaagcaagtggtcaacaccgtggtaatcctgtgccagaaagcggagccagggtatagcataccagattcccatcaatgccttatggtggatatgaccaacattagcatccacaagtatctggataagttcctggaaatcctgtatgatatttcagacgcggaaaaagcagttgaatactccgacaatgtccatgccgtgttcatttatcaccaaaacattatccataaatgcagtttgctgcctttcttcgtcgcccctcctaagttgttcagtttaatgcatgatgttggcgttgatcggaaccctaagaataaagctgaaagaactgtagagatcaatggtaagaaggtcacgcttgtcaaactctctgatattgcgtcggtaactcaaggacttgccactggcgacaataaatcgtatcttttccagacccccgaatctggacccacatacagaagcattgagccatacctgaaatatgtcgtttccgacgcagaactggaaaaaatatcacaaaatgacaatatccgccacaagataatcaaccttggctttcatcaatcacgctccgagcaaccatttgaccctgaccgttggttcggtggaaaatacattgtcccctatgacaaaggtggcgcttcttatacagaatccggttggctgccaaactactatgttaaaactgatttcttcatagattggagttcttgggctgtcactcgaatgaaaactctgactatcagagaaagggatggtaaaggatcaaatgctatctgttcaaggtttcagaacagtgacacatattttagtaacggaataacattttcgattgtaggtcaatatgccccaacatttagatacaatagtagttctgtttatgatattagaggatcattaattaatgttacaaccccttatctccaaatagacaacattttgtctatcctttgttcaaaattatgtaaatttatattcaaggcattgatataccatggtgtagctgcagaaatagatgcaatcaaagaaataccaattatctgtggaaacaatgataaaatcatctcattagtccgtaagatcataacaaaacagatatctgatagatactacgattattcaagtaatgaacaaaggcaaatagataaaatcatctatgaactatacggtctgtgtgatcaagatattgagcttgtggaacaatggtatgcccgacgttatccccgtttggttaacaatgcgttattggatgatcaggaatccctataagcaccataactgggaagatgttctcttccgggacagttatagcctctacggcatcaagggtagatacgctcaaaaactgattgcgtctatgcttcccgatgataaggccatctattatgaccctcataagcgttcctgcatgggagtcttggaagttgcccgcgaaccttttcaggattttaccgcttgtgaaacgcaacgtctgtgcgtggatttcaagcccatcaaaaccttggcggaacccgttgttctttctgtcctcaaagaaagtgatcttttcaagggttccctgttcctgcgccaacccaggttttcaataacagagattagccctgctcagtttcagtttatattcataacgtaacgatagtaccaaggaggtatgcacacatgaactgcgttgttacagaatgtccgatatgccgcaacccactgagtgaatcacccatagggacagattacaataataatttccatttccgctgtgcctattgtggtgaatttgagatcaatggctttaggatggtaagtcattttaatattaataaaccaggagtcaaaccagccagagataaggagctttgtattgcgctcaggcatctttacgaagaatcgaaaattatttcgaaaataacagaccaccaagacatcgacaagataaagcaaagcgtgagatttccctccggtccacttgagttgatagatatcctattgttatatttacataagcatatcactcgagtcgatcaagtgaaagccattgcggaaactgactgtcccttgctgtttatgcatgacaaacaagaactgtattacttagtcagattcgcaaaaaacatagggtatgttgattctaatgatagttttctcgctaagacatatactctcagattagagctaaaaggctgggagcgaatcagccagattgtctcgggtagtgtgaaaacaaaacaggtctttgtggctatgaaatttggagatacagaactggatagcgtatatgagaatggaatacggaaggcagttggttcacttgatctgataccataccgtgttgacaaagaagagtataacgacaaaattgatgataagattattgcagagattaacaaatccgatttccttatagcggataccacaatccccaatatcaacgtccactttgaagccggttatgcgatgggccaaagaaaaccggtgatctggtgttgtaaagaaggaactcaaatatctgatatttttgacacaagacagtacaaacatattatctgggaaaacgctgaagatttggtcgagaaattgaccaacaggataaaagcaacaatcctggacgtctgaatgcaaagcaatatcatgtaaatcaaggaggttataatgtcaagtcaggctaaagtgtttatcgtgaaatacgcaagcaaagcggattacaaggtctattttgtaaaatatgcatcgcaagagaaaaacgcccaaataatagccggaggcaagctggttaagtatgaatcacaagcaaatgtaaaggtctttatcgtgaattatgcaagccaggctgatatcaagatcatgcacgagcacttccccaaataaatacctcgcatagctcatcgcttgaagccactatgtatgacagtccagaatgatctgttattaaggctcaagttgatctctcgggatcggtttgaaagacccgatgcatattcctccctcaaaaggtctgtatatcaaacaatagagaagcacggtgtgttatcatcaacccagatagcagattcaatgcaacttcccattcgttcagttagaagatacttggagtctttaactcagaatggccttgtatcccgtgagggtaggggcccatccacagtttaccgaactacaaagtaatccggccaaaaagcggccaaactggccggaaatggggagtattgtataaaaagactggatcctgggtcaagcaagcttgcccatgatgacgcggtatgtagtctgttggggtttgtttcgtgggctgccgaagtctgttcggcagaggcaacggagttgcctttttgggagagacctccggtctctgtggcaaacggactttgccaccccctgagcactggatcccgggtcaagcaagcttgcccgggatgacacagtatatagcctggtggggtttgtttcgtgggctgccgaagtctgttcggcagaggcaacggagttgcctgttggggagagaccttcggtctctgtggcaaacagactttgccacccctgggcaccggatcccggctctatacaccccaccaaaccgctacgcgctttggcgaggaccccggcaggccgtgatgacgcggtttttgggtcttgtgtggttttttgaagctggacgctgtccttatcctgttcttttaattcgtgataattcgtgtaattcgtggacattattaaaagactggatcccgggtcaagctatcccaccccaacggatcgtaaccgatccgtcgaggaccccggcttgcccgggatgacactgtatatagcttggtggacttgtttcgtggccttcttttcgctatttcaccttcaaatatcctgctgatcctgtcgatcctgtcatccgcgttctatctcttttttacaatcaccacgacaccacctcaccacgaaggtctcctttccacctttccacctcaaaggaagccccgatatttgcatgaagcctttctaatctctgggcaccaaaaattttacttgccttgttatcgcactatcaattagtgtgaccccaagggtggcacgggctgagatcattcccgtggctgcccctgaatccgataaacctgtaaggaggattatataatccatgtggactattattaaacgttgggggctgtttttgacagtcaacatcctggtgttggctgtcttgggttttatcatgcagatcgtgggcgtgaaaagctcggactggatcgggttgctggtttactgcgccatattcggctttgccggagcggtcatttctctgctttccagcaaagcgatggcgaaggcatcctacaggatcacaccgctcacccgggagacagcccgcggcaaagagctctatctctttgatacgatagagaaaatggccgcccacaaaggcatcaggatgccggagtttggcatctaccaggcggcggacaacaacgcctttgccaccggcgcgtccaaaaacagatcgctgatcgccttttccagcgggatcatgcaaaacctggatgaggaggaactggctgccgtggcggggcacgagatgacgcatatcacggaaggcgacatggtcaccaccaccctgctgatgggcaccatgaacacctttgtgctctttctggccaatatcatcgccgccctcctgagcggcagaagaggcagaaacgatgatgacggggcttcgtccgggatgatgcattccgccagccaggccgccatcgcgatgatcatccagaatgtgctgatgatccttgccaacatcgtgctggcagcccattcgcgccaccgggaatacaaggcggacgccggctcagccgccctgaccacccccggccacatgatcaccgccctggaaaagatcagcaaagcttacgtgccttcgcgccgcaaagacgcctatgccattgccaagatcaacaacttcagccccctctccctgttcgcgacgcatccgccggtggagaagcggattgaagccctgcgtaagatgatggtgtgaacaagagattcatcctccggatagaaaagctggctctgggcggttttggcctgggctttcacgagggcaaggcgatctttgcccagcggatggcggtcggcgacctggcggaagtggagctggtcaaagaacgcaaggacaccgcctttgccaggcccctgcgttggctggagcggggcaagggagtgcgggaagcggactgcgcttcctttgacctggacgacccctgcggaggctgcgattggctgatgctggactacccggcgcagttggcagccaagaccgaactggtgagggaattgctgcagcccctggccccggatttgaagatcggcgccatgcccgcttccccaaatcccgtaaactaccgcaacaaagcctttctgcccgtgggttccggcgccgatggcctctattatggcatctacgcgcgctggtcgcacaggatcgtcccccatcagcgctgcgtcctgcatccccaactctttgacaccatcgcccagcgttgcctggaaatctgccggaaagcgggtgtgcaggcctactctgaagccagccacaccggcactttgcgccacataggcctccgcagcaacagagatcaaagctcggtgctgctgatcctggtgaccaggggagccaagctgcctttttccaacctctttgtgaagcagatcaccgcggaattcccctgcatcagcggcatcgtgcaaaacatcaaccgggaacggggaaacgtgatcctgggcccggaagacaaactgctgtatggcaatccctggctctttgacgaactggcgggcaaacgcttccgaatccactaccgcagcttttggcagatcaaccgcggcacggcggaacagatcatcgcccgcctgcagaaactgatgggcggcgcgggactggtcttcgacgcctacagcggaatcggggcgctggggctgaacctggccgcgcaggcagaacgcgtgctctgcgtggaagaatgccgggaagcggcactggatggggaactgaactccgaactgaacgacctggcgaatgttgaccatctctgcgccagagttgaggacgccctgcccgcgctgctttcagaccagcaaagcagcccctgcaaaacgccggatgtgatcattctggaccctccccgttccggagtgaaaccggcagccttgcaagccataatcgacacgggtatcaagcggatattctatctgagctgcgcgcccatgacactgcacagggacctcaagatcctgcttggcagcgggcgttacaaactggaaggcatccagacctttgacatgtttccccaaacctggcacattgagactctggcctggttgagccgcctatgaagcagcttggcgtcctgttgctctgtttgttcctgctgtcctgcaatttggccagcagtcccgaagacatggacaaaatccgcatcgaggatatcctgaaaggcattgcccgcgatttctgctggaaagacattgagggcatcatgacccaggtgcatccggactattaccacaaagggatgtatggctttcaactgcgcgggctgtggcaggaccgtatggcacgcttcgacctgcttgacgtggaagtgcgggatattgacctggctggctcccgggcgatcgtgagcatgaagctgaccttcacggccgcggacagcactctcagctatctggatcccgacaccgagggcgacgcttcctatttttaccgggaggatggcgtctggtttctctgtggcaatcaacagaatttcaagtagggattcagacttatgcgttgcccgagccaagaaccagagacagggctttcaagccccgctgttccatcaggcaaggaaaaaaggatttgacaatattgcgcagttgtaaggtgatgcaatttaatataagttactaaattgaaaaagcataggagtaagcgtatgaaattgtacatacgtgttttcggactgatgcttgtcctcgctctggctctggccggatgcaaggtttcaacaggcaaggatcagaacgggcaaaccctggatacggttcagggtctctttgtgcgggatattcccaacgatggaggcgatggcctggtaataggctggaagcccctgccccgcgaaaagagaatccaggaataccgcatttacaggggactcacccccgattccctgttctatcttgcatccgtggcggtgaacgtgaaaaccggcgttgcctcggacagcatgtattactacgatagcggctacaacgattttgtggatatcaactcgcctggaaagctcaagcacgaaaagcagaagaaaggcagcatcctgtatcgcaacatcccccgcgatatggaattggtagccaggttgagcgaaggatacaacctttactcgataatggaatccaaagactactatcgccggacgaagaaagctttttccgccgattcggaagacaagaccgtctattctggcgtgaaaatcaaccagcagagcatctctgcttccctgaagacctacgatcctgccagcgaagaagacaagattttgtattactataccgtggttccggtgaatgagcgcaaccagtatctgggaattgccgaacccaagtgcggatttcccgtggatgacgcgcccgaggcttctcccaatctctattgcaccgctttgcaagacagcatgacgctgcgctttgagtgggagtatccggtcaacaaatccgacctcgccttctaccagatcatggctgtgcccgagatgccggattcgcaatggtgcaagatcaagggcacgccccaggccatggccaacgcgctgcctgtagcccagggtcaaatcaatggaggcgcgttcaaaaactacgcggcggtcaaacatgacgaattgccagccggcttgagttgggaacgggcttccaccagccgttacgcgatccagttttatgattacagaaacaacccctcccccttgtcccgccaagcctgtgtagttctttcggacagcagcaagctgccccaggcagcacagtttgtggtggaagacaaacccaacgacaagggcgacaggctcacagtcgtttggaacgaaccgatagtattcatcagcaagacctccattatcaaacgcgagaacggtaacaaaggcctgttcgcgaagctcggtctggcaggaaagggcggcaccaggctgaagatcaattaccagcttaacaagaccgacgtgcagaaggtcaacaatatctactttgaactgctggttcccggttcggacaagccctttgccagggtgaacgaattctatcaggacaacatcatcaaggtcaccctgcccaagggctatgatctgaacaagggcctcaaggtgcgcatcacgatgaacaccagcccttacgagatcaaccccaaaaacgggcggatcacatatcagaaaggccgtttggtacccaactatgtgttggagcaaaaccttgtctgggacaaccagatgatgtcgctgatgccttccaacgaactcttcaggaatggagtggatgtttcctccgtgcacaatacggtgttccgtaaaacattcagcggctcgcagtttaccctggtgaaaaagaacacttcctacgataatagcctggatgtcaccatcccttacgttgccaacgtgggcaagcccgtgctgggcttcaactttgtgaagggcggcacgctttacacctatatgggcggcgagcgctacacccgcaagctgaaggctggcgaaaaggttcaaaacctgactttggtggaatcgcagatcgacctgaaatatgtcaagcaggacgatcccaaggattcccgcaccatccgtaccagcgtgttcaaggatgaagccgcgaaggaactggataagatgcggcaggacatcaaggacaacaaggccgaaatagccaccaagcaagcggaaatgaaagctattcccggcggggctgccaatccccaggcgcaggctttgcaacagcagattgaagccttaacagcgaaaaacgagagtctggccaagaccatcaagatctacgagaatgacccggattacaagaaatccctcactttccgcggcaaccgcggcagaatgaacttcgtggcttccatccgcgaaccgctcagccgcctgcaatcctacatgatcgtcaagaccaacggccgcggcctcttcaccgaatcctatcccgaaaaggatgcccaaggcgactatatttacaacctggcggtatccaactggttcgactggaacaaactggtcaccctcgtcgcctgcatcatcttcggcgtgggggtggtggtcttcgtgcgactggccaagcaaggcaaggatctctatatccgtcccatcgcgggcttgcaggagatcgacaacgccatcggccgcgccacggagatgggacgcccgatgctgtattgtatgggtaacggcggtctttccgatgtggccaccctggcttccctgggaatcctgggactggtggccagaaaagccgcggaatacgacaccaagctgatcgtcccctgctacgactacattgtcatgcccatcgcccaggagatagtgagagaggctcactacgccgtggggcgtccggacagctacgataaaaacaacatattctatctcacctcggtgcaatttgcctatgtggctggcgtgaacggcatcatgatccgcgaacgcatggccaccaactttttcctgggctatttcgccgcggaagccctgctgatgacggaaaccggaaacaccgtgggagccgtgcagatcgccggctcggacgccatcacgcagatacctttctttatcaccacctgcgactacaccctgatcggagaagagctttacgccgcctcggcctacctcaaccgcgagccgatgctgctggggactctgaaagcccaggactatttcaagttcctgattctgatcttcgtgattctgggcggcattttggcaagcttccaggtcacaggtttaatgcaactattccctattaaatagaagaggtcgtaaatgaagaagacaataccattaatgatagtgatcctgggaggaatcgtctgggtgctgtgggtctttgtgccgcacagactgctgcaggatgtattctactacgatttctatgtgccctggattcgtgccatgtctcccttcgggatgctcttgggcgtgatcagcctttgcatgatgcacacatccaagattcgccgcaaagctcccaaatggcaatacagtttcttctttttcgccggtttcatcatcacggctttggctggattcatcggcggaacccagaagggcggcctctatatgtggctgttcgaaaatatgcagatgccgatgagcgccacgatgttcgctctgctggctttttatatggcttccgccgcctacaaggctttccgcgcccgttccgcggaagccaccgtgctgctggtggcggcgatagtggtgatgctggctcaggtgcctctgggcgtcaagatcagcaaatacctgcctgatatctcccaatggatcctggacgtgccgaatctggcgtccaagcgcggaatcctgctgggtgtgggtctgggcagcgtggccaccaccctcaagatcctattgggcatcgaacgctcgtatctgggcggagattaaaggcggaggtgaaaatgaatctatttgaaagactgcaaaagctcgaccgccggtggatctacatcgtggtcgccctggcgatcgtcattcccctgatgatcccctataactccgacaacatcacctctcctcccacggagaacacctatcagctaatagactcctatgccggccgggaagaccgcgctgtcctgctcagcttctggcacgatgcttccaccatgccggaactgtatccgatggaagtggcgatcatccgccactgcttcgagcgtaatgtgaagctcttcctgctttccttcctgcccaccggagcccccatcatcgactatgccgtgaactccgtgaaagaagagtatccggacatcaagtctggagtggactactgcaactttggctatatccccgccgccctgatcatgccaaccatcatcggcatgggcgacgacattgccacggcggtgcccaccgacgccgaagggcgcaaggtggaaaacctgcccattatgaaagggatcaacaactacagcgagatgaacctggtggtggagttttccggctccgtggcgggcggctactggctcacctatgccaggcccaagttcggcaccaacatcgccgtcggcgtcacagccgttatggcggcggacgaatatccctacctgcaaaccggacagttcatcggcatgctggcgggcttgaaaggcgctgccgaatatgagaagctggtggatgtctttgccgcttaccgcgctcccggcgaccccatgggcgtcacctacgacgaggaaggcaacaagatagtccccggccgctccttcagcagcgacgttctggaggacgaatccatccagaaactgctcaagatcaccactcaaaccaaggctgttttctcgcagaaggagtttgacaggttcctggccaactatcctccggaagtccaggctttgatgagcagctacaagaccgaggaggacaacaacgtggtcatcgacgtcaccaaggtgaaagaggacgaccagaagaagcttggctacacagcctggaacgacctcaaccgcatgacccacaacaccatctataaattcaagacggcccgtatcggcatgaacgcccagtcggtggcccacatcatgataattctctttatcatcatcggaaacatcggctacttcatcagccgggccaaagcgcaaaagaagtaagggaggataaaatgtcttttgaattatttagcaacctggttggagccttcttcaccctctgcatcttctccttcctttacaaggacaatccgttctatcagatgtccgaacaactgctggtggggatatccctgggctactccgtggtactcacctacgagcgcgccttcatccccttcttcgtccagcccatcttcctcaaacaccaatggatactgatcatacccagtatcattggaattttctacctgttccgcttttcccgcaaatacagctggctttcgcgctatccaatcgccttttccatgatgggggtgggcgcgtccgttcccttggccatgcacaacagcattctggtgcagatgcgccaggctatggtgccgatcgaaaacatcaacctgttgctgatcttcatcggaactatcgccgtgttgctctacttcttcttttccaaagcccacaccggcgcctatgggaagtttgtggatatcggcaaatggtacatgatggttggctttggcgcgtcattcggactaaccgttatggcgcgtatctcactgctgatcggacgtatccagttcctggtcaacgacgtcatcaaagcgatattcaactaaataaacacagatcatgaggggggaagcccggtcttccccccggactctgttcaggcgtcgatgccacaccagcaatgctccaagggataaagcaatgaaaagatactttttattctgcctcttagttctgatatcactcctgctggccatgggcggctgcgtccgcggccgttccgcaaatgccggggtggaggtctttgaagctctcgacatgccccacgacgatggcagcggagtactcctgagatggaagcctctggacaaaagccaccggatcatccaatacaacgtctatcgcggccattcgccggacagcctcttcctgctgggcaatatcgaagttgatcccaaacagggtgtgatgggcgaatacctctttttctacgaccgggattatctccccctggtccagtttgagactgctccctcaaaattgaaaaaggaaaaacaccaggctccggacagtcccctctaccaggcagttcccagggacgcgaacgtcgtgagcaccatgcttccccattacagcgtgctgggcaatctcaccgcccgcggtttctacaacggctcccgccgggtggaaaaggatggcgaagagggcaaggaagtctttgccggctacaagcttaaccagtttgaaagcatctatgccaaccccctgcctggaaacacctactattacagcgtggtggcggtgaccgagacaggcaggcgcactcccgccgcccgggtctgcagcgttatccccgttgacaaccggccggattccagcgcggtgtttgccaccacctacatccaggacaccaggcagttcaagtttgaatggagccctcccacgggaaccaccgatatcggcctctggcagggctggctgatgcccaaaagcctactcccgctttaccggcaggaacagcagaagaacgccgccgcccctgacagcgtgttttacgccgcctggcaaaacggctccataaagctctttgaacacacccctccctattggagccagaccttttaccaccaggtggacgcggccgcggaaggcatcaatctgccttccagcctgcaggactacattccggtgctcagctttatggactacggcggtttccaggcagccaccctgggcaaaagcgcgcaggtaaaaaactccgcggaactgcccatcgtgccggctttccaggtgattgacaaggtcaacgacaaaggtgacaacctcatcgtttccttcggcaagccctttgccttcataacgcaggcttcctataccagctcccggaaaaacaagctgagggtgaactacgaactctccaaaaacgagcattacgagatagacaggctccgctttaccttccaggatactgccaaaaacaccttgggcacggtcacggaatactatctggacaacgtgataaagttcaagctgcccgctggcctcgccaaaaaccaaagcttcagggtgcgcgtcgagtttcgcctgcggggagagaaggatttcgatccccaggtggtctggcaggatgtgacttacgacgccaaggccttgcgtttcaacggcagcggggtcaccctcaacggccagttgctcaacaagtatttcttcgatgtttttgccaaaagcaaactggattcggattacagccccgtcatgcgcatcggcggcatttcccgcgcctttgaccacaccatcccctttgaggacaccgtcacccccgagatcgtcggctttgaccagaagaccggcaggctgctgcttgaacccaatttcaaagtggcaaaggaccccgtcagcggagcggttttgtgggttcccctttacaaacaggattttgccccctatctgaccaatttggagaaagaactggccgcgctcaaagccgggctggcgcccggagacagcctttccgaggcagcccaggaattgcgggacaaacaggccgaactggatttcgcgcgcaaccatcccgcctacgcccaggccaaagacgcaaagtcggacaaaacctggcgcaaggtcttccgggctgaaaaggacagaaacagccgcagctacgcctatcaactgctgatgaccgatggcaagggcttctggaacatcgccgaaccagcctccggcgaaggtggagagatttggaactatcccgtgggcaactggttcgacaacaccaaatgggccaccctgatcgcttcgtttgtaatgctcgcgctggtggtttacaccgtatcaatatcccgccgcaaagaattgtatatccgccccatcgcgggattggctgagcttgacaacgccgtgggccgcgccaccgagatgggacgcccggtcatgttcgttcccggctggggcaccctgggcgatgtgtgcaccatctctgccatgatgatcctcaaccagatcgccaaaaagaccgctgaatacgacatcaggctcatctccccccatgtggactactttgttgtccccttggcgcaggaaatggtccaaaccgcctacagcgaaatgggcaggcctgacgcctacaaccaaaacgacatcttcttcgtttccgacacccagttcgcgttctgcgcggcggtaaatggaatcaccgtgcgcgaaagggtcgccaccatcttctatatgggctacttctacgccgaggccctgctcatgaccgaaaccggaaaccagtccggagccatccagatcgccgccaccgatgccatcacccagattcccttctttatcaccacctgcgactataccctcatcggtgaagagttctacgccgcttccgcctacctttcccgcgacccgagcctggtgagcatgctcaaggctcaggactattttaagctgattatcgtcgtctgcgtgataataggggtggtcttatccactgcccacgtcaacgcgttccttaacttcctgcccttcgagtgatcctgcccctgcggcggggtcgctcccggtcgggttaaacacccaatataaagggagatcgaacgatgcgagtcctgcttgtttcaccccgcgcgcgcaccagcggcctggaaagcctgcgcaaggggcatcagattatccagggcctggtctatgtggctgccgcggcgagggatgccgggcacaaggccacggtggtgattgccgaccgcgagaccctgccccgctatatcaggcgctatcagcctgacttggtgggcgtttcctgcgtgaccgccacctatcccgtcgcccgcgaaatcctcatcgatctggcgcaaaactatcccggcctgcccaccatcatcggcgggcaccacgccaccttcatgtaccgcgaagttttggcggagaccggcgtcagctatgtctgccggggtgagggggaggaggtctttcccgcccttctggctgctctggaaaagggtgaacgctatcctgaaatccccggtatcgtcttcctcaaggacggccgctaccacaacgacggccacatcgctattttggacgacctcagccgcctgccccgcatctccatggatctggtggccccggagttcagcttcacgcccaagctggtttccagccgcggctgccccttccgctgttccttctgctccatctcttccttttatggcggcaaataccgccagcgtcccgtggagactgtcatttccgagctggaggagttcgtttcctggggctacaaggatttctggtttcacgacgacaacctcaccgccgatatcagatgggtgaacgaattttgccgccagcttgaagagcgccgcctcaagattcgctggaactgcatgagccgcgtggacgttatctacaagcatcccgagctttttgccaggatggcggcctgcggctgttcgctgatcaccatcggcctggaaagcggcgttcccgaagtgctggaaaagatgcacaagcagatcgacagcacccaggtgaaaaaggcggtggacacgctcaaccggctcaggatcagccatgtctggtatatgatcctgggcagcggcgatgaatttgaccatccccgctatatccgtcagaacatccgctttttccgttccctgcccctgggcattgtggtgatctccctgctcacgcccttccccggcacggaggtctttgacaggctgcaaaaggaaggcaggctgctccattacgactgggaaaagtatgacctcacccactgcgtttaccagccccaagggatgagccccaaggatctggaacgcttccagtccaaagcctacctcagcatctatctgggcaagaaatggcggctgatccccatgctctacaagggatttcgctcagggacattgaagttccactcggtgagcacaggtttcaaggctctgctcaggacggcccttttcaagaccaagttttcggacgcgatcatcaagcgccgctgaaagaatcggccaccaggccataaagccgtgatccagtctttttgaataatcatccacaaattacacaaattaacacgaattaaaaagcaggatacaaggataagcgtccaatccaaacacaaccaccaagctacaaaacaaatcatacccgacaatattccgcgtcatcacggcctaccggggtcctcgccggatcggtaacgatccggtggggtggtttgacccgggatccagtcttttggaaacaaccagccagccccgaaataatccttttatgtcaatccgtggcaatctgcgccttttatccgcgtgtatctgcgcgaactgctcgccccgggatcacacactgtatagcttgggtgtggtctgtttataggtcgggtgtttactttgcccgcgcaaccaacatcttgagagagatactatggctcccggtgcttatcaggcagtagtacacaccgctcgcgcagatgttgccgtgcctgtcctttccgtcccagtttacgaaactggttccggctgttaggttccagtctctcagttcctgccccacggaattcaatatggccaaccttgcttgcaggccgtctttgaccccgcaaactatctcgcaactgcctccctcgggcatgggattgggttccaccttttccagccagcattccgaggcagcgggggagtccggtttggtggcaggttcacagctcatgagcgacaggcagcttaggatcaagatggctgccgatgtatatagcattatcttgttcataattccttcaatcgcggatacgcgtcatttgcttagcagttgatacaagcccaggatgtttgccgaaacgccataatcgtaggcgtttttttggttcctcagcctgcccctgggaaaaagtgcgtgattcaggcgcaccgaaaagaggtcgcgatagtggagattgacgccccagccgtaggtttggccgctaatgtttccagccttgtcatggtggtatcccgcgcgcaggaagatggtgtcgaaaaccccggcttcgcagccgaatcccagaagcggcgcgtcatcgctgaactcctccgccgcgcctaacaacactctgccgctgcacaagttgcggactgccgaggcaaggccgtgcccttgggagtagtgaggattttccgcgcttagcgaaatagctccgccaacgctcagacgcttgtaaattggatctcgggatgcttgccccgagtattccgccttgccgtcaaaagcattgatatacgccgctccgaaggagtattccagctcaaaaccggattggagcgtgctgcccagacaggcagacagtcccagattgacgctttccgctttcttcaagctaaagagaaccccctcattatcaggatcgggatgtggatcgctcgcgttacttacccaatttgcgcccagagccagatgcctgacgcatcttggaaacacgccaggtgccatcaaggccagtgccgcgggcaggttcaccgagaaaccgagggtcgaggaatcttcgttcagggaaaagttatccacaagctcgccagtgctgtccgagacggcaaactctcccaactcgactccggcgctgttgctgtttcccaaagctggaagcagcagcgcgaaaccgtgatacgacatcccgagtaaagcagcccggtattccaggttttccgttttcagtatatcgcttttgtgcatatacagatagctcgtgtgtgaatacgcgatgccctctcccagggaagcgaaagcggggttgccgtaagcgcaaagggggtctttgtgccagtggtttaccacacccacaggactgccacccagagccatgttgaccgacgacggctcaagcccgttccaggcaaatccctggtatgatgccgcgcccaacgcgccaagaaagcagaacaaagccattgccaaaatacatttcttgctcaaatcggatcctccttttagattacggaccatttgaaatacttatatttgcacataaagcggctgtcaagtaataattttcgcctggcgcgctttgtagtcttggtgtgctttgttcctaaaagactggatcccgggtaagccaccccagagggggccccgacttcccgggatgacacagtatgtagcctggtggacttgtttcggggctgggtgaaaagccttattcttttaccatagtaatccgtaaatccgtcaaatccgtcaatccgtataagatttgcatgccaagtatcatacggatgaaacggattacacggattaacggataaatcgttttgcgcagtgttgtatttcattgctaacgacaccatttcacagttccactttactacggccatttcaaaagactggatcccgggtcaagcgtgcgcttgcccgggatgacacagtatgtagcctggtggacttattttggggaacctttccaccttttcaccatcacagaaaagaacgcaaacaatatagtataacattcaccaaaaacaacggcaataatctgcataatccttcatagcgccctcccttgctgctcctgcatttgctgccaccatccttaggtcatccttataaattataaggttgacctacggaaaatatagacttagcccatcccgtcaaatgggagcggcatttatttcaggcgggcgcattaattggcaagggtctggctgtcagattctaactgcatggtacagaaggcattagaaaaacagcatattttcacaccgctgtcaggttgcggcgacatgggaagcctgaataatgccaaaacgaagagacgggacgaatgaatcatcccgtctccggttatgtggtttatgtttagcccataaagggatagcggtagtcgtcggcaggaacgaaggtttctttgatcgaccttgccgaaacccagcggtagaggttgatggccgatcccgccttgtcgttggtgccggaagatctggctccgccgaaaggttgctgtccaaccacggcgccggtgggtttgtcgttgatgtagaagttgcccgcgctatgcttcagcagttcggaggcgacggagatcgcggttctgtcctgcgcgaaaatggagccggtgaggccatagggagaggttttgtcgcagaggtcgagggtctcggtgaactctttttcggggtaggcatagacagtcagcaccggcccgaagatctcttcctgcatggtgacaaacttgggattggtggtcttgatgatggtcggttcgatgaagtagcccttgctgtcatcgcactttccgccccaaacgatctcggcgtcagacgcgttgcgggctttgtcgatgtattcctttatctttgtgaagctgcttttgtcgatcacggcgttgacgaaattcgagaaatcctggacttcgcccatcttgaccgtcgcgagcatggcgctgatttcctcgaaccatttgccgtagaggctgtcgggaatgtagaggcgggacgcggcgctgcacttctgcccctggaactcgaaggctccgcgcagggatgccaccgccagggtcttgatgtccgcggaagcgtgcgcgaagatgaagtccttgcctccggtctcgcccacgattctgggataggatttgtagaggtggatgttgttggcggtgcgcttccagatatggttgaacacctgggtgcttcccgtgaaatggatgccagcgaggtagggggaatcggtgatcaggtctcccatctgggctcccgagccggggacaaagttgatgacaccagcgggcagtcctgcttccatcaatatcttcatgatgaagtagccgctgtaaaccgcggttccggaaggtttccagaccaccgtgttgcccatcagcgccggggctgtgggaaggttgccggcgatggaggtgaaattgaagggcgtgatggcgaagacaaagccttccaaagcgcggtattccgagaagttccattctcccttgggggagatgaggggctgctgttcgtaaatcttttgagcgtaataggggttgaaacgccagaagtcaatcagttcgcaggcggagtcgatttcggcctggaaggcgtttttgctttgccccagcatggtggcggcgttcaacagatagcggtatttggtggaaagcagttcggcggctctcaggaagatggccgagcgatggtagaaagacatctgctcccaatccttgcttgccttcacggccgcctggatggcgaggttgatctccttttcgccgcatttgtggtatttgccgatggcgtgcttgtggttgtggggttcgatgcagtcggcggtgttgccgctgaacacttccttgccatcgataatcgcgggaatttcgatgaactggctgccgagttcattcagctttgccttcaaggcgtctctttctttggttccgggtgcgtaagatttgatcggttcattttcaggtgtagcaacagtgaaaaacatcttcaactcctttatttatttttagtattttcagcttggaaagggagacacactgcgccagtcgcaggaaaaatgaaagtttgcttgcgtgtcaccttttcacactggaaggcatatctgtttccggatataccctgacggcgagcaatcctgccaaaggtttagatttgctcgctcgatgacgctgccagacttaaaatggcgcatttttatgtcaaggacaaaatcccgggcggcggccggacaagcgcgggtgcaggcaaaaagacctgcctcggaaagcgggattcccatttgcccaagcgagagaaacttgcgattttgggatggcgttgacagccggaaattccctccatcggaaaagaaaatccttgacatatatacatagttttcaggcttttggttacccccaaagtaaatttgacggaatgaaaaaactcaaaggaatgccgaccacgatacataagcaccgactgccccgaatcacgctcctgacgctgctgctggccttgctgctgagcgccgggttgcgggctgagattctgatccccatggatctgacgcagagcaaccacctcaaggcctatggagtcgcttttgaagcgctcaaagagcagcatgtgataaagtggctgctcaactaccggggcggcagcttcctgatcccggacgcgccggagatttccgcgctgtgcaacatccggggggtgcgcttcgagcaggtgtcgtcctcccaggtggccgccatcatgctggagatccagaacgccaatatggaagccgtggtgctggagaaagaacccaagatcggcatctatatcccgcccaactccctgccctgggatgacgccgtgaccctcgccctggaatatgcccaggtggattacgaccgcgtgtgggatgacgaggtgctggaaggcaaactggccgattatgactggctgcatctgcatcatgaggatttcaccgggcagtatggcaagttttatggctcctaccggcacatgccttggtatcagaacgatgtgcgcaccaacgaggcaatggccgccaaacacggctacgccaaggtgtggcagctcaagcatgccgtggcgcagaagatagaggagtttgtgattgccggcggcttcctctttgccatgtgcgccggcacggacaccttcgacatcgccctggcggcgcggggtgtggatatcgtggacgccctcatcgacggcgacggcatcgatccccagtataaaagcaagctcaactatgagcgctgcttcgcgttcgagaactttaccctcaagaccaatccctacgaatacgaattttccgatatcgacgccagcgactactcccgcctgaggggagcggaggcggactattttcagctcttcgacttttccgccaaatacgaccccgtgcccaccatgctcacccagtgccatacgaacgttatcaacggctttttggggcagacgacctcgttctttaaggacaaggtgaaaaagagcgtgatcatcctggcggaagtgccggggcaaaatgaggtcaagtatatccacggcaacatcggcaagggcactttcaccttttacggaggccacgatcccgaggattaccagcacaaggttggcgacccggaaaccatcctggaactccataagaattctcccggctacaggctgatcctgaacaacatcctctttcccgccgcggagaagaaacagctaaagacctgaggacgcgcgatggcaaagttttattccaagctctatcagacccagctcaaggttgggctgttcacggttatcatgctgttaatagccgtgtttggctatctgtggctgagcaagcgcatttcgatccgttcgcagcaagacctgcaggtgggcttcaccgacgtcatggggctggaagtgggcgacaaggcgatgttccggggcatggaagtggggcgcatcaagagcatcgcggcccgcggggacgacatcctggtgacggcgcgcgtcaaccgggggctcggcctcaaagagggcgcggtcttttacatctcggacagcagcctgatgggcggaacggtactcaacatcgcccagggagaggggccggggctgctcgatctgggcaaggcccaacggggtgaagaccccagcggagtgatggccctgctgggcaaggcgaacgccactctgggagagttcaacgctgtgctatcggagctgaggcgggagaatggattgattgcgaagtcttcctctctgcttgacgatgcgggcagcgcggccaggtcagtggaggagctttcccaggatgccaaagcgcggctggcggccaccctgcaaaagatagattcgctctcggagcggataaaccgcgtcgccaaagccaacgaggagcagatcaacacggtgctgcaacgctctccccaggccctggaaaacgtgagcggcaccctggacagcctcaaaacgctttccgccaacctttcccaaaccgtcaaggcgctgaatagcggacagggcagcgcgggactgctgctgaacgatgaagccctgtatcacaagctgttgcgctcggtggccaatctcgattcgctggtgctggatatccgcgcccatcccaagaaatatgtgaaattcagtctcttttaaagatgccgatgaaattaagattcgccctgcttttcctgctgatttccgctttgtgccatgcttacaactttggccagaacaaggtcaacaccacacccgaggcgtggtcaaccctccagaccatgcactttgatgtttactttccccggggcgagaacgacttcggccgcctggcggcgctgctcgcggaagagacctactacaacctgcgggctgacctcaaatatcccatctcgtcccgcatcccgatcatcttttaccgcagcaagagccagtttcagagcaccaatatcatctatcccctcctcacggaaggcgtgggaggattcaccgagagcctgcgcaaccgggtggtgatccccttcgacggcagttaccgcaacctggaagacctgattgcccacgagctcacccatgcctacgccaacgctttggacaaaggcatgatcaactcctatctgtccctccggcctgtgtcctttcccttctggttttcggaaggactgccggaattcctctccattggcggcgaaaacgactataacaacatgttcatcctggatatggtggtcaacgactacctggtgccactgggcagttcggacggctattttgcctaccggctgggggagagctttctggcctacatcgccaagacctatggccgggaaaaggtgtcggaatactatttcaccatccactcctcacacaatatggacgcggcaaccaagaaagtctttggcatcgatttcgagagcctggaatcccgctggcgctttcagttgaaacgggacttctatccccgcgtcaacgaccatggagtgccccaggaagcgatggagcagcgcacccgctccgataaggatggctcctacttcaacttcatgccccgcttttcccccaagggagaccgctacgtctatttttccaccgccggggcgagatacagcgtgtggatggctggcatccatgaaatggacagggcaaagaagatattcaccggtgaggccaccggcaaagccgaggaattctattacttccgctccaacctgagctggtttccagatggcaaacgggtggctttttccgccaagacctcctggggcgaccagatccacatcctggacgtggacaggggaaagatcgtgcagacggtcaaactgccggaatttgacgcgatctatgaactggacgtggctcccgatgggcagaagctggtctttgccggacagcgggaaatgcgctgcgacatctatctccatgacctggagaccaggcagaccaggcagttgacggatgactatttcaacgacgcccagcccaggttttcccccgatgggcagacgatcgtcttttcctcggagcgcagcctcaacccggaatcccagcgcaagggcttctttgccaatgtggtggccaatatctacagcctggatctggatggaggggagccccggcagttgactttcaggatcagggactgtagctggcccatgtttgacggcagcggcgacaaactgctctacctcacctatgaggacaaggtcaacaatctccacgcccttgatctgcaaagctccgcccaggcgaaggtgaccgatgtgctggcgggggtctttgcggcggatatctcccctgataaccgctatttgctggtttccaactatttcgacaaggcgtggaacatctactttgcccacgatcccctgaaaaacctggcctggagcgacagcaccgcgcaacagctttccgtcccctctcccgacctcatggcaggggtggatttggggcaactggactactttggcaagcgcaaacccgctcctctgcccaggatcaaccccgcccgccagtatgacgaacgcttccccctcagcggggaataccgcccctttgaacttacccgcgaggattccctgtttctcacccgggattacagctatgacgaccgccccaccagcaaagacaatcctcccacaataggcggatacaagccccgcttctctttggacagcatctggggtggcctggcctattcctccgccgtgggaacaatcggctatgtggagcttggcctcagcgacatcatggggaaccacggcatcggcgcgaacgtcggcgtggcgggcaagctggaggagtcgaacctgctgctcacctatatgtatttgaagcacaggatggactacggggtcggaatctacaacctcgtggacgacgcctactatctggacgagaattacctccccaacaatttgttgcgctaccgggaacgcaagagcggcctctacatgctgctgcgctatcccttcacgcgcttcacccggctggagtttgaccacatgctctatcagcgcgggcaatacctgtcctgggcgccctatgtggagggctacgagctgagcgaggaggtgagcctcagccaggatcttgtttacactcccggtctttcgctggtgcacgacaacgccctctatggctccaccgggccgcttgtgggttggaggagcctgtataacgtgagcgccaccctcgccgacggaagggtggaatacttcaccaactacatcgatctgcgcagctacaccctgttcagccggcgctatgccatcgctttgcgcgctattgccggagtgagtacgggaaaggagccccagcgcttcaacctcagcggctactatggggtgcgggcttaccgggataacctcagcggctacaaaaaggccctgctgagcgccgaacttcgctttcccttttttgaatacatcaacctcgccttcccgatcccgctcaacatccccaacatccgcggcagcctctttgccgacctgggcacggtgttcgacaatttctcagacttcaacgccaccacggaggacggcaggctggatgacctcaaactgggctatggcttcgggccgcgactcaacctgggctatgtggttttgcgcttcgacatcgcctggcagaccgatctttccaaaacctcaaagcccacctattacctgagcttaagtgaagatttttaaataagttaagatataaacgaggagaaacgatgaaaatcgacttgttacgcaagcttaccgaacacatggaaagcgtgatcgtgatgatagacgaaaaaggcgacctggacagtgtcgaatacctgccggagaatatcagacaggcgatccagctctatcttaaacaaaacgaattcaaatttgagttcaacagaatccgcagctttcccatcgtgctgcccaagcactgcaacaacgtggtgctctgcggagtgggcaacgccaaggagttgaacggcgcgaaactgagaaccctgtttgccaacgccctgcgcgcggtgatgaagctgaatggcagggaagtgtatctcttccccgcctttgccaatcccctgggagatgtgcagtttggccacattctggcggaatccgccctgctggccgagtataaattcaacaaataccaggcggacgccgaaacctgcggcctggaagcggtgcatctggtgatggagctcaagaccacccgccacatcaaccgcggcatccttgaaggccgcatctttgccgacgccaccaatctggcccgcgatctggtgaacgaacctgccaacgtggtcaatcccgatacactggcggagacagcccgcaagctggctctgaaacacggtttttccatcgatgtctttggcccggacaagctgagacgcatcaagatggacgccttccttgccgtagccaggggttccgccgccgaaccgcgcctgatcctgatgtcctaccacggcaatcccgattcccgcagcaaaagcatcggcctgatcggcaaagggctcacctacgacagcggtggatactgcctcaaaagcccccagggcatggtgaacatgaaaacagacatggcgggagccgcggccgtgctgggcacctttgtggccatttccaccctcaagctgaaggtaaacgtctttggcgtgatcgccgcctgtgaaaacatggtctccggccacgcctaccacgccggagacgtgatccgcagcatggctggcaagaccatcgaggtcaacaacaccgacgccgaaggccgcctgaccctggtggacgccatccattacgcggtcagcaaggaacgcgtctccaaggtcatcgacatcgccaccctcaccggagccgccgtgggagctttgggcaatcagatttcgatggtgatgagcaacaacgacgccttgctgaacaaggcgaaacacgcggccgacttcaccggagaactgatctggcaactgccctcccatgaagaatatctggatctgatcaaaagcgacatcgccgacctcaaaaacagcggcgggcctctggctggagcgatcactgccggtctgttcatccgcgagtttgtggacaagaaaccctggctgcacatcgatatcgccggaaccgcgcacaaggacagggaaagcggcatcaacacctacggggccaccggggtgggagtgcgtttgctgacccaactgctgcgtgaactggagtaagcccatgcgcagaatcttgccgctactgttgggatcgctggcgctactggctctcctggcctgttccggctcgccccggaacgagcgggagaccgtggtggtctcgatctatccctatgaattactggtgaggcaactgaccggcgacagcctgaacgtggtcaccctcattccgcccaacagctcgccccataccttcagccccaagcccgccgggctgcgtgccttgaacggggcggccctcgcagtatccaacggctttggcctggaaaccaatctggggcaggcttttgacgccttgggcgacaggcatgtgaagatcgaggatcagctccggcggcagcacgtcattcccgccgatgataccaatccgcatatctggctctcgccccggctgctgacccacatcaccctgatcctctccgatcagttgcagacgcgttttccccacctgaaaaccaccatcagcgaaaacacgggacgcctgatctccgacctcgccgccctgcatcagcgcatgcagagcgaacggagcactttcacccgcactccggtggtcacctggcacgacagcttccactatctgctcaaggattacgacatcgaggatctgggcaccgtgcaaagctcccctggcaaggaacccactccccgggagctggctcgcatcggctcgctggtcaagagccacaatctcaaagccgtttacaccgaagtccagatgagcgacaaagcggcgcgcgccctggccagtgagttcgacctctccatcgtgcaactggatccgctggggcacagcttcaaacccaagagcatcatggacgttatcctcaacaactgggaggggttaaagctgggttgggaatgatgtttccgcctttttccgcctgccttcccattcggccctacttcgcgtccttaaccccgggaggagacatccttaggtattccttataaattataaggttgacctaaggttgtcccaagcaaaaggtaaggattgatatgagggggatatgatgatcgaggtgcgggggctcagccatcgcttcggcaacagcctgattctggaagacatagacttacagatcacgcggggggagtttgtggccataatcggccccaacggggcgggaaagtccaccctgatcaggctgatcctgggtttgctgcccgtgcagagcggcaccatccacatcgatggtgaggcgcatctggactggctgcggcacaacccgatgggctatctgcctcaaagggaagagtttgaccgcggttttccggcttccgcgctggacatcgtgctgatgggattggcggcggaactgcccttgggaggcagattcacaaaatcccagcgggagcgcgccctggcagccctggaaaccaccagcacggcggagctggcgtccaaacgcctgggaagcctttccggggggcagttgcagagggtgctgctggcgcgggcgctggtctcgcgcagcaactatctgatcctggacgagcctgaagcctcggttgaccgtcccggggtgcagagcttcttcgctttgctgcacgatctgaacaaggcaggcaagaccatcatcaccatctcccacgacctgcacacgctttccgaacactgcagctcgctgatctgcctcaaccgaaaactgcactgccacagcaagaccgaactggtgaacgccgagatcatccgcaaaaccttcggcgaagcggtgaaactgatcgacaaggactactgatgctggaatattcctttctgatccgcgctctggcggctgcctcgctctcctcgctctcgctggcgcttttttcgccctttgtgaccctgcggcggatttcctacatgggcgaagcgctttcccacatcgcctttgcgggcatcgcgctggcgattctggcaggctggaatatgcagttcaccgccatgctggttgtggtgggggtgagcctggcaatcagttggctctcgcgccgccagaggctggaggaggccaacgccatcaccatcttcctgagcgtttccatggccatcggcatcatcctgatctcgctcaacaagggctacaccttcgatctggccagttatctgtttggcaacgtgctgcttgccaattccaccgatctgtggctgctgggcgcggcggccgtgctgaacctgatctttatcctgggattctacaaagaactcttttactattcctacaatccagaactggcaaggttttaccgcctgcatgccggcttggtcaaccgcctgttcatgatcctgctggcggtgaacatcgtgatcaacgtgcgggcggcgggcatcatcctggtgagcgcccaactgatcctgcccgcggcggcggcgttcaatctggttgaccgtttggacagggccctggttttctgcgttgtcttttcgctgctggcttcctttggcggcttcgccctttcctggtggctgaacctgcccacgggggcgagcgttgtggtgctggagtttgtcatgtttttgctgagcctgcttcccagggctttccggagggatagatgctgagcgatccgcgcctctggacagtcgtcgcccacgctctcatctggcaggttgccgagcccaaaatgcaggcctggggggaaagggcggtcacattgctgactggcaggcccctgaaccagactcgcagattcgatgagcggggcattcccatccagctttaccgggatctgggcttgcaatacaatcccctcttcgtggcggcacaggccaatcgcgactaccagcgcaggaaggatcccgccaggcgcgcaagctttctgaagctcaccgattggctgctggaacactccgaggtggaagagggcaggctgtggcttccctatcgcttcgacctgcccaggctggggctgcgcgcgccctggtgcagcgccctggcccaggccagaagcatgcttgcctttgcccggcgctatgaactgaccgcccaggacgactggctgcaaaacagcgtcatggcgatgcgcaccctcgcgcccggaagcagcctgacgaggcgcttgccggatggctccctctggtttcaggagtatcccggcgaggggcaaccctttgtgctcaacgggatgttggcgatcctgctttgcctttgggacacatacaaaatcaccgggcaggaagaggctcacaggctttttgaagcgggatacgcgggcttgctggccaggctgggtgagttcgattaccggggtttcagctactacgacctgaatggcggcattgccagccggaattaccatcagaagcatatttcctatctcaggaagctgaaccgtatcaaaccccatccggagctgaaaaaatacaccgtccgctggcaggcccacgatctgctgccggtgggtttgcagcttttttacaatccgcgccccaagcggatagccgccttcctgctttccctggcgggatgcgtgggaatcgggtggctgcttactttgctattcccacgaggaacttgaccataaagtccggcgcatagctggtcttggcttgcctcaaaccctcgaggccgatgtcctgctcgcggtttatccatttgtagcgggattgcagatagcgggcggtttcccaatagattagctgggcgctgccctttttgtcgggatcaaacttctcgaagtgtaccgtcaccatgtcctgcgtctgcgggctgaagatggaataggcggcgatcctttggtccaggcagacgattattccctccacgggcagttcgtcccacatctcaagggtgttttggatggctttcatctcggtgtccagatagctgccttcaacgtgcctctcgcggcgccatttttcggtgaagcgctcgatcacctcgtgtttttccttgcttatcggcagcacatgatagttcggataggcacgccggaactgggagatcaggtttttcttcttggtcagctttttgcctctcaggttcaccattttctccgtcgcatagacgtagtcataccagtccctgtcgtcgctgatctcaaagtgcctgtccaggcccgggcagctttcctgccagttctccgggatgatcagcagtttcgcctccggagcgtcctcgcggtagaggtcaaaaagttccctcgtcttgtccgcgcccaagcccggtcccaccgggtagagcagataggagtattgcggattgaccagtaccagatggccttcccagagcgtgtattggttgttgtagattttgccccagcttaggaggttgcagatgttgtagtcgcaggactggcgcggatagcggctgaggaactcgcgcaggaggggaatctgggcagtggtaagaggctcgagctttagcatactgtgtcgcgcgcttagtcctgcttcaacaggaacggcgtgtatccctccatccgggcaaagcccagcccttcgtaaaacctgtcgtagcccggttcgctgatcaggcctatccactgcattccgtccccgcgcaggcgttcgagcagtttgcgcacgatggccttgccgatgccccggccgcggtagtcgctgtgtaccgtcacgtcctggatgtaggcgtcgctcaccctgtcgctgattgccctgcccatgccgatgatcctggagccgtgggcggcgatcgcgaagcagtgggagttcgcgattatcttttccaccgtcctcagatactccggattgtcatcggtttgccaccatcccgcgtggcgatacaaggccaggatcgcctccgggtctgcttgggtgactattgaaagttctatgtctgtcatgcttccgctccattctgtaactgattgtgtcaggttccgctggggaaaaatcctgtacgagcaattgcatttataaataaatgtccatttctgtcaagtatcttgccgtgcggggaatcggatttttcttgacagattgccttgaaaacatgatagataaccaatccgttcattcaaggagccaaaatgccaagattagtcattttcagcttactggcagccctgtttttggcaggctgcaacactgtttccacgcttcccgaccagacgggcgagctgccgatccgcatggacctcagcccggcggcacagctcaatttcaacgtctcgagggtggcagtcactgtcgtcaaagggacttacagccagagcatggacctcgccatcagcggcaatatggctgaggggactttgcaggacttggagccgggcgtttacgccatcgatgtacaggtctttgacggcctcaccctgatcgccaccggccagggcagcggactggtctcaccctctcagaccaccacggtgcacatcaccctgcagtttgttcccggaggcctggaagtggttgtggggtgggggcttccctatgaagacagccgccgcgtcctcctggtgggaaacagccacacctacttcaacgatggggtggatactcacttgcaagccctgatcgacatggcgcatcccgaatggaatgtggtggtggatgccagaaccagtggcggatacaccctggaaaaccattatcacgatcagaacaccctcagcaccatcgccacgggagattgggacctggtgatcctccaggaacagagcagccgccccatgctgaatccggaactcttttacagctatgccgattcgctgaacaccctgatccaccaggcgggcgccctcaccggtttctacatgacctgggcctggcgcaacaacccggaaatgtatgtgccgatcagagacgcctaccgctacatcggagcctggctggatgcccccgtggtgccggcaggagtggcgtggcacaacgccgattccatccccggcatgccaaatctctatgaagcggacaactaccaccccagcatctatggcacctacttggtagcctgcctgatgctggcccgcatctggaacgtcaaccctgtgggcaacaggtatttccccccacagatcgacgccgccacggctaacctcctccagcagcttgcctgggacaccatccaaaacgaataccggggcctggatttgcactccagacggtgggagcagcttctcgcgacagcggcataagatggcggctcgcagccctggcgcaaaaaacggagactacgcctgtagcctccgtttgcccggaacgaggtatatctaatctaagaacagcctgcaaatcttttcccggtactgttctggctggattttattttttgccagccactccttagccttatccagcatggtttgatattcctcactcgaaatcatggcgaagtattccaggtaatagaccacaaccagggtgatgccgatccttttggcgactgccggtttgaacttgcctgtcagagcgagccgatcggcgacgtctttggattttattttattgtttcccaataccaggcgcagtaattgggatttatcccagtagccgtttgccgtttgcgtaagcaccaacctgctaaggataggatcatcttctttagaactgagagagttctggttatccaatagcgtgttataaaacatgactgattctgtggggggataggcgcacgcacatatccgttccgcatgatatgccaaagtggccaccacaggcacccggcgcagttcgatgcctcccttgagggattcgttacggcggggatcgctcaccacaaagctggtaaactcgctcaggatctggtatttgacggcgatttccgtggcaatgtcacggctggatctcattctttgccgcgaaccggagggtgtccggcctgggttctgaagccggtgtttggcatagagctgcggcaagccgccgtgggactggggacagggctgcaactccccgctttccagagagagggtagtgccatccgccaggcttgccaccaggcttactttgccttccggctgcctatccagatgctccataaaatacagcggttcgttggggatcaggcaaatgcactggctgtccagttgttggctttgcccgccccaattcaggctgaggctggtgacgacgggattgtccatgcgtgccagatgcctgccgatgacgggctccagcctttcgccgggataagcgaactcactttcgccgccggtaagccggggcagggactttatcagttcctcgtcggcgttgcgtcccagcccgatggtgaagatgcggggacggttgggggctttgcgcacgtaatcctgtatc

SEQ ID NO: 524 - DNA, 86585 bp, Artificial Sequence
  Synthetic Oligonucleotide
ggcttcagaacccaggccggacaccctccggttcgcggcaaagaatgagatccagccgtgacatagccacggaaatcgccgtcaaataccagatcctgagcgagtttaccagctttgtggtgagcgatccccgccgtaacgaatccctcaagggaggcatcgaactgcgccgggtgcctgtggtggccactttggcatatcatgcggaacggatatgtgcgtgcgcctatccccccacagaatcagtcatgttttataacacgctattggataaccagaactctctcagttctaaagaagatgatcctatccttagcaggttggtgcttacgcaaacggcaaacggctactgggataaatcccaattactgcgcctggtattgggaaacaataaaataaaatccaaagacgtcgccgatcggctcgctctgacaggcaagttcaaaccggcagtcgccaaaaggatcggcatcaccctggttgtggtctattacctggaatacttcgccatgatttcgagtgaggaatatcaaaccatgctggataaggctaaggagtggctggcaaaaaataaaatccagccagaacagtaccgggaaaagatttgcaggctgttcttagattagatatacctcgttccgggcaaacggaggctacaggcgtagtctccgttttttgcgccagggctgcgagccgccatcttatgccgctgtcgcgagaagctgctcccaccgtctggagtgcaaatccaggccccggtattcgttttggatggtgtcccaggcaagctgctggaggaggttagccgtggcggcgtcgatctgtggggggaaatacctgttgcccacagggttgacgttccagatgcgggccagcatcaggcaggctaccaagtaggtgccatagatgctggggtggtagttgtccgcttcatagagatttggcatgccggggatggaatcggcgttgtgccacgccactcctgccggcaccacgggggcatccagccaggctccgatgtagcggtaggcgtctctgatcggcacatacatttccgggttgttgcgccaggcccaggtcatgtagaaaccggtgagggcgcccgcctggtggatcagggtgttcagcgaatcggcatagctgtaaaagagttccggattcagcatggggcggctgctctgttcctggaggatcaccaggtcccaatctcccgtggcgatggtgctgagggtgttctgatcgtgataatggttttccagggtgtatccgccactggttctggcatccaccaccacattccattcgggatgcgccatgtcgatcagggcttgcaagtgagtatccaccccatcgttgaagtaggtgtggctgtttcccaccaggaggacgcggcggctgtcttcatagggaagcccccaccccacaaccacttccaggcctccgggaacaaactgcagggtgatgtgcaccgtggtggtctgagagggtgagaccagtccgctgccctggccggtggcgatcagggtgaggccgtcaaagacctgtacatcgatggcgtaaacgcccggctccaagtcctgcaaagtcccctcagccatattgccgctgatggcgaggtccatgctctggctgtaagtccctttgacgacagtgactgccaccctcgagacgttgaaattgagctgtgccgccgggctgaggtccatgcggatcggcagctcgcccgtctggtcgggaagcgtggaaacagtgttgcagcctgccaaaaacagggctgccagtaagctgaaaatgactaatcttggcattttggctccttgaatgaacggattggttatctatcatgttttcaaggcaatctgtcaagaaaaatccgattccccgcacggcaagatacttgacagaaatggacatttatttataaatgcaattgctcgtacaggatttttccccagcggaacctgacacaatcagttacagaatggagcggaagcatgacagacatagaactttcaatagtcacccaagcagacccggaggcgatcctggccttgtatcgccacgcgggatggtggcaaaccgatgacaatccggagtatctgaggacggtggaaaagataatcgcgaactcccactgcttcgcgatcgccgcccacggctccaggatcatcggcatgggcagggcaatcagcgacagggtgagcgacgcctacatccaggacgtgacggtacacagcgactaccgcggccggggcatcggcaaggccatcgtgcgcaaactgctcgaacgcctgcgcggggacggaatgcagtggataggcctgatcagcgaaccgggctacgacaggttttacgaagggctgggctttgcccggatggagggatacacgccgttcctgttgaagcaggactaagcgcgcgacacagtatgctaaagctcgagcctcttaccactgcccagattcccctcctgcgcgagttcctcagccgctatccgcgccagtcctgcgactacaacatctgcaacctcctaagctggggcaaaatctacaacaaccaatacacgctctgggaaggccatctggtactggtcaatccgcaatactcctatctgctctacccggtgggaccgggcttgggcgcggacaagacgagggaactttttgacctctaccgcgaggacgctccggaggcgaaactgctgatcatcccggagaactggcaggaaagctgcccgggcctggacaggcactttgagatcagcgacgacagggactggtatgactacgtctatgcgacggagaaaatggtgaacctgagaggcaaaaagctgaccaagaagaaaaacctgatctcccagttccggcgtgcctatccgaactatcatgtgctgccgataagcaaggaaaaacacgaggtgatcgagcgcttcaccgaaaaatggcgccgcgagaggcacgttgaaggcagctatctggacaccgagatgaaagccatccaaaacacccttgagatgtgggacgaactgcccgtggagggaataatcgtctgcctggaccaaaggatcgccgcctattccatcttcagcccgcagacgcaggacatggtgacggtacacttcgagaagtttgatcccgacaaaaagggcagcgcccagctaatctattgggaaaccgcccgctatctgcaatcccgctacaaatggataaaccgcgagcaggacatcggcctcgagggtttgaggcaagccaagaccagctatgcgccggactttatggtcaagttcctcgtgggaatagcaaagtaagcagccacccgattcccacgcatcccgccagggaaagcaggaaggcggctatccgcttggggcgcggattgtaaaaaagctgcaaacccaccggcagcagatcgtgggcctgccagcggacggtgtattttttcagctccggatggggtttgatacggttcagcttcctgagataggaaatatgcttctgatggtaattccggctggcaatgccgccattcaggtcgtagtagctgaaaccccggtaatcgaactcacccagcctggccagcaagcccgcgtatcccgcttcaaaaagcctgtgagcctcttcctgcccggtgattttgtatgtgtcccaaaggcaaagcaggatcgccaacatcccgttgagcacaaagggttgcccctcgccgggatactcctgaaaccagagggagccatccggcaagcgcctcgtcaggctgcttccgggcgcgagggtgcgcatcgccatgacgctgttttgcagccagtcgtcctgggcggtcagttcatagcgccgggcaaaggcaagcatgcttctggcctgggccagggcgctgcaccagggcgcgcgcagccccagcctgggcaggtcgaagcgatagggaagccacagcctgccctcttccacctcggagtgttccagcagccaatcggtgagcttcagaaagcttgcgcgcctggcgggatccttcctgcgctggtagtcgcgattggcctgtgccgccacgaagaggggattgtattgcaagcccagatcccggtaaagctggatgggaatgccccgctcatcgaatctgcgagtctggttcaggggcctgccagtcagcaatgtgaccgccctttccccccaggcctgcattttgggctcggcaacctgccagatgagagcgtgggcgacgactgtccagaggcgcggatcgctcagcatctatccctccggaaagccctgggaagcaggctcagcaaaaacatgacaaactccagcaccacaacgctcgcccccgtgggcaggttcagccaccaggaaagggcgaagccgccaaaggaagccagcagcgaaaagacaacgcagaaaaccagggccctgtccaaacggtcaaccagattgaacgccgccgccgcgggcaggatcagttgggcgctcaccaggatgatgcccgccgcccgcacgttgatcacgatgttcaccgccagcaggatcatgaacaggcggttgaccaagccggcatgcaggcggtaaaaccttgccagttctggattgtaggaatagtaaaagagttctttgtagaatcccaggataaagatcaggttcagcacggccgccgcgcccagcagccacagatcggtggaattggcaagcagcacgttgccaaacagataactggccagatcgaaggtgtagcccttgttgagcgagatcaggatgatgccgatggccatggaaacgctcaggaagatggtgatggcgttggcctcctccagcctctggcggcgcgagagccaactgattgccaggctcacccccaccacaaccagcatggcggtgaactgcatattccagcctgccagaatcgccagcgcgatgcccgcaaaggcgatgtgggaaagcgcttcgcccatgtaggaaatccgccgcagggtcacaaagggcgaaaaaagcgccagcgagagcgaggagagcgaggcagccgccagagcgcggatcagaaaggaatattccagcatcagtagtccttgtcgatcagtttcaccgcttcgccgaaggttttgcggatgatctcggcgttcaccagttcggtcttgctgtggcagtgcagttttcggttgaggcagatcagcgagctgcagtgttcggaaagcgtgtgcaggtcgtgggagatggtgatgatggtcttgcctgccttgttcagatcgtgcagcaaagcgaagaagctctgcaccccgggacggtcaaccgaggcttcaggctcgtccaggatcagatagttgctgcgcgagaccagcgcccgcgccagcagcaccctctgcaactgccccccggaaaggcttcccaggcgtttggacgccagctccgccgtgctggtggtttccagggctgccagggcgcgctcccgctgggattttgtgaatctgcctcccaagggcagttccgccgccaatcccatcagcacgatgtccagcgcggaagccggaaaaccgcggtcaaactcttccctttgaggcagatagcccatcgggttgtgccgcagccagtccagatgcgcctcaccatcgatgtggatggtgccgctctgcacgggcagcaaacccaggatcagcctgatcagggtggactttcccgccccgttggggccgattatggccacaaactccccccgcgtgatctgtaagtctatgtcttccagaatcaggctgttgccgaagcgatggctgagcccccgcacctcgatcatcatatccccctcatatcaatccttaccttttgcttgggacaaccttaggtcaaccttataatttataaggaatacctaaggatgtctcctcccggggttaaggacgcgaagtagggccgaatgggaaggcaggcggaaaaaggcggaaacatcattcccaacccagctttaacccctcccagttgttgaggataacgtccatgatgctcttgggtttgaagctgtgccccagcggatccagttgcacgatggagaggtcgaactcactggccagggcgcgcgccgctttgtcgctcatctggacttcggtgtaaacggctttgagattgtggctcttgaccagcgagccgatgcgagccagctcccggggagtgggttccttgccaggggagctttgcacggtgcccagatcctcgatgtcgtaatccttgagcagatagtggaagctgtcgtgccaggtgaccaccggagtgcgggtgaaagtgctccgttcgctctgcatgcgctgatgcagggcggcgaggtcggagatcaggcgtcccgtgttttcgctgatggtggttttcaggtggggaaaacgcgtctgcaactgatcggagaggatcagggtgatgtgggtcagcagccggggcgagagccagatatgcggattggtatcatcggcgggaatgacgtgctgccgccggagctgatcctcgatcttcacatgcctgtcgcccaaggcgtcaaaagcctgccccagattggtttccaggccaaagccgttggatactgcgagggccgccccgttcaaggcacgcagcccggcgggcttggggctgaaggtatggggcgagctgttgggcggaatgagggtgaccacgttcaggctgtcgccggtcagttgcctcaccagtaattcatagggatagatcgagaccaccacggtctcccgctcgttccggggcgagccggaacaggccaggagagccagtagcgccagcgatcccaacagtagcggcaagattctgcgcatgggcttactccagttcacgcagcagttgggtcagcaaacgcactcccaccccggtggccccgtaggtgttgatgccgctttccctgtccttgtgcgcggttccggcgatatcgatgtgcagccagggtttcttgtccacaaactcgcggatgaacagaccggcagtgatcgctccagccagaggcccgccgctgtttttgaggtcggcgatgtcgcttttgatcagatccagatattcttcatgggagggcagttgccagatcagttctccggtgaagtcggccgcgtgtttcgccttgttcagcaaggcgtcgttgttgctcatcaccatcgaaatctgattgcccaaagctcccacggcggctccggtgagggtggcgatgtcgatgaccttggagacgcgttccttgctgaccgcgtaatggatggcgtccaccagggtcaggcggccttcggcgtcggtgttgttgacctcgatggtcttgccagccatgctgcggatcacgtctccggcgtggtaggcgtggccggagaccatgttttcacaggcggcgatcacgccaaagacgtttaccttcagcttgagggtggaaatggccacaaaggtgcccagcacggccgcggctcccgccatgtctgttttcatgttcaccatgccctgggggcttttgaggcagtatccaccgctgtcgtaggtgagccctttgccgatcaggccgatgcttttgctgcgggaatcgggattgccgtggtaggacatcaggatcaggcgcggttcggcggcggaacccctggctacggcaaggaaggcgtccatcttgatgcgtctcagcttgtccgggccaaagacatcgatggaaaaaccgtgtttcagagccagcttgcgggctgtctccgccagtgtatcgggattgaccacgttggcaggttcgttcaccagatcgcgggccagattggtggcgtcggcaaagatgcggccttcaaggatgccgcggttgatgtggcgggtggtcttgagctccatcaccagatgcaccgcttccaggccgcaggtttcggcgtccgcctggtatttgttgaatttatactcggccagcagggcggattccgccagaatgtggccaaactgcacatctcccaggggattggcaaaggcggggaagagatacacttccctgccattcagcttcatcaccgcgcgcagggcgttggcaaacagggttctcagtttcgcgccgttcaactccttggcgttgcccactccgcagagcaccacgttgttgcagtgcttgggcagcacgatgggaaagctgcggattctgttgaactcaaatttgaattcgttttgtttaagatagagctggatcgcctgtctgatattctccggcaggtattcgacactgtccaggtcgcctttttcgtctatcatcacgatcacgctttccatgtgttcggtaagcttgcgtaacaagtcgattttcatcgtttctcctcgtttatatcttaacttatttaaaaatcttcacttaagctcaggtaataggtgggctttgaggttttggaaagatcggtctgccaggcgatgtcgaagcgcaaaaccacatagcccaggttgagtcgcggcccgaagccatagcccagtttgaggtcatccagcctgccgtcctccgtggtggcgttgaagtctgagaaattgtcgaacaccgtgcccaggtcggcaaagaggctgccgcggatgttggggatgttgagcgggatcgggaaggcgaggttgatgtattcaaaaaagggaaagcgaagttcggcgctcagcagggcctttttgtagccgctgaggttatcccggtaagcccgcaccccatagtagccgctgaggttgaagcgctggggctcctttcccgtactcactccggcaatagcgcgcaaagcgatggcatagcgccggctgaacagggtgtagctgcgcagatcgatgtagttggtgaagtattccacccttccgtcggcgagggtggcgctcacgttatacaggctcctccaacccacaagcggcccggtggagccatagagggcgttgtcgtgcaccagcgaaagaccgggagtgtaaacaagatcctggctgaggctcacctcctcgctcagctcgtagccctccacatagggcgcccaggacaggtattgcccgcgctgatagagcatgtggtcaaactccagccgggtgaagcgcgtgaagggatagcgcagcagcatgtagaggccgctcttgcgttcccggtagcgcaacaaattgttggggaggtaattctcgtccagatagtaggcgtcgtccacgaggttgtagattccgaccccgtagtccatcctgtgcttcaaatacatataggtgagcagcaggttcgactcctccagcttgcccgccacgccgacgttcgcgccgatgccgtggttccccatgatgtcgctgaggccaagctccacatagccgattgttcccacggcggaggaataggccaggccaccccagatgctgtccaaagagaagcggggcttgtatccgcctattgtgggaggattgtctttgctggtggggcggtcgtcatagctgtaatcccgggtgagaaacagggaatcctcgcgggtaagttcaaaggggcggtattccccgctgagggggaagcgttcgtcatactggcgggcggggttgatcctgggcagaggagcgggtttgcgcttgccaaagtagtccagttgccccaaatccacccctgccatgaggtcgggagaggggacggaaagctgttgcgcggtgctgtcgctccaggccaggtttttcaggggatcgtgggcaaagtagatgttccacgccttgtcgaaatagttggaaaccagcaaatagcggttatcaggggagatatccgccgcaaagacccccgccagcacatcggtcaccttcgcctgggcggagctttgcagatcaagggcgtggagattgttgaccttgtcctcataggtgaggtagagcagtttgtcgccgctgccgtcaaacatgggccagctacagtccctgatcctgaaagtcaactgccggggctcccctccatccagatccaggctgtagatattggccaccacattggcaaagaagcccttgcgctgggattccgggttgaggctgcgctccgaggaaaagacgatcgtctgcccatcgggggaaaacctgggctgggcgtcgttgaaatagtcatccgtcaactgcctggtctgcctggtctccaggtcatggagatagatgtcgcagcgcatttcccgctgtccggcaaagaccagcttctgcccatcgggagccacgtccagttcatagatcgcgtcaaattccggcagtttgaccgtctgcacgatctttcccctgtccacgtccaggatgtggatctggtcgccccaggaggtcttggcggaaaaagccacccgtttgccatctggaaaccagctcaggttggagcggaagtaatagaattcctcggctttgccggtggcctcaccggtgaatatcttctttgccctgtccatttcatggatgccagccatccacacgctgtatctcgccccggcggtggaaaaatagacgtagcggtctcccttgggggaaaagcggggcatgaagttgaagtaggagccatccttatcggagcgggtgcgctgctccatcgcttcctggggcactccatggtcgttgacgcggggatagaagtcccgtttcaactgaaagcgccagcgggattccaggctctcgaaatcgatgccaaagactttcttggttgccgcgtccatattgtgtgaggagtggatggtgaaatagtattccgacaccttttcccggccataggtcttggcgatgtaggccagaaagctctcccccagccggtaggcaaaatagccgtccgaactgcccagtggcaccaggtagtcgttgaccaccatatccaggatgaacatgttgttatagtcgttttcgccgccaatggagaggaattccggcagtccttccgaaaaccagaagggaaaggacacaggccggagggacagataggagttgatcatgcctttgtccaaagcgttggcgtaggcatgggtgagctcgtgggcaatcaggtcttccaggttgcggtaactgccgtcgaaggggatcaccacccggttgcgcaggctctcggtgaatcctcccacgccttccgtgaggaggggatagatgatattggtgctctgaaactggctcttgctgcggtaaaagatgatcgggatgcgggacgagatgggatatttgaggtcagcccgcaggttgtagtaggtctcttccgcgagcagcgccgccaggcggccgaagtcgttctcgccccggggaaagtaaacatcaaagtgcatggtctggagggttgaccacgcctcgggtgtggtgttgaccttgttctggccaaagttgtaagcatggcacaaagcggaaatcagcaggaaaagcagggcgaatcttaatttcatcggcatctttaaaagagactgaatttcacatatttcttgggatgggcgcggatatccagcaccagcgaatcgagattggccaccgagcgcaacagcttgtgatacagggcttcatcgttcagcagcagtcccgcgctgccctgtccgctattcagcgccttgacggtttgggaaaggttggcggaaagcgttttgaggctgtccagggtgccgctcacgttttccagggcctggggagagcgttgcagcaccgtgttgatctgctcctcgttggctttggcgacgcggtttatccgctccgagagcgaatctatcttttgcagggtggccgccagccgcgctttggcatcctgggaaagctcctccactgacctggccgcgctgcccgcatcgtcaagcagagaggaagacttcgcaatcaatccattctcccgcctcagctccgatagcacagcgttgaactctcccagagtggcgttcgccttgcccagcagggccatcactccgctggggtcttcaccccgttgggccttgcccagatcgagcagccccggcccctctccctgggcgatgttgagtaccgttccgcccatcaggctgctgtccgagatgtaaaagaccgcgccctctttgaggccgagcccccggttgacgcgcgccgtcaccaggatgtcgtccccgcgggccgcgatgctcttgatgcgccccacttccatgccccggaacatcgccttgtcgcccacttccagccccatgacgtcggtgaagcccacctgcaggtcttgctgcgaacggatcgaaatgcgcttgctcagccacagatagccaaacacggctattaacagcatgataaccgtgaacagcccaaccttgagctgggtctgatagagcttggaataaaactttgccatcgcgcgtcctcaggtctttagctgtttcttctccgcggcgggaaagaggatgttgttcaggatcagcctgtagccgggagaattcttatggagttccaggatggtttccgggtcgccaaccttgtgctggtaatcctcgggatcgtggcctccgtaaaaggtgaaagtgcccttgccgatgttgccgtggatatacttgacctcattttgccccggcacttccgccaggatgatcacgctctttttcaccttgtccttaaagaacgaggtcgtctgccccaaaaagccgttgataacgttcgtatggcactgggtgagcatggtgggcacggggtcgtatttggcggaaaagtcgaagagctgaaaatagtccgcctccgctcccctcaggcgggagtagtcgctggcgtcgatatcggaaaattcgtattcgtagggattggtcttgagggtaaagttctcgaacgcgaagcagcgctcatagttgagcttgcttttatactggggatcgatgccgtcgccgtcgatgagggcgtccacgatatccacaccccgcgccgccagggcgatgtcgaaggtgtccgtgccggcgcacatggcaaagaggaagccgccggcaatcacaaactcctctatcttctgcgccacggcatgcttgagctgccacaccttggcgtagccgtgtttggcggccattgcctcgttggtgcgcacatcgttctgataccaaggcatgtgccggtaggagccataaaacttgccatactgcccggtgaaatcctcatgatgcagatgcagccagtcataatcggccagtttgccttccagcacctcgtcatcccacacgcggtcgtaatccacctgggcatattccagggcgagggtcacggcgtcatcccagggcagggagttgggcgggatatagatgccgatcttgggttctttctccagcaccacggcttccatattggcgttctggatctccagcatgatggcggccacctgggaggacgacacctgctcgaagcgcaccccccggatgttgcacagcgcggaaatctccggcgcgtccgggatcaggaagctgccgccccggtagttgagcagccactttatcacatgctgctctttgagcgcttcaaaagcgactccataggccttgaggtggttgctctgcgtcagatccatggggatcagaatctcagcccgcaacccggcgctcagcagcaaggccagcagcagcgtcaggagcgtgattcggggcagtcggtgcttatgtatcgtggtcggcattcctttgagttttttcattccgtcaaatttactttgggggtaaccaaaagcctgaaaactatgtatatatgtcaaggattttcttttccgatggagggaatttccggctgtcaacgccatcccaaaatcgcaagtttctctcgcttgggcaaatgggaatcccgctttccgaggcaggtctttttgcctgcacccgcgcttgtccggccgccgcccgggattttgtccttgacataaaaatgcgccattttaagtctggcagcgtcatcgagcgagcaaatctaaacctttggcaggattgctcgccgtcagggtatatccggaaacagatatgccttccagtgtgaaaaggtgacacgcaagcaaactttcatttttcctgcgactggcgcagtgtgtctccctttccaagctgaaaatactaaaaataaataaaggagttgaagatgtttttcactgttgctacacctgaaaatgaaccgatcaaatcttacgcacccggaaccaaagaaagagacgccttgaaggcaaagctgaatgaactcggcagccagttcatcgaaattcccgcgattatcgatggcaaggaagtgttcagcggcaacaccgccgactgcatcgaaccccacaaccacaagcacgccatcggcaaataccacaaatgcggcgaaaaggagatcaacctcgccatccaggcggccgtgaaggcaagcaaggattgggagcagatgtctttctaccatcgctcggccatcttcctgagagccgccgaactgctttccaccaaataccgctatctgttgaacgccgccaccatgctggggcaaagcaaaaacgccttccaggccgaaatcgactccgcctgcgaactgattgacttctggcgtttcaacccctattacgctcaaaagatttacgaacagcagcccctcatctcccccaagggagaatggaacttctcggaataccgcgctttggaaggctttgtcttcgccatcacgcccttcaatttcacctccatcgccggcaaccttcccacagccccggcgctgatgggcaacacggtggtctggaaaccttccggaaccgcggtttacagcggctacttcatcatgaagatattgatggaagcaggactgcccgctggtgtcatcaactttgtccccggctcgggagcccagatgggagacctgatcaccgattccccctacctcgctggcatccatttcacgggaagcacccaggtgttcaaccatatctggaagcgcaccgccaacaacatccacctctacaaatcctatcccagaatcgtgggcgagaccggaggcaaggacttcatcttcgcgcacgcttccgcggacatcaagaccctggcggtggcatccctgcgcggagccttcgagttccaggggcagaagtgcagcgccgcgtcccgcctctacattcccgacagcctctacggcaaatggttcgaggaaatcagcgccatgctcgcgacggtcaagatgggcgaagtccaggatttctcgaatttcgtcaacgccgtgatcgacaaaagcagcttcacaaagataaaggaatacatcgacaaagcccgcaacgcgtctgacgccgagatcgtttggggcggaaagtgcgatgacagcaagggctacttcatcgaaccgaccatcatcaagaccaccaatcccaagtttgtcaccatgcaggaagagatcttcgggccggtgctgactgtctatgcctaccccgaaaaagagttcaccgagaccctcgacctctgcgacaaaacctctccctatggcctcaccggctccattttcgcgcaggacagaaccgcgatctccgtcgcctccgaactgctgaagcatagcgcgggcaacttctacatcaacgacaaacccaccggcgccgtggttggacagcaacctttcggcggagccagatcttccggcaccaacgacaaggcgggatcggccatcaacctctaccgctgggtttcggcaaggtcgatcaaagaaaccttcgttcctgccgacgactaccgctatccctttatgggctaaacataaaccacataaccggagacgggatgattcattcgtcccgtctcttcgttttggcattattcaggcttcccatgtcgccgcaacctgacagcggtgtgaaaatatgctgtttttctaatgccttctgtaccatgcagttagaatctgacagccagacccttgccaattaatgcgcccgcctgaaataaatgccgctcccatttgacgggatgggctaagtctatattttccgtaggtcaaccttataatttataaggatgacctaaggatggtggcagcaaatgcaggagcagcaagggagggcgctatgaaggattatgcagattattgccgttgtttttggtgaatgttatactatattgtttgcgttcttttctgtgatggtgaaaaggtggaaaggttccccaaaataagtccaccaggctacatactgtgtcatcccgggcaagcgcacgcttgacccgggatccagtcttttgaaatggccgtagtaaagtggaactgtgaaatggtgtcgttagcaatgaaatacaacactgcgcaaaacgatttatccgttaatccgtgtaatccgtttcatccgtatgatacttggcatgcaaatcttatacggattgacggatttgacggatttacggattactatggtaaaagaataaggcttttcacccagccccgaaacaagtccaccaggctacatactgtgtcatcccgggaagtcggggccccctctggggtggcttacccgggatccagtcttttaggaacaaagcacaccaagactacaaagcgcgccaggcgaaaattattacttgacagccgctttatgtgcaaatataagtatttcaaatggtccgtaatctaaaaggaggatccgatttgagcaagaaatgtattttggcaatggctttgttctgctttcttggcgcgttgggcgcggcatcataccagggatttgcctggaacgggcttgagccgtcgtcggtcaacatggctctgggtggcagtcctgtgggtgtggtaaaccactggcacaaagaccccctttgcgcttacggcaaccccgctttcgcttccctgggagagggcatcgcgtattcacacacgagctatctgtatatgcacaaaagcgatatactgaaaacggaaaacctggaataccgggctgctttactcgggatgtcgtatcacggtttcgcgctgctgcttccagctttgggaaacagcaacagcgccggagtcgagttgggagagtttgccgtctcggacagcactggcgagcttgtggataacttttccctgaacgaagattcctcgaccctcggtttctcggtgaacctgcccgcggcactggccttgatggcacctggcgtgtttccaagatgcgtcaggcatctggctctgggcgcaaattgggtaagtaacgcgagcgatccacatcccgatcctgataatgagggggttctctttagcttgaagaaagcggaaagcgtcaatctgggactgtctgcctgtctgggcagcacgctccaatccggttttgagctggaatactccttcggagcggcgtatatcaatgcttttgacggcaaggcggaatactcggggcaagcatcccgagatccaatttacaagcgtctgagcgttggcggagctatttcgctaagcgcggaaaatcctcactactcccaagggcacggccttgcctcggcagtccgcaacttgtgcagcggcagagtgttgttaggcgcggcggaggagttcagcgatgacgcgccgcttctgggattcggctgcgaagccggggttttcgacaccatcttcctgcgcgcgggataccaccatgacaaggctggaaacattagcggccaaacctacggctggggcgtcaatctccactatcgcgacctcttttcggtgcgcctgaatcacgcactttttcccaggggcaggctgaggaaccaaaaaaacgcctacgattatggcgtttcggcaaacatcctgggcttgtatcaactgctaagcaaatgacgcgtatccgcgattgaaggaattatgaacaagataatgctatatacatcggcagccatcttgatcctaagctgcctgtcgctcatgagctgtgaacctgccaccaaaccggactcccccgctgcctcggaatgctggctggaaaaggtggaacccaatcccatgcccgagggaggcagttgcgagatagtttgcggggtcaaagacggcctgcaagcaaggttggccatattgaattccgtggggcaggaactgagagactggaacctaacagccggaaccagtttcgtaaactgggacggaaaggacaggcacggcaacatctgcgcgagcggtgtgtactactgcctgataagcaccgggagccatagtatctctctcaagatgttggttgcgcgggcaaagtaaacacccgacctataaacagaccacacccaagctatacagtgtgtgatcccggggcgagcagttcgcgcagatacacgcggataaaaggcgcagattgccacggattgacataaaaggattatttcggggctggctggttgtttccaaaagactggatcccgggtcaaaccaccccaccggatcgttaccgatccggcgaggaccccggtaggccgtgatgacgcggaatattgtcgggtatgatttgttttgtagcttggtggttgtgtttggattggacgcttatccttgtatcctgctttttaattcgtgttaatttgtgtaatttgtggatgattattcaaaaagactggatcacggctttatggcctggtggccgattctttcagcggcgcttgatgatcgcgtccgaaaacttggtcttgaaaagggccgtcctgagcagagccttgaaacctgtgctcaccgagtggaacttcaatgtccctgagcgaaatcccttgtagagcatggggatcagccgccatttcttgcccagatagatgctgaggtaggctttggactggaagcgttccagatccttggggctcatcccttggggctggtaaacgcagtgggtgaggtcatacttttcccagtcgtaatggagcagcctgccttccttttgcagcctgtcaaagacctccgtgccggggaagggcgtgagcagggagatcaccacaatgcccaggggcagggaacggaaaaagcggatgttctgacggatatagcggggatggtcaaattcatcgccgctgcccaggatcatataccagacatggctgatcctgagccggttgagcgtgtccaccgcctttttcacctgggtgctgtcgatctgcttgtgcatcttttccagcacttcgggaacgccgctttccaggccgatggtgatcagcgaacagccgcaggccgccatcctggcaaaaagctcgggatgcttgtagataacgtccacgcggctcatgcagttccagcgaatcttgaggcggcgctcttcaagctggcggcaaaattcgttcacccatctgatatcggcggtgaggttgtcgtcgtgaaaccagaaatccttgtagccccaggaaacgaactcctccagctcggaaatgacagtctccacgggacgctggcggtatttgccgccataaaaggaagagatggagcagaaggaacagcggaaggggcagccgcggctggaaaccagcttgggcgtgaagctgaactccggggccaccagatccatggagatgcggggcaggcggctgaggtcgtccaaaatagcgatgtggccgtcgttgtggtagcggccgtccttgaggaagacgataccggggatttcaggatagcgttcacccttttccagagcagccagaagggcgggaaagacctcctccccctcaccccggcagacatagctgacgccggtctccgccaaaacttcgcggtacatgaaggtggcgtggtgcccgccgatgatggtgggcaggccgggatagttttgcgccagatcgatgaggatttcgcgggcgacgggataggtggcggtcacgcaggaaacgcccaccaagtcaggctgatagcgcctgatatagcggggcagggtctcgcggtcggcaatcaccaccgtggccttgtgcccggcatccctcgccgcggcagccacatagaccaggccctggataatctgatgccccttgcgcaggctttccaggccgctggtgcgcgcgcggggtgaaacaagcaggactcgcatcgttcgatctccctttatattgggtgtttaacccgaccgggagcgaccccgccgcaggggcaggatcactcgaagggcaggaagttaaggaacgcgttgacgtgggcagtggataagaccacccctattatcacgcagacgacgataatcagcttaaaatagtcctgagccttgagcatgctcaccaggctcgggtcgcgggaaaggtaggcggaagcggcgtagaactcttcaccgatgagggtatagtcgcaggtggtgataaagaagggaatctgggtgatggcatcggtggcggcgatctggatggctccggactggtttccggtttcggtcatgagcagggcctcggcgtagaagtagcccatatagaagatggtggcgaccctttcgcgcacggtgattccatttaccgccgcgcagaacgcgaactgggtgtcggaaacgaagaagatgtcgttttggttgtaggcgtcaggcctgcccatttcgctgtaggcggtttggaccatttcctgcgccaaggggacaacaaagtagtccacatggggggagatgagcctgatgtcgtattcagcggtctttttggcgatctggttgaggatcatcatggcagagatggtgcacacatcgcccagggtgccccagccgggaacgaacatgaccgggcgtcccatctcggtggcgcggcccacggcgttgtcaagctcagccaatcccgcgatggggcggatatacaattctttgcggcgggatattgatacggtgtaaaccaccagcgcgagcattacaaacgaagcgatcagggtggcccatttggtgttgtcgaaccagttgcccacgggatagttccaaatctctccaccttcgccggaggctggttcggcgatgttccagaagcccttgccatcggtcatcagcagttgataggcgtagctgcggctgtttctgtccttttcagcccggaagaccttgcgccaggttttgtccgactttgcgtctttggcctgggcgtaggcgggatggttgcgcgcgaaatccagttcggcctgtttgtcccgcaattcctgggctgcctcggaaaggctgtctccgggcgccagcccggctttgagcgcggccagttctttctccaaattggtcagatagggggcaaaatcctgtttgtaaaggggaacccacaaaaccgctccgctgacggggtcctttgccactttgaaattgggttcaagcagcagcctgccggtcttctggtcaaagccgacgatctcgggggtgacggtgtcctcaaaggggatggtgtggtcaaaggcgcgggaaatgccgccgatgcgcatgacggggctgtaatccgaatccagtttgcttttggcaaaaacatcgaagaaatacttgttgagcaactggccgttgagggtgaccccgctgccgttgaaacgcaaggccttggcgtcgtaagtcacatcctgccagaccacctggggatcgaaatccttctctccccgcaggcgaaactcgacgcgcaccctgaagctttggtttttggcgaggccagcgggcagcttgaactttatcacgttgtccagatagtattccgtgaccgtgcccaaggtgtttttggcagtatcctggaaggtaaagcggagcctgtctatctcgtaatgctcgtttttggagagttcgtagttcaccctcagcttgtttttccgggagctggtataggaagcctgcgttatgaaggcaaagggcttgccgaaggaaacgatgaggttgtcacctttgtcgttgaccttgtcaatcacctggaaagccggcacgatgggcagttccgcggagttttttacctgcgcgcttttgcccagggtggctgcctggaaaccgccgtagtccataaagctgagcaccggaatgtagtcctgcaggctggaaggcagattgatgccttccgcggccgcgtccacctggtggtaaaaggtctggctccaatagggaggggtgtgttcaaagagctttatggagccgttttgccaggcggcgtaaaacacgctgtcaggggcggcggcgttcttctgctgttcctgccggtaaagcgggagtaggcttttgggcatcagccagccctgccagaggccgatatcggtggttcccgtgggagggctccattcaaacttgaactgcctggtgtcctggatgtaggtggtggcaaacaccgcgctggaatccggccggttgtcaacggggataacgctgcagacccgggcggcgggagtgcgcctgcctgtctcggtcaccgccaccacgctgtaatagtaggtgtttccaggcagggggttggcatagatgctttcaaactggttaagcttgtagccggcaaagacttccttgccctcttcgccatccttttccacccggcgggagccgttgtagaaaccgcgggcggtgagattgcccagcacgctgtaatggggaagcatggtgctcacgacgttcgcgtccctgggaactgcctggtagaggggactgtccggagcctggtgtttttcctttttcaattttgagggagcagtctcaaactggaccagggggagataatcccggtcgtagaaaaagaggtattcgcccatcacaccctgtttgggatcaacttcgatattgcccagcaggaagaggctgtccggcgaatggccgcgatagacgttgtattggatgatccggtggcttttgtccagaggcttccatctcaggagtactccgctgccatcgtcgtggggcatgtcgagagcttcaaagacctccaccccggcatttgcggaacggccgcggacgcagccgcccatggccagcaggagtgatatcagaactaagaggcagaataaaaagtatcttttcattgctttatcccttggagcattgctggtgtggcatcgacgcctgaacagagtccggggggaagaccgggcttcccccctcatgatctgtgtttatttagttgaatatcgctttgatgacgtcgttgaccaggaactggatacgtccgatcagcagtgagatacgcgccataacggttagtccgaatgacgcgccaaagccaaccatcatgtaccatttgccgatatccacaaacttcccataggcgccggtgtgggctttggaaaagaagaagtagagcaacacggcgatagttccgatgaagatcagcaacaggttgatgttttcgatcggcaccatagcctggcgcatctgcaccagaatgctgttgtgcatggccaagggaacggacgcgcccacccccatcatggaaaaggcgattggatagcgcgaaagccagctgtatttgcgggaaaagcggaacaggtagaaaattccaatgatactgggtatgatcagtatccattggtgtttgaggaagatgggctggacgaagaaggggatgaaggcgcgctcgtaggtgagtaccacggagtagcccagggatatccccaccagcagttgttcggacatctgatagaacggattgtccttgtaaaggaaggagaagatgcagagggtgaagaaggctccaaccaggttgctaaataattcaaaagacattttatcctcccttacttcttttgcgctttggcccggctgatgaagtagccgatgtttccgatgatgataaagagaattatcatgatgtgggccaccgactgggcgttcatgccgatacgggccgtcttgaatttatagatggtgttgtgggtcatgcggttgaggtcgttccaggctgtgtagccaagcttcttctggtcgtcctctttcaccttggtgacgtcgatgaccacgttgttgtcctcctcggtcttgtagctgctcatcaaagcctggacttccggaggatagttggccaggaacctgtcaaactccttctgcgagaaaacagccttggtttgagtggtgatcttgagcagtttctggatggattcgtcctccagaacgtcgctgctgaaggagcggccggggactatcttgttgccttcctcgtcgtaggtgacgcccatggggtcgccgggagcgcggtaagcggcaaagacatccaccagcttctcatattcggcagcgcctttcaagcccgccagcatgccgatgaactgtccggtttgcaggtagggatattcgtccgccgccataacggctgtgacgccgacggcgatgttggtgccgaacttgggcctggcataggtgagccagtagccgcccgccacggagccggaaaactccaccaccaggttcatctcgctgtagttgttgatccctttcataatgggcaggttttccaccttgcgcccttcggcgtcggtgggcaccgccgtggcaatgtcgtcgcccatgccgatgatggttggcatgatcagggcggcggggatatagccaaagttgcagtagtccactccagacttgatgtccggatactcttctttcacggagttcacggcatagtcgatgatgggggctccggtgggcaggaaggaaagcaggaagagcttcacattacgctcgaagcagtggcggatgatcgccacttccatcggatacagttccggcatggtggaagcatcgtgccagaagctgagcaggacagcgcggtcttcccggccggcataggagtctattagctgataggtgttctccgtgggaggagaggtgatgttgtcggagttataggggatcatcaggggaatgacgatcgccagggcgaccacgatgtagatccaccggcggtcgagcttttgcagtctttcaaatagattcattttcacctccgcctttaatctccgcccagatacgagcgttcgatgcccaataggatcttgagggtggtggccacgctgcccagacccacacccagcaggattccgcgcttggacgccagattcggcacgtccaggatccattgggagatatcaggcaggtatttgctgatcttgacgcccagaggcacctgagccagcatcaccactatcgccgccaccagcagcacggtggcttccgcggaacgggcgcggaaagccttgtaggcggcggaagccatataaaaagccagcagagcgaacatcgtggcgctcatcggcatctgcatattttcgaacagccacatatagaggccgcccttctgggttccgccgatgaatccagccaaagccgtgatgatgaaaccggcgaaaaagaagaaactgtattgccatttgggagctttgcggcgaatcttggatgtgtgcatcatgcaaaggctgatcacgcccaagagcatcccgaagggagacatggcacgaatccagggcacatagaaatcgtagtagaatacatcctgcagcagtctgtgcggcacaaagacccacagcacccagacgattcctcccaggatcactatcattaatggtattgtcttcttcatttacgacctcttctatttaatagggaatagttgcattaaacctgtgacctggaagcttgccaaaatgccgcccagaatcacgaagatcagaatcaggaacttgaaatagtcctgggctttcagagtccccagcagcatcggctcgcggttgaggtaggccgaggcggcgtaaagctcttctccgatcagggtgtagtcgcaggtggtgataaagaaaggtatctgcgtgatggcgtccgagccggcgatctgcacggctcccacggtgtttccggtttccgtcatcagcagggcttccgcggcgaaatagcccaggaaaaagttggtggccatgcgttcgcggatcatgatgccgttcacgccagccacataggcaaattgcaccgaggtgagatagaatatgttgtttttatcgtagctgtccggacgccccacggcgtagtgagcctctctcactatctcctgggcgatgggcatgacaatgtagtcgtagcaggggacgatcagcttggtgtcgtattccgcggcttttctggccaccagtcccaggattcccagggaagccagggtggccacatcggaaagaccgccgttacccatacaatacagcatcgggcgtcccatctccgtggcgcggccgatggcgttgtcgatctcctgcaagcccgcgatgggacggatatagagatccttgccttgcttggccagtcgcacgaagaccaccacccccacgccgaagatgatgcaggcgacgagggtgaccagtttgttccagtcgaaccagttggataccgccaggttgtaaatatagtcgccttgggcatccttttcgggataggattcggtgaagaggccgcggccgttggtcttgacgatcatgtaggattgcaggcggctgagcggttcgcggatggaagccacgaagttcattctgccgcggttgccgcggaaagtgagggatttcttgtaatccgggtcattctcgtagatcttgatggtcttggccagactctcgtttttcgctgttaaggcttcaatctgctgttgcaaagcctgcgcctggggattggcagccccgccgggaatagctttcatttccgcttgcttggtggctatttcggccttgttgtccttgatgtcctgccgcatcttatccagttccttcgcggcttcatccttgaacacgctggtacggatggtgcgggaatccttgggatcgtcctgcttgacatatttcaggtcgatctgcgattccaccaaagtcaggttttgaaccttttcgccagccttcagcttgcgggtgtagcgctcgccgcccatataggtgtaaagcgtgccgcccttcacaaagttgaagcccagcacgggcttgcccacgttggcaacgtaagggatggtgacatccaggctattatcgtaggaagtgttctttttcaccagggtaaactgcgagccgctgaatgttttacggaacaccgtattgtgcacggaggaaacatccactccattcctgaagagttcgttggaaggcatcagcgacatcatctggttgtcccagacaaggttttgctccaacacatagttgggtaccaaacggcctttctgatatgtgatccgcccgtttttggggttgatctcgtaagggctggtgttcatcgtgatgcgcaccttgaggcccttgttcagatcatagcccttgggcagggtgaccttgatgatgttgtcctgatagaattcgttcaccctggcaaagggcttgtccgaaccgggaaccagcagttcaaagtagatattgttgaccttctgcacgtcggtcttgttaagctggtaattgatcttcagcctggtgccgccctttcctgccagaccgagcttcgcgaacaggcctttgttaccgttctcgcgtttgataatggaggtcttgctgatgaatactatcggttcgttccaaacgactgtgagcctgtcgcccttgtcgttgggtttgtcttccaccacaaactgtgctgcctggggcagcttgctgctgtccgaaagaactacacaggcttggcgggacaagggggaggggttgtttctgtaatcataaaactggatcgcgtaacggctggtggaagcccgttcccaactcaagccggctggcaattcgtcatgtttgaccgccgcgtagtttttgaacgcgcctccattgatttgaccctgggctacaggcagcgcgttggccatggcctggggcgtgcccttgatcttgcaccattgcgaatccggcatctcgggcacagccatgatctggtagaaggcgaggtcggatttgttgaccggatactcccactcaaagcgcagcgtcatgctgtcttgcaaagcggtgcaatagagattgggagaagcctcgggcgcgtcatccacgggaaatccgcacttgggttcggcaattcccagatactggttgcgctcattcaccggaaccacggtatagtaatacaaaatcttgtcttcttcgctggcaggatcgtaggtcttcagggaagcagagatgctctgctggttgattttcacgccagaatagacggtcttgtcttccgaatcggcggaaaaagctttcttcgtccggcgatagtagtctttggattccattatcgagtaaaggttgtatccttcgctcaacctggctaccaattccatatcgcgggggatgttgcgatacaggatgctgcctttcttctgcttttcgtgcttgagctttccaggcgagttgatatccacaaaatcgttgtagccgctatcgtagtaatacatgctgtccgaggcaacgccggttttcacgttcaccgccacggatgcaagatagaacagggaatcgggggtgagtcccctgtaaatgcggtattcctggattctcttttcgcggggcaggggcttccagcctattaccaggccatcgcctccatcgttgggaatatcccgcacaaagagaccctgaaccgtatccagggtttgcccgttctgatccttgcctgttgaaaccttgcatccggccagagccagagcgaggacaagcatcagtccgaaaacacgtatgtacaatttcatacgcttactcctatgctttttcaatttagtaacttatattaaattgcatcaccttacaactgcgcaatattgtcaaatccttttttccttgcctgatggaacagcggggcttgaaagccctgtctctggttcttggctcgggcaacgcataagtctgaatccctacttgaaattctgttgattgccacagagaaaccagacgccatcctcccggtaaaaataggaagcgtcgccctcggtgtcgggatccagatagctgagagtgctgtccgcggccgtgaaggtcagcttcatgctcacgatcgcccgggagccagccaggtcaatatcccgcacttccacgtcaagcaggtcgaagcgtgccatacggtcctgccacagcccgcgcagttgaaagccatacatccctttgtggtaatagtccggatgcacctgggtcatgatgccctcaatgtctttccagcagaaatcgcgggcaatgcctttcaggatatcctcgatgcggattttgtccatgtcttcgggactgctggccaaattgcaggacagcaggaacaaacagagcaacaggacgccaagctgcttcataggcggctcaaccaggccagagtctcaatgtgccaggtttggggaaacatgtcaaaggtctggatgccttccagtttgtaacgcccgctgccaagcaggatcttgaggtccctgtgcagtgtcatgggcgcgcagctcagatagaatatccgcttgatacccgtgtcgattatggcttgcaaggctgccggtttcactccggaacggggagggtccagaatgatcacatccggcgttttgcaggggctgctttgctggtctgaaagcagcgcgggcagggcgtcctcaactctggcgcagagatggtcaacattcgccaggtcgttcagttcggagttcagttccccatccagtgccgcttcccggcattcttccacgcagagcacgcgttctgcctgcgcggccaggttcagccccagcgccccgattccgctgtaggcgtcgaagaccagtcccgcgccgcccatcagtttctgcaggcgggcgatgatctgttccgccgtgccgcggttgatctgccaaaagctgcggtagtggatgcggaagcgtttgcccgccagttcgtcaaagagccagggattgccatacagcagtttgtcttccgggcccaggatcacgtttccccgttcccggttgatgttttgcacgatgccgctgatgcaggggaattccgcggtgatctgcttcacaaagaggttggaaaaaggcagcttggctcccctggtcaccaggatcagcagcaccgagctttgatctctgttgctgcggaggcctatgtggcgcaaagtgccggtgtggctggcttcagagtaggcctgcacacccgctttccggcagatttccaggcaacgctgggcgatggtgtcaaagagttggggatgcaggacgcagcgctgatgggggacgatcctgtgcgaccagcgcgcgtagatgccataatagaggccatcggcgccggaacccacgggcagaaaggctttgttgcggtagtttacgggatttggggaagcgggcatggcgccgatcttcaaatccggggccaggggctgcagcaattccctcaccagttcggtcttggctgccaactgcgccgggtagtccagcatcagccaatcgcagcctccgcaggggtcgtccaggtcaaaggaagcgcagtccgcttcccgcactcccttgccccgctccagccaacgcaggggcctggcaaaggcggtgtccttgcgttctttgaccagctccacttccgccaggtcgccgaccgccatccgctgggcaaagatcgccttgccctcgtgaaagcccaggccaaaaccgcccagagccagcttttctatccggaggatgaatctcttgttcacaccatcatcttacgcagggcttcaatccgcttctccaccggcggatgcgtcgcgaacagggagagggggctgaagttgttgatcttggcaatggcataggcgtctttgcggcgcgaaggcacgtaagctttgctgatcttttccagggcggtgatcatgtggccgggggtggtcagggcggctgagccggcgtccgccttgtattcccggtggcgcgaatgggctgccagcacgatgttggcaaggatcatcagcacattctggatgatcatcgcgatggcggcctggctggcggaatgcatcatcccggacgaagccccgtcatcatcgtttctgcctcttctgccgctcaggagggcggcgatgatattggccagaaagagcacaaaggtgttcatggtgcccatcagcagggtggtggtgaccatgtcgccttccgtgatatgcgtcatctcgtgccccgccacggcagccagttcctcctcatccaggttttgcatgatcccgctggaaaaggcgatcagcgatctgtttttggacgcgccggtggcaaaggcgttgttgtccgccgcctggtagatgccaaactccggcatcctgatgcctttgtgggcggccattttctctatcgtatcaaagagatagagctctttgccgcgggctgtctcccgggtgagcggtgtgatcctgtaggatgccttcgccatcgctttgctggaaagcagagaaatgaccgctccggcaaagccgaatatggcgcagtaaaccagcaacccgatccagtccgagcttttcacgcccacgatctgcatgataaaacccaagacagccaacaccaggatgttgactgtcaaaaacagcccccaacgtttaataatagtccacatggattatataatcctccttacaggtttatcggattcaggggcagccacgggaatgatctcagcccgtgccacccttggggtcacactaattgatagtgcgataacaaggcaagtaaaatttttggtgcccagagattagaaaggcttcatgcaaatatcggggcttcctttgaggtggaaaggtggaaaggagaccttcgtggtgaggtggtgtcgtggtgattgtaaaaaagagatagaacgcggatgacaggatcgacaggatcagcaggatatttgaaggtgaaatagcgaaaagaaggccacgaaacaagtccaccaagctatatacagtgtcatcccgggcaagccggggtcctcgacggatcggttacgatccgttggggtgggatagcttgacccgggatccagtcttttaataatgtccacgaattacacgaattatcacgaattaaaagaacaggataaggacagcgtccagcttcaaaaaaccacacaagacccaaaaaccgcgtcatcacggcctgccggggtcctcgccaaagcgcgtagcggtttggtggggtgtatagagccgggatccggtgcccaggggtggcaaagtctgtttgccacagagaccgaaggtctctccccaacaggcaactccgttgcctctgccgaacagacttcggcagcccacgaaacaaaccccaccaggctatatactgtgtcatcccgggcaagcttgcttgacccgggatccagtgctcagggggtggcaaagtccgtttgccacagagaccggaggtctctcccaaaaaggcaactccgttgcctctgccgaacagacttcggcagcccacgaaacaaaccccaacagactacataccgcgtcatcatgggcaagcttgcttgacccaggatccagtctttttatacaatactccccatttccggccagtttggccgctttttggccggattactttgtagttcggtaaactgtggatgggcccctaccctcacgggatacaaggccattctgagttaaagactccaagtatcttctaactgaacgaatgggaagttgcattgaatctgctatctgggttgatgataacacaccgtgcttctctattgtttgatatacagaccttttgagggaggaatatgcatcgggtctttcaaaccgatcccgagagatcaacttgagccttaataacagatcattctggactgtcatacatagtggcttcaagcgatgagctatgcgaggtatttatttggggaagtgctcgtgcatgatcttgatatcagcctggcttgcataattcacgataaagacctttacatttgcttgtgattcatacttaaccagcttgcctccggctattatttgggcgtttttctcttgcgatgcatattttacaaaatagaccttgtaatccgctttgcttgcgtatttcacgataaacactttagcctgacttgacattataacctccttgatttacatgatattgctttgcattcagacgtccaggattgttgcttttatcctgttggtcaatttctcgaccaaatcttcagcgttttcccagataatatgtttgtactgtcttgtgtcaaaaatatcagatatttgagttccttctttacaacaccagatcaccggttttctttggcccatcgcataaccggcttcaaagtggacgttgatattggggattgtggtatccgctataaggaaatcggatttgttaatctctgcaataatcttatcatcaattttgtcgttatactcttctttgtcaacacggtatggtatcagatcaagtgaaccaactgccttccgtattccattctcatatacgctatccagttctgtatctccaaatttcatagccacaaagacctgttttgttttcacactacccgagacaatctggctgattcgctcccagccttttagctctaatctgagagtatatgtcttagcgagaaaactatcattagaatcaacataccctatgttttttgcgaatctgactaagtaatacagttcttgtttgtcatgcataaacagcaagggacagtcagtttccgcaatggctttcacttgatcgactcgagtgatatgcttatgtaaatataacaataggatatctatcaactcaagtggaccggagggaaatctcacgctttgctttatcttgtcgatgtcttggtggtctgttattttcgaaataattttcgattcttcgtaaagatgcctgagcgcaatacaaagctccttatctctggctggtttgactcctggtttattaatattaaaatgacttaccatcctaaagccattgatctcaaattcaccacaataggcacagcggaaatggaaattattattgtaatctgtccctatgggtgattcactcagtgggttgcggcatatcggacattctgtaacaacgcagttcatgtgtgcatacctccttggtactatcgttacgttatgaatataaactgaaactgagcagggctaatctctgttattgaaaacctgggttggcgcaggaacagggaacccttgaaaagatcactttctttgaggacagaaagaacaacgggttccgccaaggttttgatgggcttgaaatccacgcacagacgttgcgtttcacaagcggtaaaatcctgaaaaggttcgcgggcaacttccaagactcccatgcaggaacgcttatgagggtcataatagatggccttatcatcgggaagcatagacgcaatcagtttttgagcgtatctacccttgatgccgtagaggctataactgtcccggaagagaacatcttcccagttatggtgcttatagggattcctgatcatccaataacgcattgttaaccaaacggggataacgtcgggcataccattgttccacaagctcaatatcttgatcacacagaccgtatagttcatagatgattttatctatttgcctttgttcattacttgaataatcgtagtatctatcagatatctgttttgttatgatcttacggactaatgagatgattttatcattgtttccacagataattggtatttctttgattgcatctatttctgcagctacaccatggtatatcaatgccttgaatataaatttacataattttgaacaaaggatagacaaaatgttgtctatttggagataaggggttgtaacattaattaatgatcctctaatatcataaacagaactactattgtatctaaatgttggggcatattgacctacaatcgaaaatgttattccgttactaaaatatgtgtcactgttctgaaaccttgaacagatagcatttgatcctttaccatccctttctctgatagtcagagttttcattcgagtgacagcccaagaactccaatctatgaagaaatcagttttaacatagtagtttggcagccaaccggattctgtataagaagcgccacctttgtcataggggacaatgtattttccaccgaaccaacggtcagggtcaaatggttgctcggagcgtgattgatgaaagccaaggttgattatcttgtggcggatattgtcattttgtgatattttttccagttctgcgtcggaaacgacatatttcaggtatggctcaatgcttctgtatgtgggtccagattcgggggtctggaaaagatacgatttattgtcgccagtggcaagtccttgagttaccgacgcaatatcagagagtttgacaagcgtgaccttcttaccattgatctctacagttctttcagctttattcttagggttccgatcaacgccaacatcatgcattaaactgaacaacttaggaggggcgacgaagaaaggcagcaaactgcatttatggataatgttttggtgataaatgaacacggcatggacattgtcggagtattcaactgctttttccgcgtctgaaatatcatacaggatttccaggaacttatccagatacttgtggatgctaatgttggtcatatccaccataaggcattgatgggaatctggtatgctataccctggctccgctttctggcacaggattaccacggtgttgaccacttgcttgaaggtgtccgggtgcatgcggattattttgtggatatagttgtcgagcaattgcctgcgcaattttttgtgggacttgatcgtcataaaagtgtcggaaacgatgtaagacaaaaccccatgcggtttcagcggagtgggaaaatcgttgaaattcatgaagcgggcgatgaaagcaccataagggtcatttgaacctaaaccaaggctacttctaacctccggggagattttatcgcctccatagggtggattaccgattacgatatcgaatcctccttccttcatcaccctgggaaagaaacattcgggatggaagaagggacaggcgatattgccatacataaaccatcgtttccaaaacactttgagcctgtctttgcttggatttttaagaccccacttgaagctttggtataagttgctaagttcagtggaaatacgttcagcgagctgttctttttctgccttggtatgttccgcctgatagtattcctcaatcgctcttgataagtcattagatactatttcttcgaatatatcagtttcaatatcgttgagagaatctgcgcagatcaggttggtctctaggttgggcagaggcatcactccaatgtctttgctacagtctgtattttggtcaaccaccagagatatgaagaatctcagttttgcgatatgtactgccaaaggttggatatccactccaaagattgagtcacgcaggatgccaatcttgcgggagtagtcgtcgtagtgttccttcaggtgtttgccaaaatcgtcgcgatattttccttccagcggttccagttttaggtgtaaccatttagagttatcgggatcgaccagattgagtatccgtgtgatcttgtgaagcatgcccatgggaaatgaaccgctgccgcaggctgggtcgaggatgcggattttatccagggcgtcaaccacaaaatcgtcaaaacgcttctcattggcattgacaacatcatggtaaactaggaatctgatgttgtctccatactccattagccccttttctttcgccttggactccagatacaacaccaacgagtcattgaccatgtaatcaatgacctccctgggagtgtaatacgcgccgctgcttctgcgagcgtttctggaaatgtcggggtccgggtcgagttcagccagaaggttttcgaagaccatacctaggagttccggatcaagcgcgacatcttcttccaggggtgtgttttcctcgatggtaaacttgaacttgcccagaatcacattcaacccgggaacatcatctgatctcctgtttccaggagcctgccagccgtagaagatcttgttgggtatgctgatatccgagtctgctatgttgttgttaagtatgcagtggtcttctaaaaactcatcgtcacggttgaacactcctccattcaaaaatggtattctttcgaaaacagtcaaatccagtgcaggatccaggtatttttcaattttgcctttatccagtttacgacttttcttaggctcgttcaggcaatcgaagaacactgtctgcagaatgccacgataatagctattgctttcgggattatcgttatcttttactatcggatagggaacatcggtgtctgagaacagctccagaatgctgctgtcaataaggcctttttcttttaggaaccaacagaacatcaaccggcaaagcaatttgaccagaaagtgcttcttggtctcgttttgctcttcttcagacagttgacactgaaacttgagcctgataatagaaagggaagtgcgataccaagctatgatttgattatagaattccctgtttagttcccggatagagagttgtttctgccaagctttatgcagttggttgatggatgaaacatccaagttcccaagacaaaacttctcaagaatgtcaatgtgccccctgtgcggagtggcgtatctgatatccttaaccaagctaactttatccaagacatctctcgtttcgtcgcgtttgttcagccttcggttgataacggatgtagtcagcagttcgccatatttgattagcagcagcacaggcatcgcgaagcagcggttgatttccctggttaatgcaaccaactcttttcttgtggcatgaagtcctttcagttcaattgatgcgaagatatacgacttaacctcattggagtcaaccgagttacttttaaaccccggtatagtcgtttgaacggagaaggagccagcttctctgatctcatcatttgtgagttgaaagtgcagattgatctttgtccagcgctctttcaaggcttgaacaggcctaagttgatggcgggtagaaaatgcttccgtaaattctgaataggtataggatacttcttcgaatctacgctgggattcatagcccaggactttccaaaaatcgtaggcggcatccacaaaaggacgggtttgaaagttattcaaagcctcctggatggaaagtttcatgtctgtctttgcgttcataggtcttctctctggtgcttatttgattatcagccaggtaatcagttcaaattcaccgccggggtcatgttgtttcaggggagggagcacagcatcgccatgggtttggagttgatcctgctttttctttgcaagggaggctttgatgctttttaaggctttctggatgagctcattataggctctcatgtcttcgcccgatttggtttcctggtcgaactggtcgcaaaggctttcgatgggacttcgccgtccgctggccaggatccggtacatatccaggatctgcttggcattaaagaaacggaaacggacggtgccgtcggtgcggatgtagatcataaaatagggatggagagggttgagcttttcgtattccctgccagattcgttgtggcggaggcagaagatcacaccgggccggatgatttccctgtgttcctggctgactttgaccgagtggtcccaaagttcgtggtcgggagagggcaccacggtgtacaggccaagaggggcttcgcgcagctctttttcgtttgctttgatatagttaagcagatcaacccggaaatcatccagagtgaaatcggtcaggctgatgccgtcttccatgtcttcgatgtcgataacctcttcctttagccttttcaactgcttggcgcggaacttcatttcgttggaaagcagttcttcaaattcctcttcggcgaagagattgtcctcgcctgtggcggtaatatccaccagagccatcctcgcctccactctcaacttgagggagatgtatttgtccaggtctttggtaggccagaagttcagcatctggattttggcattggggctgttgatgcgatcgatacgcccaaagcgctggattatcctcaccggattccagtggatgtcgtagttgaccacatagtcgcaatcctggaggttttgcccttccgagatgcaatccgtggcgatgatgatgtcaatctcttcatcctggggcaggatgggcatcttgtggcgctgcttggcaaaaggggcaaagcaggtgaggatggcgttgaagtcgttctggaaacctttgggcagcttgatggttgttttattatgagaacttccggtgaccagggcaacattgagaccaagctctttgtgaatgaaatccttgagctgctcatagaggtaatcggctgtgtcggcaaaggcggtgaagatcaatatctttttgttgtccttgtttaccggatgtttcagtttgttggtaatgatctgcttcagttcctcaagcttggcatccttgtccggagttaccaggctcgccgtgttgtaaagcgagatcaactggtctttgtccttgctcagggcttccttccatttctccagatcgaggtgttttagttcaaacttcagtttcttgccaactgtgaaatcatcgctgttatcctgttcttccggtgaaaccgcgtcctcatcgccaaaggagtaaatatccccatcttgagtttggccggattcaaatttggcgatcttgtcctgcaggctgttgatcttttccaaggcccgcccgagggtcagggtataggaatgaacgctgctttccaggcgcttgaggaagtttatcttcatcatctcaaccagaaaatcctcgcgttgggcttgggaaaactccttcactttctctgttggctcataaagttccttaaactcctccagaacgaagctggagggtttgaagagggaaagcttgtaagcctggatgtcttcattcactttgtcgtaggaacaaaaatccccttccaggtcgatattcgtgctcaccgagatcggcgttagccgcttgggaaagctctttttatcaatatccttgtagtaggagacaatatgcttgcggctgcgggctatggtaagttcgtcaaggagtttgaagagcgagctgtccagggcgctgaagagttgcgagcttttcttttgtcccgctttgttgctcttcacccagtttgtgaattggctctgggcttgtttcatggtgtaggagacactttctatacccaggctttcgtagaaggcgtcgtccctgccttcggtgatatagtgtatctggttgcgcaggtctttcaggttggtgttgaccggggtagcggagagcatcagcaccttggttttcaccccctctttgattaccttgtgcaaaagaaatccagcccggttatagctcaactcgtcgttttcgtcgatcttttcccgcggatttccccttagattgtgcgactcatctatcacgaccagatcccaggcgccccagttgaaattcgccaggtcgatggaattggcatccgaagttccccgcgctctgcccaggtcggtgtggtacataaccgtgtaggaatagcggtctctggtaaaggggctgagtttgttggcggccatggattggtaaacggtccaattatcttttaactttttggggcagagtaccagaaccctgtattgcagcctctcatagtattggatgattgccagggcttcaaaggtttttcccaggccgacactatcggcaataatacagccgttgtggcgttccaacttgttgatcgcccctttcacaccgtctttttggaagctgtagagcatgttccagatctcagtgtcgaaaaagccggtcttttcggttaacagccccttgtcagcttgctctcccaggaacttctcaaagaggtgatagagggttttataatagataaactctggggaattatgcacatagagttttgccaggtattttagaacttcgtctttgacatcctcaaccaaggatttatcctcgttccacagttcgtcaaaccaagccaggagatctgccctgtcgcgatcgtcggcaacctcgatattgagctcgatattgggtttgttcccgtatccgagaccattaactgtgaagttcgagctgccaagcagggctttctcaaccccgttttcatttgtgatgtgatagagtttgccgtggaggaaatttggcttgaccatggattttatctccaccttctccctgatccattccgcgcagtctcgggctgttttactctgcaccagcctgtttgccagggagatcaccagcttgttgtcctctatctcgaactgcttcttgtcggtcttgttgggatccatggaagccaggaatctgggctcgccaaagagaaagcgcaggtgatcgatcttgtccagcctgttcttcaactgctgataggcatagattgtaaaataggcggaaacaaaggccaacttgctgttgggagtaacgtttagggaaatgaagtcgcccactgtgccatatttacggttatcccgaatgcctgaattcttgttcataagatttatcctaatctccaaaataaagaaaaacctgttggcgtttatatgaagttccagagacgatttcatctataactcaaaacgcaaccccagtttgtttcgtctatttcagcaaggaaaatctgtcaacctaaaaaagcccggagttgagagctttactacaaacaataatcttaccatagatgaggcaggaaaaaactgaacccatatctcccgcaatgcgttagagaggcgttcccctcgtatttgggcaaacggactttgccattcccctcgggctgccgaagtccgttcggcagaggcaacggagttgcctgtttggaagagacctccggtctctgtggcaaacggactttgccacccctggacactggatcccgggtcgctgcccgggatgacgcggtttttgggtcttgtgtggttttttgaagctggacgcttgtccttgtatactgttttatttcgtgataattcgtgtaattcgtggatgtttcttttaaaagactggatcccgggtcaagctatcctaccccaacggatcgtaaccgatccgtcgagggccccgacatgccgggatgacgcggtttttgggtcttgtgtggttttttgaagccggacgcttgtccttgtattctgttttaattcgtgataattcgtgtaattcgtggatgtttcttttaaaagactggatcacgggtcggagcccgtgatgacacggttttttagtctggggggtggtctttttgggggtcggttgggacttgtatcgagagaacctttccaccattccaccattccacctttccacctcaaaaacacctttccaccttttcactatgataaaaataaaacgcaaacaatatagtattacattcaccaaaaacaccagcaatattccgcataatccttcatagcgccctcccttgctgctcctgcgtttgctgccatcatccttaggtcatccctcaccaagttaaggatgacctacggaaaatatagacttagcccaccctggcaaatgagggcaaagaggtgatcaatctacgctcattaaatgtataaaggttatccatagcagaggcggagcgcaaatgatcgcactggagatacacgattcgcgcagggcgcggattgccgggacaagaaaaacccccgggcagtgccgggggttgcaatctcagacagggtctgatcagtttactttgaaggttgtgtcgcctttttcaaagaaggcgatgatctgtttggcagccgccactccggcgttgacgttggcttccccggtctgggcgcccatcttttttggggtggcatagtagcggtcggcatagagttccatcagtttggcgccgcattccggttccacgtcgctcacatagcggaatttcttcttttcctcaaaggccttgagcagggcttcctcgtcaatcacctctttgcgggcggtgttgaccaggatgcagtcgggtttcaccaggctgagcaggttccagttgatggatttcttggtctcggcggtggcggggatgtgcagggagatgtagtctccggtgctgaagatgtcttccaccttatccaggtgtttgacgccgtctttggccatgatgtccgcgctgatgtagggatcgtaggcatagacgtccatgccaatgcctttggccattttggcgagaaagcggggcacatttccgaagccatggagcaccagcttcttgccagccagctcggagccgcttttgccgttgaacttgccgcgcgccatgtagatcatcatggccagcgccagctcggcgacggcgttggagttttggccgggggtgttcatggccaccacaccgtgggcggtggcagcggcgaggtcgatgttgtcatagcctgctccggcgcgcaccacgatcttgagttgtttggcggcgtcgaagacggcggcatccactttgtcgctgcggatgatgagggcttcggcatctgccacggcggcatggaagtctttcacgtcggtgtagctttccagccagctatggggatagccggccttgtccagttcagccttgatcttctgcacggcttccgcggcgaagggcttctctgtggcgatcagtacttttggcatattagcctccctatgtatattttatttctggtttcaagactttattttagtgcgttttatgtcaatgcaaatctctgtcatttgagcagcagcatacgccgtgactgcacctttccacccgcttgcaggcggtagagatagactccgctggagaccgggtcgccggaggcgtcgaggccatcccaggtgacggtgtgtgagccgcgggaacgatggccgtcgctcaggacgcgcaccaactggcctttgaggttgtaaattgcgagccggacggagccttcggatgccagttggaaacggatgctggtgctgggattaaagggattgggaaagttttgcagcagggcggtgcgcagggcgggagcttcttccgcgggattggagacgttaccggtggagacgtagctgccctggcgggtgagtgagccgcggtaaacggtccagggccggttgtccttttccgcgcggcgcaggttcagcaccagcactccggtggaatagccgctcaccagcttgagccagccgtcgccgtccagatcgcatagcgtggagggcgtgcagccgttgaagctggtctggaatggaaatccgtccaatacgctgccgtcgtggttgaagccataaaccgagttcacatagctggaaacgaggatttccaggttgggatcgtcgtcgaggtcagcgatgatgggcggggtctgcagcacggcgccggtctgcaccgggaagccgggaaggtctattccgctctggctgaccgcgtagagtgagccattggcggtgccgaacacgatatccagcgcgccgtcggcattgatgtccgccagggcggggctgccgcccatcgcggagctgatcggcttgctgaagaccaggctgcctgcgggcgttgccagatgcaggtggctggaggtgccgaaggctatcctgcggttggcgaggatggtgggcgcgccgttgattgcgccggagacctggagggggaaacccgccaggggagtgccgtcggatttgatcacgtgcagcttgccgttggagcagccgacgatgatctcattgccgccgtcgccgtcgatgtccgccacagccagttcgctgtggaaggcggagccaaggtcaagcgggaagcccggcagcaggtttccggaggaatccaggacgtggatcttgccatccagggagtgcgccaccacttccatcccgccctgccagtcgatctgggcgatcacgggggtgaagaggaactggctgccgccatcgtaatcgaaaagcacttcatcgcctgccagtgccagcactttaccggtgcggctggtgagtaccagagccggttcctggccgtcaatcaactggccataggcggcgctgcgcatcacatcctgctggagaggcgcgggaatggagccggtctgctgccctgcgttatccagcagatggctgttgccgaaattatcggtgtaaagtatgtcgaggctgccgtcgccgtcaaaatcgaagacgatcggggcggatttgctgcccacggggcaatcccagggaaagctgccgtcaatgagggtgatttcatattcgagctggaatctgcgggttccagtgctcaagttggtgacgggatgcagcgattgcagctccagggtgatctgatagctgccataatcgatgccggacggaagttgcacacggaaatagaggccgggatcggcggtctggcctggcaacaactgtggtatcaccagcgggtcgctcaaaagctgcgctccggctggcaggccgctgagggtggcggtcacgttgtgggccgcggcccaattctgatggttgctgatcacggggtggatgcggatgatctcgccgggattgatggtgccgtcgccgtcgccctccacatcgtcgatagtgtagctttccaggctgagcaggggcagggcggggtcaggcagtttgacctcgatggaaggatcgccaaatagcaccatctgatagtagcaccagcgcatcacgtcatagctgatggcggcattgaggttctgctcgcgggaatagctgagcgcggagccaaactgggtgttggccgtttggtagagaccgatgaagtagtcgcggtcatagaactgggaggcgccattggtgttgccgggggaataccagccatagcgggtgtttccgaggaaggcaaagacgccgcccgaggctgtgagcatgtgttccgcgatgctctcgccgtcgccgctggtggcctggtcgaaagcggcgggatagcagccctgggtgtaaagaaagccatattcggtgttctggagctgctggatgctgccgttgctctgtcccatcaggaaggtttggttggcgtgtcccatgtggttcatcacgtggacgccctcgttgatggcgttccagacgccctgctcgctgtaggtgccgtcgcgctgatacatggtgcgcaggtggtacagttccgggacgctggtggccacttcgtccttgtaatctccgccccaggtgagggggttgttgttcaggttttctccgaacatgatggcggtgttgttgctgaacgtggaattgctggtgtagtattggattttgcggatgatgttttcaaactcgggttgggtctcggcgggaaagcgtccgatatgcacttccggcagcatgtccacctggtcctgcggttcgccccagatgtcgtttccattggcgttccagtctccatccagattgctgaaatagaggtcggtaggcattctgagatcaaccgtgtcgcccacctggccgtagcagccgcgcaggggcacgatctcgtcatcgccgcccaggatcacatattgcagaggctggggggtgcttgcccaggcttgataggcgtcgctgatgaaggcgcgcaccttggcggcgttgtcggttccgggatagctggcatagatatccgcggtctggaatacgccggtgctgatgtcgttgccgtcacgccagttggcatagctttgcagccaggaggaggcggtggagttggtaatgatgaccatttggcgcggagtggaaaggtcaatcaggcggctttggggagcgtggttccgatagcgggaagcctgctggtagctggccagggcctgggggttgagggcaaatccttccacagagcgggcagccagggcgggggcgtagaagttggcctgttgggtggccagggcatcatcccatccggtttctatctcgatgctgaattcggaagccgcgtgaatctggcgggaaaccggattgtatttccaggggaagaggtccagcacggcatattggaggccgcgctgcaactgggtgcccagataacggtgattggcggccgggaacagcgcgtcgctctgccagatcgcgggatcgggctgagtagcgtccggacggggctgcgaagtgggctgctgctggcgcgcgtagtccagatacacgccatcgcgctgcaacaggtaaggggagctttgcacgctcacgttgagcaccttttccccaaaggggatcagcacccgcacggggtaatagttgagcgcgggaacgccgggctccagcaggggtgccgtgggctggccgcgcaggctgccatcccaggcggaggggtcaacgcttacattgagggtgagcgccaggctgattccgcagagcagcgtcaggccgatcagggcggtaagttttttcataatctgtattccatcttggtttatcgaaatgtagtcgaaaaattcttatgtgagaaatggcagaatcagtcaagtagttttttgagggcaaagaaaacagacgtctgggctgcgtttgtgatctgtgaatacctgcggaagacaagggatatgaaccaatccttagaacaatgctgccctagcaatttcagctcgcaatgggcgcctcacgctgtatatccggcgccttataaattttaaagaaagaagttgcgaatatggcggacttgtttaaactatcattctgtaagctgtttgttttgcgtctttatgtaagggcagcgcctgcccgcgggacttgttatcttttccaatctatttgaaaaggagtctttttcatgaaacacacggctatgctactactgctgctcgccaccagcctggcttttgccaaccctgtctggactgaggacgtcgtggtgcgggaagcgcaggatctgagttacactggctgcacgcagcaagcagatgacggcagcctgatcacgctctggacgcagatactggatggagaaaactgcctgatggcaaaccggatcagcgcgctgggcgaggaggtgtgggattccccactgcgtatagcgggttgcggcctgggcatcggcggagagcagatgaagagacctccggtctctgtggcaaacagactttcccacccctgggcaccggatcccgggtcaagcacgcttgcccatgatgacacggtatatagtctggtagggtctgtttcggggtctggtggacttgtatccaccattccaccttttcaccttttcacaaaatacttagaataatctccataatccttcatagcgccctcccttgctgctactgcgtttggtgccatcatccttaggtcatccctcaccgggttaaggatgaccccaggaagacagagacttagctgtctcgcgcgcgcgagagcggactgacaccagtcttagttttttgcgcccttgttttagaattgatttatccactcagtgttagagatagcctgattttctgccagaaaaggaataagctcaagtccctcccggcatttcctccgtgccagatcgtaaaatccgtttagattattcaatatcaagccttaaaaggagtatccctatgctaacagatcaagagatcgcgcgcagcgtaaccttgaaacccatagatgagatcgccgcccagattgggctaagcccccaggaactggaacattacggcgagcataaagccaagctcagctattccgcgctggagcgcatcaaagacaaccccagaggcaagctgatcctggtctccgccatcacgccgacccccgccggggaaggcaagaccacggtcgccatcggcctttcccaagccctcaaccagatcggcaaaaagagcatcgtcgccatccgcgaaccctctttgggccccgtgtttggcatcaagggcggagctgccggcggaggctggagccaggtgttgccgatggaggacatcaacctccacttcacaggcgacttccatgccgtcaccgccgccaacaacaccctcgcggccctggtggacaaccatgtttactttgacaactcgctaaatatcgatccccgccgcatgacctggaaacgggtgctggacgtgaacgaccgcatgctgcgcaagatcgtcatcggcctcggcggcagcaagcagggcttcccccgcgaagacggtttcgacatcacccccgccagcgagatcatggccatcctctgcctggcaaacaacatggacgagctcaaggagcgcatcggcaacattaccgtgggcttcaccttcgacggagaaccggtctatgtgaggcaactgggctatgaaggcgccatcgccgccctgctcaaggacgccctcaaaccaaacatcgtgcagaccaccgaaaacacagccgccttcgtgcacggcggcccctttgccaacatcgcccagggcgccaacagcatccttgccaccaagagcgcgctgcggctgtcggaatacactgtcaccgaggcgggcttcggtttcgacctgggcgcggaaaagtttttcgatatcgtctgcaaatatggcgggctctgcaccgacgccgtggtcttggtggcaaccgtccgcgcgctcaaggtgcatggaggggtcaagctcaaagacctcgccacccccaatcccgcggcggtggaagctggcctggccaatctgggcaaacatctggaaaatatcgacaagttcggcatgaagtccattgtcgccatcaaccgcttcgcaaccgacaccgatgaggagatcagattgatccgcgactatgccagctcccgcggattcgattcatctgtggtggaataccacgcccggggcggaaaaggcgggctggacctcgcccaacaggtggtggatatggtggacagggaaatctgccactaccacgggctttacgactgggacagcccggtggaagacaagattcacactatcgcccacgaaatctacggagcggagaaggtggattactccgcggacgccaaagcggacttgaagaggatcgccaaattcggcttcgacaagctgcccatctgcatcgccaagacccagaagtcgctttccgacaatcccgacctcatcggacgccccaaggacttcctggtcaccgtccgcaagatagtcatctcgagcggagcgggcttcctggtgcccatcaccggagagatcatgcgcatgcccggcctgcccagacacccctccgccgaaaccatctccgtggaagacgatggcgacatcagcggcctgttctgattaaccctaaagaccttgtgccgggacactaaaaacttaggttccggctttttttgcccttatcgccaaggcgcggatcgacagggtctttgaaggtggaaaggattatagaacgcggataacaggatcaacaggatatttaaggtgaaacagcgaaaagaaggccacgaaacaagcgtcaccaagctacattccgtgtcatcccgggcaagccggggtcctcgacggatcggttacgatccggtggggtgaaatagcttgacccgggatccagtgcccaggggtggcaaagtctgtttgccacagagaccggaggtctcttccaaacaggcaactccgttgcctctgccgaacagacttcggcagcccaatccgcgccttttatccgcgtatatctgcgtgaaccgtttgacccgggatccagtcttttgaggctccaaacagccatcctgtctttgaaaaatgccttccaaaaaataaagattcaacctgccgatatttttcttgacaaatctactaaaacccatccagtatatttccaaatgggaaacccatcatagggaggaaaaaatgaaagccttgcgaaactcatttttgtgtcttatcctgctctgcggagcgatggttttgggagcgcaggcgccccagtggcagtgggcagtccgcgcggggggaactgactatgaagaaagcatatccatagcgaccgacagccagggcaaccagtacatcactggtatgtttgatgaaatcgctacattcggcagccataccctgacgaccagcggtggcggtgatatctttgttgccaagctggatgcctccggtaattggctctgggcggtcagggcaggaggaacagagaatgactggggattgttcatcaccgtggatggagccgacaacgcttatgtgaccgggtatttccagaacacagctaccttcggtaaccataccctgacgacaaatggagagcatgatatctttgccgccaagctggatccctccggcaactggctttgggcggtcaaagcagggggtattgactgggatataggaggtggcatcgacgtggatgaagcgggtaacgtttatgtgacaggatacttttgctacaccgccactttcggcagccataccctgacagcaagcggaggcgctgatatttttgccgccaagcttgacccctcaggcaactggctctgggcggtaaaggcaggagggtcaggcaatgactttggaattagaattgccttggatggaacgggtaacgcttatgtgaccggattatttcaaggcacagtctctttcggcagccataccctgacggcaaacggagaatcggatatattcattgccaagcttgacccgtcaggtaactggttatgggctgtaatggggggagggaataacgatataaatgtatttggcttcgttgtggatggctcgggtaacgcctgggtgaacggttctttttatgacaccgccactttcggcagccataccctgacggcaaacggagagaaggacatcgttgttgccaggcttgaccctgccggcaactggctttgggcggtcaaagcgggaggaatagactatgataatggctatggcatcgctctggatagtgcgggtaacgcttatgcgtgcggttctttttgcgaaaccgccacttttggcagccatcccttgtctgcagtcggatggatagatatctttgttgccaaacttgactcctccggtaactggctctgggcgatcaatgtgggaggaaatgaatatataaataacgctggatctggtatcgctgtggatggcgcgggtaacgcctgtgtgaccggatatttttacgaaaccgctactttcggcatccataccctgactgcaagtggagaatctgatatctttgtcgccaagttgggaagcggaacccccgtggaagatgaactcgctccgcaagcggttgccaggctgcataacgcctatcccaatcccctaaacagagatggaagcgcgctgatcaaagctgacattccggaacgctcctccgctacactgagcatctttaacctgcgcggacagatcgtagcccgccacaagctgggttccggttcgcagcagatatccttcagcggggaagggcttcccgcgggggtctatctctacagcctgcaatgcggggactaccgggaaaccaggaagctggtgcttttgaagtaagataaaatggtggaatggaaccgtccgcgttctgtttccatttctccttccggctttagcatcataaatccgtaaatcggttaaatccgtcaatccgtataagattggcatgccaggcatcatacggatgaaacggattacacggattaacggataatactgtttagcttgcattattacaattgaatacaattatactattttacctttccacggccatttcaaaagactggatcacgggtcaagcggttcacgcagatcagcgcggataattgaagggctgccgaagtctgttcggcagaggcaacggagttgcctgtttggaagagacctccggtctctgtggcaaacagactttgccaccccccctgcgactggatcccgggtcaagcatacgcttgcccgggatgacacagtatatagcttgatggacttgtttcgggggaacctttccaccattccacctttccacctaaaaaacccctttccacggcgatagccaagatcgccatcggtaaaggcttggggggcagagcgaggttttttgttgacaaaaaagggctgcaatttgctattgcatcctgtcctgggtgattagctcagcttggttagagcgctacgttgacatcgtagaggtcactggttcgagtccagtatcacccaccaccctgattgttgggtgattagctcagctggttagagcgctacgttcacatcgtagaggtcactggttcgaatccagtatcacccaccactttcccccgcaaagcaacccggtcagagaaatttcttgacagaaagcttgcggagatatctactgttcatgttaatcacgagcaaacgaaagaagaggcaaaatccaacattatatacggaacacaggcatttacgcggtatgctgctgttgtgaataatatattttttcttacaccgagatttggagcatagctaatgatcaaagaaatgggacgtctgaatctggacgactacaaaataatggacgcccaggtggaaaagattttcaaaagcctggacaagggcaaacgggaacaggccatcaaggaaattgaggaaatggccaacacggcgaactatttcgtgcgcgaagaaatgggcaagaggctggccacctaccagggcaaggggcccttggacgagatttgcgccgaaatgctggatgatttcatctacggtatccgcgccacggcgctgttctatttctattacaagaggcaggacgacccgcgggtgatcgtgaagaccctggaaaagaccgtggagaccgttccctgggaaagcgagaccatctgtttcgagctatggaagaactatcccgaggtcatgaaggaagagatgccccattgggcgatgtctcccaacgaaaacaagcgttccatgtccatgcacggcatggaaaacatcgcggataaaaacccgcaatacatcctcaccttcatcggcaggctgctggacgacgaaagcgaagaagtgcaaaaaaagatcggccacatcctcacccaggtgggacggcaacgcccgctgcagacctatgccaatatccggcgctggctggtgggggccagtgaagaacgggtggacgccatctggcagaccctgcgcaaattgggcagcatcttcagccaaaagaaccagcgcgacaagggattcgactttatgaacgtcaccaagcgggtgatccaggaatggaaaaacgatcccgaccccaacgtggcgcagatgagcaaccgcctgggacaactgctgcgtaaacaatgatccacgtaatcctggtggaacccatctatgagggcaatgtgggcgccgtcgcccgcatcatgaacaactttggtttcaccagcctgcgcatcgtgggcagcgtgcccaaaaagaacgacttttacctggccatgcactccgaacatatcctggaggaggcgcaggtctttgacagcctcaaagatgccagcgccgacctggacaggctgatcgccttttcccgccgcgtgggacgctataaaccggtggatctgaacccgccccagatggcggactactgcgccaaaatccccaaactggagattggtctggtgtttggccgcgaaacattcggcctcaccgacgaagaggccgacctctgccccctgcgttgccacatccccgccaatcctgcctttccctccatcaacctcgcccaggcggtcaccatcgccctgtggcagatctacagcctccccctgcagggagcaaaaccgcggcagttaagggcggtggatggaaatgaacttgacagaatccgcaactatatgcttgatgtaatgcgcgactgcggttttttccgcagccacgagaccacgaactgggagcttttcctggacaagatgctggcacagctcaaccccggcaagatgatggtctggcgcctgcggcagatgtttaaccgctggcacgtgctggtaaccggcaagggaaagggctacggccaggatcaatagattgcgcggggcgattcagatgccccgcaagttatgcctacaaggaaacaagagatgatagcactcaccgccgtcacggaaatgaatgaacgccagttggaaatcttttgccactgcgaaaagtttttcttcgaccacgaaaaaccagcgttggtcaacaaatatgcccattatttcaccgaaggctatgacgcctttggcattagcgaagaagagatgaaacagctgcgcgacgaagtcctgtcaaaatgggagcccagcgtgcaggaactggcggaactgggcaggcacttctttgccacgggaaaatatgagttcggctcgctcgccatcatgctgctcaagaaacaccgtccccgcttcgaccgcgaggtatatgagagcgtcaaacgcttcaccgaggagtcccttgccaactgggcccacgcagacctgatctcgaccaagatcacccccgtgtttttggagctggagatagccaacatggaggatttcgcggagtggcggagttcgcccagcaaatggagccgccgggtgtccgcggtgaccatgctttggcagcgggggaaattgcctccggccgagctgctggactttatgcgccccctgatgtccgatccggaacgcgtggtgcatcagggcgtgggctggtttctgagagaactttggaggctgtttcccactgaggtggaagaattcctccttgaacacaaggacagcgcgccgcgcctgatcatccagtatgccacggaaaagatgagcaaggacaagaagaagcgcttccgcaagaccacggcgcgcgaacgctcccaggaccgccagggcaaaaagaacttcgcggacaagcggaacttaaaaaaccgcggcaaatcccaaaacaggcaggggttcaaatcccgtcgccgttccgcggacgatgccggcatgcccttcaggatcaggcacacggaggaatccgatgaataagctttgcaccatcttgctgctgtccctgcccctgctgctgtggggtggaaacctttccctgagcgtcgatctcggcctgcccgcctcctccagggatatggaactgcagggttggggcagcctcagcgccccgggatacccacaacttccatataagactataaatgtgatcctgccacccgcggcggaggaactgagcttcagctacaactggagcggagcgcagacctctggcctgcccgccccggaacgcaacggagcctttttgggtggagaacgcctgctggacagccccgcccgcgaagcccgggccggacaggtgcactatctgggcaagggacgctggggcgacgtgagctacgcccgcttccgcgtgctgcccgcggtctggaatggaaactcctggcagggttacagcaggttggaactcgatctgaactggagcgaatccgagcccgcgcccaaccgcatcccgcctgtcctggcagaactgagcaaatccaacgcgaacctgcgggcgaacttctttgccaatccccgtgatctggacaaatggtatcagcccccggcaggcaaaaactacgactacctgatcgtcaccactcccgcgctctatgacgtgttgtccccgttggtcagctttcgccagagccagggcctggtcacctccttcgcggatatctccgtgatcctggcctccaccccgggcgccaacgcggcggacaagctgcgcaactacctttgcaatcaatataacagccatcctttcacttatctgctgctggtgggcgatcacgacaccgtgccggtgatgtatctgacgccggagccggatggcggcgatacagtggcttccgacttctattatggtgacctcagcagtatcgtggacacggacggagacaaccgcctgggcgagtattcaccggttgaaggagtggatgactacctttgcgactataccccggaactgtttgtgggacgcatttcctccaataatcccgtccacgtgtatgacgttgccaaccgcaccgtgctctacgagcagagcgacgccccctggaagcgcagcgccctactgcccgctgcctacctgaactacggcggcgaaccggaaactatctatctgcagacggatggcgcggactttatggaatacgccaaagccaccgccctggcaggattccagaataccaccctgtacgagcaaaccggctggctgccctcccatccctgcgatcatcccctggactaccaaggactgcgaaacctgctcaacacccaaagctacgggctggtgaactggagcgcgcacggctcttccggttactctgtccgcaaggtgtggatgaacgatgacaactccaacggcttgccggacagttgggaaatggagtggatgagcatggtggacaggcagagctttgacaacctgaacaacagcgacggcacggtcatcttcatggcctcctgctacaacggcatgatcgacagcagtcagcagtgcatcgcggaatacgcgctgcaaaggaaggctgtggcggcgatggcggccacccgcacaggctggtacaagatcggctggcgcaatcccggctggggagggctaagctcctataacctgcactatctggaaaactttgcccgcaacgggctgtcctcgggagcttcactggcctgggccaacctcctccacacccaatattacctctttggcgatccggtggacggcgggggaatcatatatcccgaactgcaaaacgtttacacctacctccactacggcgatccagccatcggccacagcggcagccagatccagcccctgggcgaaatcctggtctatgaaccctcccgtcatggcggcttgagagtggtggatgcgctgaaccagatcggcgggctgaacgtggtctataccgataagctgatcccggattatgactatatcaaccgctttgaagccgtgttttgcctctttggctggggcgacgccgcctatgtcccgcatcccgattccctggactactcgctgctgcacggctatctgaacggcggcggcaagctctatctggaaggggatgtggcctggaatagccaggatcctttctggagcaagttcggcgccaacgccccgctgaatatgttcaccaatattgaagctgtaaaatgctatcaggatggcgaagcctggatctgggactacaacccccagtccaaccccaacgcgcaggtcttgctgcccgccctgcccgccgccgagaccatcttcagcacccacggcgccgcctccgcggatgccagcatcggaatcctgcacgcggttccggagcatagcaccatcgcctcctcctttgctttggcaggcctgcaaaacggcgagtgggaactgaaagacatgctgggcctcatcctggatcgctttggcgttttggaatacgtcaatacccaagtggacgagccacagataccgatggtgcaaacctccctgcgcggctatcccaaccccttccgcagccagaccagtctgcgcctggaactgcccgccaaagccagggtggacttgaacatctataacctgcggggacagaaggtgcgctccctggcaaggctcgacctggacgccggcaagcacgaactcaactgggacgggcgcgacaactccggaaaccggcttgctcccgggatctatttctggcgcttgaaagcgggtgacaccctacgtcaggggaaactgctcaaactggccgactgacctcccccacgactccccaatactatatatggataggtgcgatatgtcttgttgcaaaagaatcttcctgctcttcgccttgatctttgccgtcctgagcctcagcgccgccggacttcccgccgccttcaccaaaggcggcaatccatccctttacaaggaactgcacagccttgccaaagagaacctgaaacgcctgcgaaacgggcagggaaaagcctaccgccgcttgctgaaccggtacccggatgtggtgatggcctatctgctggcctatgaatcggacgctaacctgcaatgcgccgctcccgcggatgtggcaagcaactaccgggagatagtcaaactgcttgcggagcaaggctgcaaacacagcccggaattctttctttcctatgtggcggatcagactgtatccgatgaacgcatcgaggcctaccgcgccgcgctgctggatgacggcctgcgccagatcatgcgcgactccgtcgatgagctcgagctctaccgcaagatctcccaatggtgtgtgagcaaactcaagtttcaacagacctccgggcgcgaccagtcgcccctggacatcacccgcaggagcatcgtgggacgctgcgaggaaatgcaaatcctcttcgtggcagccgcccgcaccgttggcctgccatcccgcccggccagcaccccctggtgggcgcatatggacaacaaccacgcctgggcggaagtgtggctggacaacgcctggcactacacgggagacatggatgccgcctactatcccgatcagacctggtttagcggcatgatcgacaagacggtgctgatccttgccgacggttcccttccttcagaacaggacgaggtgctgagccgcggccgctacgactgtgtgatcaactcggtgcgcaactatgccggggaacgcgcccgcaccatcaggatcagaaccctggacgcgcagggcaatcccctgggcaaggtgccggtgcgcgtgatggtttacaactggtattccctgcgcgtgctggcggagtttatcaccgcggaggacggttctttcacgctcagcaccggtcgcggaggcttctatctctgcgccagcctggatggccgtcaggcgctggttcccgtcccttccaccgagcaaaacgagcttgatgtcgatctggttctgaacgaaggccccctgccacctcaagatatctttttggagtatccctccaaccccttcacctggaaacaggctccccctgagtgggatctgggcgtgaaggaagccaaggctctgtgggacgggcaggatagctcgtttaccgagcggggagcagcctgcgcggacaccctgcaaggcaaggtactgagcgcctgccggggcaatcatgccgcctgggaaggctttctgaagatgcagccccagcccggcccggactttttgaactatctgctggagagcgaccccaagttcctctggcaggcgaacgcggcgcagttcgcggcgctctatcagaactttcagcgcttcgatgccggacagttgaatccggaagaacagtcttcgctgctctcgccctcagttttttatgaagagctgccccgcccctttggcaagccagacagccccagcctctatcccacttcctttgccaaagcgggaaacaacgatctggagcggctgcacaacgccatgcgctggctgaagaaaaagcaccggatcgaccccgccaaagccctgcgcggcctcctgcccctggaagaggcatcccgcagcaagtatctgagcaactaccaatactgcatcctggctgtcagcctggcacgcgccaacggcatccccgcccagttcacccgcatccccgacctgatctatgtgctggtgaacgaccagtggcgctattgcaatgtccggctctgcgaatttgaggatggcgggaagaaggattctgcctccagcttcaccctgcgggtgcgcactctggatgaacagggcgcccctctggacatcgatccccaaaacctttccctggcacgctggcagaacgggctgctctacccgctcaaccacaaattcaccgccacaggaggcggaacggccacggcaaacctgccccggggagaatactatctgcaggcgggctaccgcgtctccgacgccaggacagcttaccagttgcagcatctcactgtggaaagtgagcttagccttgacctggtgctgcgcgagtttccccgcaaatgggaagaactgccggaagactccgaattgcgccccctactggctgaagcgggagattgcgactgcctgctgatcggcaactttgaccgcgaaaacagcctgcgcctggcggagaagctgaacgcggagggagtggtattcctctggctgggctatgaggaagctgccgccgcacccgccaattaccgggtcagccccgcctggcagactctggtggcggcagatcagatcaattcagtgcgcagcctgaccctgctacgcaaggacggcgtttggcaataccatcagggcatctgggaaaagctgccccgttaaacgttctttacagcttgccgcggctgaagcggtaaaactggttgcgcagcgccttcacgtgcattcccgtgatagatttgcgcattttgtccggaggatggatcaccgagattccgtccgggttgatgccgccgatctccaccaggaaagcgcccgtgtagtggatgtggaaaaagtagttgcgcgcgttgccttcccttgaactggggccggtggcaacctcatagcgtccgccgccaaaggccttgcgcgtctttttggcataggcctgggcaaagcgcagcagcgagtcgtaacgctctttctggctggcgacggagctgtcgatggcgggcaaaaatatcttttcggaataggctccggtggcagaactatggaagaagatcgccagttcaaaattgttttcctgggccagtaagacgctcgccttcacctctgcttcggacatcggagtgctgcctttgaaattctcgtgcgagcccggcacaaccgcgccctgttcccaaaacaccggatagttgcggttgaggtccaccccgtccgtccgccagtccaaacctttcctgccgtctgtttcctgattgtttttccgtttgaactgatattgcccgctggtcaccacccggtagccttccggattgagggtggggatgatggtgaactcgaactccgccaggatttttttgatcttgccggagtgcttgtaattcaccgccagttctcgtgcccatgccagggcggtttccacacccaaaacctcgcttccgtggtgctgcccgatgatcaggactttgcgccgggcgtccggtgtgccgatgcagagggcgtggatgggcagcttttccgtgccgctgaagccgatcacccgcagggtcaccagatcgggatgcttgctggaaagcgcctgcatctctttttgcaaactttcccaagtctgatatcccttgggaaggggataaacgttgccaaccgctgcggcaaaagcgctcgcgctcaacgccagcaggggcagaatgagtaaaatactgtatttattcatcatgagaccaagctgccgcagccccgcatttcgtcaacaaaatccgatcttatgaaaagtagtggaaaggtggaaaggtgaaatggtggaaaggaactcgtggtgaagtggtgtcgtggtgacgtgtagatggtggatgcagcccagaacaagcccccaagccccaaaaccgtgtcatcccgggcaagccggggtcctcgacggatcggcaacgatccggtggggtgggatagcttgacccgggatccagtcttttagaaacaaccacccagccccgaaacaacctccccacagactatatccgtgtcatcccgggcagacggggtcctcgccaaagcgcgtagcggtttggcggggtgatttgacccgggatccagtcttttgaagcccaaaaacaaccaccagaatcccaaagcaaccgccccttttataaccccaatccgcgctcatctgcgcctctatcccgtatatctgcatgaaccacttgaaccttgatcctgtcttttcaagtcccaaacaagcacccagaccaaaaacaaccggcatcatttatttgacaaccgcaaaaaatatccaatacattccgcaatatccttcacacctccctcctttgctgctactggctttggtgccatcatccttaggtcatccctcaccaggttaaggatgactgccggaagacccacgccggagagggggatgcaaatgaggccgccctctataatatataggtgctatgcccgaaaggtcatggaaggatgaaagcaaacgcgaaccgccaaacccaaatttccaattgacaaatatctgccgcccagatattggttcagtaaggtaaggaataaactatatgtgtataaacagcaagaagataagtgataaatataataccctgaatagaacaaaagcatttgcaaatcagcagatgctttttttttaccccggaggatagcatggatctggacaagatcataaaacttgccctggccgaagacatcggcagcggcgacatcagcacccagtatctggaactggaacccctcaacagcaacgcctacatgatcgccaaggcggaaggtgtgctggctggggtggaagtggcgaaagccgtgttcctgcaggtggacggcggcctcaagatcaccctctaccgcaaggacggagaccgcgtggttcccggcaacgagatcatgcgcctggaaggcaaagccgccagcatcctgcagggcgaacgcaccgcgctcaactttttgcagcgcctgagcggcatcgcaaccctcaccgactcctacgtccagcgcctcaaaggcaccaaagccaggctgttggatacccgcaagaccactcccctgctgcgcggactggaaaagtacgccgtgcgcgtgggcggcggtttcaaccaccgctttggcctctacgacatggtcatgctcaaggaaaaccacatccgcgcctgccgcggcatcaccgaggccgttaaacgcatcaaacgccacaacaccagctacaagatcgaggtggaagtcacctgccttgaagaactggaagaagccgtgaaagccggtgttgaccgcgtcatgctggacaatatggacctcgcccagatcaaagactgcgtgaaaaagttcggctcccaagtggaactggaaatctccggaggcgtcaccgcgtccaacatccgctccctcgcccgcaccggagtgcagtatatctccagcggagccctcacccactcatataaatctttggatataagcctgctttttgataaggagtaaaatatggaagaacaactgcgcaccctggttcaaatgcaaaaactggatgaccgcatcggcgctctgcgggtcctgcaaaaggaactgccccagcagcttaacgaaatcatcgggcatgtggaccaggcaaccgcgaatttgcttgcctgcgaaacagaacgcgccgaactggccaaaaaacaacgctcgctggaaagcgacatcaaacagcatcaggaacagatcaaaaaatacagcaaccaactctccgaaatcaagaccaacaaagaatataaggccctcaacagcgagatcgcctttctcaaggaaaagatttcagagcaggaaagccaccaactggaactgatggatgccgaaaaccaggccgcggcgcgggtgaacgaagccaaacaggaactggacaaagcggaaaaagctaaaagcgaacaggaaggcgaactgcgccgccaaatcgactcgctggaaggacagatcgaggatctgcgcgcccaacgcaacaccatggcacgcaccctgcccttgcagatcgtgaagctctatggcaacatgatcaaaaacaaaggcaacctggcggtggtcttctgccgcaagggcacctgcggaggctgcggtttcgtgatccgcccccaagtccgcatcgagctgcagttgcgcaaaaagataaactattgcgaaagctgcggccgcatcctggtggaaccgtttgaagacagctcatcccccaatgcggcggattagccccgtccttttctgctaaaggcttttgagccactatgcttggctactttggtgtccgaaataatggacggcaagcccgtttgccgcggcaaaagtttatgagcaaagttgggcatggaaaggccaaaaaagcactttaacaagttaacccaaacattatacttgacagatttatagaatgtaggcattagaatttaagagccaaaatatgctggcataccatagcagtgaaagactatatattaagtgattatataacgactgatggcataaatgtctctatcggcctggaggaagagtccgccggtaaagactcccgaaaatcggtcaataattagaaacaacccaaatagaaaacgggaataaggagatatcctatgagaaaaacccttcttttcgcgctgttgctgatcctgggcttcggcctgatcagtaatgtctatgcccaggttaacgttaccataggcagcgggaccagcaccaataccacaaccggtgctccagccccctatggaacctactggaagaatttccgccagcagttcctgctactggcctcggaaatcgaggatgccggcggcggagcgggcaacatcaattcagtcgccttcaatgtggccaacctgaacaactgttccccgatgccgaactacaacatccggctcaaacacaccacccagaccaccctgaccaccgcgtttgaggatggggactaccagaccgtgtacacgcaggctgagtatatgcctaccgttggctggaacacccacaccttcacgacccccttcgtctgggacggcacttcgaacatacttgtcgatatctacacctccatcattccgggatcctggacccagaatgcctctgtttattactccaccacagctttcaatagttccctgcgcttccaaagcgacagcgctgatgccagcaccgccaccagcggaaccacaagcaccaaccgctccaacatcagattcaacatggaagccctggtggttaccgatccgcccaacccggcgctgctcatttcacccgcggacggcgctgtggacgtgatgagctctgctaccctcaactgggcttccggcggcggagcacccactggttacaaggtgcattttggcacaaccaacccaccccccttcatcgaaaacaccattgaaaacagctacgcccccaccctggacctccacaccacctactactggcagataattcccttcaacgccattggtgacgcggcaaactgccctgtttggagctttaccacgggtggcccggtggtcatcatgaccaacggcacacagtcggtgccggatggaatggtctattccttctacgattcaggcggccccgacggcaattatcaaaactcagagaactacaccttcaccttctcagccgccaaccccaactcgatcatttacgtgttgttcacagaattcaatacggaaaacagctgggattacctgaagatctacaacggaccggatacctccgccccgcagatcggacctgctgacggctacaccggtaccactctgcctgaagagatctttggctccaacgctgtgaccttcgtcttcacttccgacacctctgtccagcgccccggctggtcggccttagtgactgctggaaatctcgaccacgaccttggcgcgaagagcatttccggtaacagcactccctccgtgggcgatcccactacctacacggtggcagtcaagaataacggaaacaacaccgaaaacacctacaccgtgaagctgatgggcaccggaaacgtggagctcgcctccattcccggcaccaccatcgctcctcagcagaccatcgaattcggcctcacctggactcccaccgaaaccggcccgatacagatttggggtgaagtggtgcttgccaatgacggcatcgctgccaacaatcaaaccttgcctctaaacgtggccgtgcaggcagcgggaatcgtggccattaccctcggtgacggcagcgctgtcggccgcatgcccatggacatgtactggaagaactccctgttcgaggccatttacctgggctccgagctcaacattggtggcctgataaccggcatccagttctacaacgacttcgtcagcaacctgcccaacatgcccactaatatttggttaggcgagaccacccagaccgatctgtcggctggctggatcccttcaacccagctcaccgcggtgttcgccggtaacgtcgattatcccagcggtccgaacaacatcaacattgccttcaccaccccttacacctacgcgggcggtaacctggtattgctggtggaacgcccgatggataccgaatggcacaattacaacgataacttcctcacccagactggggaccttgcggcccgttctctgaaggtccagtcggactcccaggactacgatcctgccgctcctcctaccggtacaagtccctccgctatgttccccaagaccactttcttcctggtcgtggacgacatgggcgcgcttaccggtaccgtgcgtgacgcgaacaacgttgccatgcccggcgctacggtttccatcactggaacccccctcaccaccctcaccgacgccaacggcgtttacaacttcccctacgtggcgatgggaccccagagcgtcgtggccaccaaacacggctacaacgtcgttacccacaacgtaaccatcatcgaagatgaaactgtcacccaggacttcgtgctcacccaactgcctcaggtcaccgtgaccggccgcatcgtgggcagcgaccaacccacagttggcctggctgacgccaccatcagcctcacaggttacgagccttaccaggctacaaccaacgccagcggccaattcaccatcactggcgtctatgccagccagacttacgaatacaccgctcaagccatcggttaccaagctgccatcggccaagccgtggttggcaccaccgacctgaacatgggcgacatcaccgtgaacgaactggccttccctccctgccaagtggttgccacagaagcagcggactattcgcacgtaaccgtcacctggatggctccggatcccaatgctcagggtatctccgaagactttgaggaatacgaagacttctccctcaccttcgatccctgggttctggtggacgttgatcaaagcggcacttatggtatgaccggctacacttggccgaacgtctattcccccatggcttacatgatcttcaaccccagcgctgccactccgccggttaccactattaccgcccacagcggaaacaaaatggctgcctgcttcgccagcactgatgctgtcaacgacgattggctgatctctccgccgatgatcgcgaccgcaagtcagttcctgaacttctacgcgaggtcctacagcgatgcttacggcctggaacgcttcaaagtgggtatttccaccggcggcactgcccccgcggacttcaccatcatcagcggccccagctacatccaggcgcccattgaatggacactgtacagctatgacctcagcgcttacgctggccagaacatccgcttcgccatccagtgcgtttccgacgacgccttctacttcgtggtggacgatgtgagcgtgggccccgttcctacagccaaggaacactttgcctccgcttcctccttcagctcccgtaataccaacacccagagcttctccaccagttcaattgttaccagaagcattggaaacgcggcttcggcatcccgcaacgtgggaaccagccatgccaataacccccgtattcaggtaccagacttccagatgttcactccttccaattcggaccgcgtacttggtggatacaaggtctatcgcctgcttgctgacaaccaggacaacgagtcactctggacgaccctgaccccatctgtcattcccagcactaccaccacctataccgacaacgcctgggccccgctgccttccggcgtttacaaatatgcagtcaaagctgtttacaccaacaacgtcctgtcccccgccgtcttctccggtgagatacacaaaggcatgatgggcaccctgaccggtaccgtgaccgaattcggcaccaacgtcccgatcgaaggagctaccatcaccgccggcgattacagcggcacctccgacaacaacggacattattccttcagcgtctatcagggagtttacaccgtcacctgctcgaaagtcggctatcaggccgcttcccagaccggtgtgagcgttaccggactgcaaaccaccacccaggacttcgtactcacagagatcaccctgcctccttgcgcggtggaagccgtggcagtgagcaacagcttggtcaacttgacctggatggagcctggcactggcggcggcgaatggatctactacgacaccggcgaaaacgatgacagcatcggcctcgtctccggtggtgaattcagtgtcgccattcgtttcccgccctccgctcttaccgactatgccggcatgagcctccacgccatatccctcttcccaggcgatgtgggcacctactccctgcgtgtctggaccggtggcaccgccagcgctcccgaaacccaggttgttgaccaacccttcaccgtgcaagccgtagacacgttccaaaccgtggttttggataaccccgtgcttatttcaggcaacgaggaactctggtttggctacaacgtcagccatgctgcgggcgcctatcccgcaggctgtgacggcggccccgccaccaacggcttcggcaacatgatctacaactccggtgaatgggcaactctgaccgacctggctccgagcctcaactacaactggaacatccgcggctacgtgggatattcagctcccaacgatgtgtgcgcgatcgatcccagcatcctcaaacacatcccgtccgacaacatcaaagccagcaaagacatcagtgcctgcaaagacaacgaccgtgtcctcgtcggctacagagtctggcgcttgctgcaaggccaggaaaacaacgattcagcctggactcagctcaccaccggacccatcaccgcgactgcctggccggacaacggatggggcggcgtgcctgacggctggtacaaatgggctgtgaaagccatctacaccggcgaagcgcaatccctgccagccttctccaatgctgtgcagaaacttacccagatcggaaccattgccggtatcgtccgcgatatggccaacgcccccatcatgggagcaaccgtatcttgcggcgacgtgactgccaccaccaacgccagcggagcctacagcatgcaggttcccgcgggcacctggagcgtaaccgccagccacccgaactacacacctgtcacccaggacggagtgattgtcgttaccaaccagaccaccacggtgaacttccagctgccgatcagcaatgtgctgctctcggacggatttgagtcctacgaaaacttcgttatcgaattcgcgccctggaccacggttgacgttgacggcagcgcgacctatggcatgaccaataccacctggcctaacacccaaacaccacaggcctacatcatcttcaatcccagtgccaccactcctcccgccactaccatcgtacctcacggaggagataaaatggcagcctgtatcgccgcaactacccctcccaacaacgactggttgattactcccgtactccacaatccgctggaacttcgcttctgggcacgctccctgacggcgcagtacggaggactggaaaagttcaagatcggtgtctccaccactggaaccaacccctccgacttcaccatcatcagcggcagcactcccctcgaagctccccttgattggacagagtatgtgtataatctcagcaactacgatggtgacacctacgtgggcatccagtgcgtgtcccatgaccactggatcttcatgctggatgacttccatatcaccggcagaactgacagcgacgatcctatcgtccctgtggtcgccaccgagttgcacggaaactacccgaaccccttcaacccggaaaccaccatcagcttcagcgttaaggataaaggccacgtaaaggtcaatatctacaacgtgaaaggccaactggtgaagaccctcgtgaacgacaacatgaacgccggcaagcacaccattgtgtggaacggccgtgacaatgctggtaaagctgtctccagtggcgtctacttctacaagatgagcgctggcaaatacagcagcaccaaaaagatgatcatgatgaagtaattcatcgggatataacctataaccaagccccgggaccgaaaggttccggggctttttctactctcctgaaaagaacgtggatgacaggatcgactggatctttgaaggtggaaaggtgaaaaggtggaatggtggaaaggttcccccgaaacaagtccaccaggctatatactgtgtcatcacgagtggggtggcaaagtccgtttgccacagagaccggaggtctctcccaaaaaggcaactccgttgcctctgccgaacagacttcggcagcccttaagttatctgcgtatatctgcgtgaaccgcgtgaaccacttgaaccttgattctgtcttttcaagtcccaaacaagcacccagaccaaaaacaaccggcatcaattatttgacaatcgcattaaatatccaacacattccgcaatatgcttcatagcgccgtcccttgctgctactggctttggagtcatcatccttaggtcatccctcaccgggttaaggatgactgccggatgacccacgccggagaggggaatgcaaatgaggcccatccctctataatatataggtgctacgataggtggaaaggaggacttcgtggtgacgtggtgtcgtggtaacgtggtgctgtcggaaaagagatagaacgcggatgacaggatcgactggatctttgagagtggaaaggtgaaaaggtggaatggaggaaagtttcccccgaaacaagtccaccatgctatatactgtgtcatcatgagtggggtggcaaagtccgtttgccacagagaccggaggtctctcccaaaaaggcaactccgttgcctctgccgaacagacttcggcagccctggtccgaaacctccccccataatactaatccgcgctcatctgcgcctttatccgcgtatatctgcgtgaaccgcttgacccgggatccagtcaccccagaggagccacccccgtttcccgcctgttcagcgtgcagacagcagtcgtgtcaggaaagcttgtccagttcttcgcggacgtttttgcagcggggatagtctttgccaaaggtgttttcccagatgctcagcaccctggtcagtagttcccgggcggtgtttgtgtcgccttgtctggcgcgcagcctgcccagagagaagaggtaatgggctgtctgggaatggttttcgccatagtggagggtatggccgtctatcgcctgcttgagcagtggttccgcttcttccaggcgtccctggcgcagcagcacactgcccagatttccggcgcagaccgccgtaaaccagtgcccctgtgggaaaaggctttccatcatttccagcgcggcgcggagcatctcctccgctttgtccggcctgtccatcagactgtagagcgaggcgaggttgttcatgcggtctgccacgttggaactgggcccggggcgtttttcgatattcagcgagcggcgcagcagtttttcagcctgctcgtagcggctggtatctttgtaaaagcgtcccaggttgttcagatagggggagaggcgggggctgcgtggcccgagctggcgggttctggcctccaccaccttcagatagagcggctcggcatcgtccatgcggtgcatatagtgatagagcagggccagatggaagagccgttcgatgtgttccgggctgtccccgccccaggcctggcaggacaactcggctgccagcagcatacattcctcaatcttggccagcagcatgcggtcccagaagtaatcggccgccatctcatagtaatgggcggcttttttgagttccccggcggctttgaagtggcgggcgatctccgcggaatgctccttgagtgcctgttcaaagacggtttccatggcttcggcggccgccaggtgcagttttttaagctccttttcgcggatgctggcatagaccgccttctgtaacaggctgtgggaaaagatgtaaaagagttcatcggcatcctgccagattttccgtccccccgctttgcccagttgctggatggggttgccttcgagcatgtgggagaggaggacaacattgaagcggaagcccagcacactggcgccgcggacgctttcctgaacctttttggagagccgggcaatgcgccgggaaatcacctcgtcgatgcctcccgccgccgcttccaagccctcttgcgctatttcgccgtggggactgagcagcttgttttccagcagataagcggcaagctgttcggcattgaaaggattgccgcccgcgcaggcgtggaaagcggaaaaggcctcgcggggcaggcggggaaggcccagcagattgaggtagagcttgcggctggcgctggagttgagggagcccagggcgaggctctccaagccatcttttttgacggcaagctccgcgggcagcctgcccttttccgtccgggcggtagccagcagaaagagcgggcgcacgccgtgttgccacagcagttccaggaattgacggctcaggggatcgagccattggacatcgtcaataaagataagcacaggggatttggcgcacagccagcgcaggtaatccagccaggcctgctgctgacggggcagcctggcttcgggggcgatcccgcgccagggcgagccatcccaggagagattcagcagcgaggcgagggcggcttcgcaatcctgtcccagcgaggaaccgcgggtgcgcttttgccacgcttcgcggaaatgctgcaccgcctgcgcgggagcctcatcctccaaaagccccaaactggcacgcagcaactgggatacgatatccagagggaggggggaatcctgcctgcaagccagcagatacacctgccgccggggagtctcgaaggcgcgcaaagcttcgcgtgccaacctgcttttgcccactcccgccgttccatgcaccaccatcgcctggggcgaggaggccgccaaaccatcgcgtatcctgctatgcagcagagcggtctccttctccctgccaatcatgcaaagcggttgtccggtgatcagttgccccggcagcatgcccagacggtaggcgcggggcgcggcttttgaggcggctttttcccttttgaggggggtgaagatgaaggagttgtgctgctggttgcgcagcttgtggtcggcgagggcttcgccggggcgggcaagctccaggagcttctgggcgcgggtgatggcttcgcccgggaagaaggttgccttccacaggtctttgccggcagccatggaaaagatgtagccggtgcagcaggcggcgcgggctttgtggcgcgtggcagcttccaaagccaggcggcaggcgcgctgcattttgttgaccttgttgtgggggaaatcgaagagcaggatggcatgcagccgcttgtgccgcacatagatggctgccaaaaaggcgtcgtagatcaccgccagcagttccagcgcctggatggttggctccagggggccgtccggaggctcgtccaggctgaggcagcagcaaacgctgtgccggacgtcagccgcgggattgagtctgtgaaagcgggaatgaatgaagtggtggccgtgttgcttgcccaagcgcttcctttccggaatatcaggcaactggggaaagggcggatgctcggcaagtttgccaggcctggcatccaactcccagcccagtctgttcaatgcctggggagagtaataaggttggttgggctggccggggttttcacgcaggacatccagttggggagaccagaacacatattcaaactggagggggttctcaaagatgcgccaggacagggtgccaaaacccacggccaggcggattacattcggcattccatgatgggggctggcgtagctgttgatcgcaccgatagtgtgattgatgcgtgccagcagcgccgcgatcagcaccggagtgctttccggcaacagggcgtggatgcagtttccctcatactggaagagcagtccgcctgcgttcctgatcaggctcagcatcctttcataggcttcggtgaaagttgcttccatcctgtcaatcacctgctgccgctgcttgagccttactcctttgatattgtaagtggcaacggtgcaaaagcgcaggatatagccggtgatctgcccctgcaggatgttttgctcatactgctgcaggatgtagctgggcaccacgcggttcatatctggctacctgccttgcctggcttaactataatctcctttctgcctacttatcccccaggctcagattggcgaaggcggtgagggtgatctccgcgtccgcgctttccagatagctgacgcgtgcccggtcgcccgcgcgggtgatgggcagacggctgctcaggttgctggaggcgataaagattatatccggcgcttcggtcagggtaaggtagtagtaggtgcgtccatccgtggtgtccgagccaaagcgggcgatggagcctgtgagggtggcctgcttgtccgctgcctccggggatatccccatccggcttccggccagggccatctgatagttgtcgcgcgcgctgcgcacgctttcacccactcccaccagggaaaagtcgcgcactgaaacgaagctgaacatcttgattagcccggcgctgtccttgagggtcataaaataggtcggcttgccgttcatgttcaccaggatggggaaggtggcatagtatttgaagttttgcaccttgccttcggcggagcgcatggcggcagtctcggtggcaccggagaccaggtagaggtggctgcttttggtgcgggtgtccgtgagcgcaaagcccaccgttccctcgtccgaacccacgctggtgaggccggagtagaaatagctgcgctgatcgcggccatagatcacgttgtaaccgggcgtcacccgcagcaggtcgcgtttgccgaacacgctgttccaaaagccgtgcacatatttgccccaccaggaaagctggggaagcacaaagtaggagggctggatgcggtcaacccaggcgggaatcttgctgtcgtcatagatgccgccgctttttttgaggggaaagtatttgatctcacccgtgccggcatgcacgatggcgagtccggtggcttccggggcactcactccgatcttgtgggtgtaggtggtgatggtccagtagggttcgccattgtcgtccagttcaaaggtatcgcctgccaggccgatgcccgcgaagccgttccaccagagatggcggtagaggtcttgtccaaagtaggcgttgcgctgatagcggatttggatgggtttgcctttcagctcgcgcacaaaggtgatatcctgcggattggtggccgagaccttgatgtagcccggggtgcctttgcttgtgttggtgatccacttccagaagccgctgtgcagcaggggacagacccagaaaagcttgccatccaccatctggatggtcgggttgccgagcaccacccggctgccgagggcgaagtcctcgcccagtttcttggctgccaaatccttggcgaaagcggaatccaggatcggcacctgatccagattgaccggcgccaccaggtcggaaaactcggtcttttccacctcgccgatcatgcggcggtagctgccggaattgaagatgccggaagagaagaagggcgccaagatcagccacagcgccagaaggggatagaccacatagaggatcttgcgcaggcgccggattgccagcagcggagccaggcagatcatcagggggacgatccagtccaaaaagcggatatgcagcaccggaagcacaaagtaaagcataaaacccagcagcaggacggacagcactatggcaggcagggctttgatcctgaacttgggaaacttgatcacgacaggtttgggcgtttgttgttgaaacatggtaacctccctgaactaagctttgtttttatactctaccagatggcggcggatttgtcaagccggaatcgctgcccgcctccaatacagaatggaaaaaagtggactcggctcgaagaccgctcctatccttgcggatacagaggcgcgaccgcccgctcaaacactccctgaaccttggaaatggccagcccgtaattggtgatcggcactccgcgccgctgggcttccacgatgcggcggctcatctccatctggttgagcatgcaggctccgcagtggatcaccagcgcgaattcctccagattgggcggaaagtcgtgtcccgcgtaaacttcatactccagttccttgcccgtgaactggctcagccagcgcggaatcttcacccgcccgatgtcatccgcctgcacgtggtgggaacaggcttcggcgatcaggatcttgtcgccgtcgcgcagcttgtcgatctgcctcaccccttccgccaggacgtccagatcgcctttgtagcgggcaaagaggatggaaaaggtggtcatcttcacctcggggggcaggtcattcaccaccttcagcaccacctgcgaatccgtgatcaccagatcaggcggctccttcagggtttgcaaggcataggccagttcccgctctttcaccaccgtcaccaccgcgtcgtgatccagcagttcgcgaatcacctgcacctgcggcaggatcaggcgtcccttgggcgcggcgaggtcgatgggagtcaccagcagcaccctgtccccggccttcaccaagtcacccgccagggggcgctcctccagcagatgggcgggcgccagcttgatcagcagttccttggcggcatcgatgttttcccccttgagggcggagacggagacccagggcagtccccgttcctcgcaccaggcgatattggcgggggcaggctcgcgcaaatccctgtggttaaagaccattaacagcggtatcttcatctcgcggatgcgtttcagggaggacagctcgctctccgcgaaggggcggccatcgttcacaaacacggctatgtccgtgcggtaaagtatcttataggtggcgagtacccgtttttcgcccagttcgccgctgtcgtccagtccagcggtgtcaaagaaggtcaccgggcccaggggcagaagttcatagcgtttgtccaccgggtctgtggtggtgcccggggtgctggaaacgatggctatctcctgtcctgccagggcgttgatcaaggacgattttccagcgttgcggttacccagcagggtgatgtttacgcgttctccgcggggtgtgctcatctatcttctcccaaaaagtcttgcggcttgcggccgctaatagcttttattatcagttctttcatgtttctttccttgtcggactggataccagcccatgtaaaaataatatatgtgaaaagcgcgaatctgtcaagcaaagagaattctggcagacaggggcctgtgtttttgatatatccacaaattacacaaattaacacggattaaaagaacagaataaggacaagtgtccagcctaaaaacaacaaccagaccctgaaacaaaccgccaccaagccctaaagccgtgtcatcccgggctgtcggggtcaccgccaaagcgcgaagcggtttggtggggtggcttgacccgggatccagtcttttaaaaacaaccagcaagccccgaaacaaagcacaacagactaaaaaccgtgtcatcccgggctgtcggggtccccgccaaagcgcgaagcggtttggtggggtggcttgacccgggatccagtcttttagaaacaaacgcgtaaggttttaaaaaagcaggcacctttccacctcaaaacacctttccacaaattctccccccatatatataggtgctacgaccccttcatgccaggcgggaagcggatcccagggcaagtatatatatacttgcccgtaattgcgcggccatgggctggctgccctccctttcccctcgcgcgcgggtggctctcatttgcatccagcgttttggcgtgagtcttccttaggtcatccttataatttataaggttgacctaaggatgatggcatcaaatccagtagcagcaaaggagggcggtatgaaggattatgcggaaggttgtggtatttttgtggaaaggtggaaaggtgcccccgaaacaagtccaccaagttatattttgtgtcatcacgggaagtcggggccccctctggggtggcttacccgtgatccagtctttttaaaagaaacatccacaaattacacaaattaacacgaattaaaagaacattaaagagtcaacacacccgactccggaacaaaaccctccagactaaaaaccgtgtcatcacagcctgcgagccgtgatccagtgcccaggtgtggcaaagtccgtttgccacagagaccggaggtctcttccaaacaggcaactccgttgcctctgccgaacggacttcggcaacccttatattacaccaatccgtgtcaatctgcgccctttatccgcgtttatctgcgtgaaccgtggaacccgggatccagtcttttggaatgtttgaacttcgctgaaaacatttttcgctaccaggaatgaaaactggacaacaaacgcagcttgggatatctgacactaagagtgtaattcacacgatcaataagaacatagcgtgctgtgcatacaaaacatattaccgacggacttctgttctgaaatatggacgttttgaacttggtaaacagtccgtatatggactaccagctgggacttgccattaggcatatgcccgaatgtaaagctatattcttatataacgcattgtagacagcacaggttgttctctgctctttccatattacactagtggtcatcatttcaccagtaggggtttttttacgcttttttcccgggagttttcatgtaaagcaccctactggacaaagagatgggagccggaaaacacagcctgaactgggacggcaccgactccaacggcgcccaactggcaagcggagtctatatctaccgcctcagcaccggaaagacgagcgccagccgcaaaatgatattgctgaagtgacggacagccgcccttccaagtccgataattaacttgaaccgccgcgcattacacacggcggttctttccaacaagccaagtatcagcagcgggaaaactgcgctgaaaaagccgctggtggggctccgtaaaatgggagtggaagccgccgcatggaacaccttgaaagtaacaagataccgccccaaattgatctttcctaacccaaaatccgcaaagcaaatttcttgacaatgatctttggcttaaatataaggttcctatcgaacaaaaggagcatgttatgtacaatcttctttgtgataattgggtaaacgtggtctatctttcgggcaaaccagatagaatatctttagttcaaactcttgaagacgcacactgtctgcaactggcatacagcaatcctatggaccggttcgctgttttcagattcctgcttgctcttggctactggtgtttcgccaacaccaacggggagcctgaacctgataagccgcttccgacctcctggatatcctggctggaagaaaacaaggggtatttcgagctttttggggatggacagagatttttccaagccgatcccagttccaggatcagagccattaccgaccttattcatgagataccaacagctcacaacctatgccatttcaatcatgtcaccgactatatcgatgggctctgcgaagcttgctgcatcaagggactgctgagattacctgtctttaccactgtcggtggcagagggataggcgcgggaatcaacaacactcctccattttacctgctctggcatgcaaatgacctcgctggcatgctggttcaaaattggcaaccctgggataatatggggattccggcatggttgggttcttttcaaaaagaaagcaggaaagtgggcttacttgccggaatgacctggctgccgcgcaaggtgcatctgcatgatcctgtctcaggtcaggcagcatgttgttcctgcggcttaccctccaaagctctcgtctattcctgcagcataaaacctgaaccagtgccggaaggccttaaatggaaagaccctcatggtgtttacaccgatcagggaaaaagtctccagtccaaaatcaaactgatgtccaatgatagatacactttcgcggaccgggattggtatagcccgttgttcagctatttgcacgcggaaggaaactccagacaaggaaaactatggttggttggatttgccagcgataaagcaaaaagcatagacatctgggacaagatcatcgagcttgagggaactgatacaaatgatgagctactggctcaattggcaaacagggctactgcccttaatgccatgcgcaagaagcctctcagaggtgatttcaaaaagtcagtgggcactccccagattgctgacattatcccccacgccgaaagcagaattgccatcaatgcgggtaaaatgactgagaacaggggctattcctggcaggatgccgatactgaatacggagaactgctcaccaaggttgcatgctctttggagccggctcaaacagtggacgccaggctcaagagaggtaaattcatttcccgcaagccctggccagttataccagaatccaaaacaaaacccgcagaggaggaccagaatgaatagaggaaccgttgacttcattgcaagcctggagaacctcaaagaaggcgatttgggcattcttagaaaactcaggggagcccggcttgatgaaaagcttcccggatttgacctgttttccgccctatggtggcctttgcggcaaaagaatcaacgcgctcccaagcgtgaagtggcttggttgatcgccaaactttttgctgaattccgctttgaacagcgcgagggagccacattgcccattcttatgggaggcatctgccggaagttggaacccaaaaaggaattaccccgtgtattggcacgctttgatcaactcgcatcgcttgacattatgcagatggaagagccgctgtcggtcattatgggtatcttgcgcaagcaccagcaggtctgcctggactgggtagggcttactgatgttctgtcattttgggagcaggaacctgtcaaaagagaatggtcggattcatttattaaagcatacaagatcaacaaggaggattcagatgttgattgaaattcatatgattcagaatcacagcccggcaaatcttaaccgggacgacttgggcgcccccaagacctgttatttcggtggagtattacgttctcgcatctccagccaatgcatcaagcgcagcatccgttttgccccggaattcgcggaccttagaggaggtatccgaacaaggcgtctggcagagaaacttgaagaaatgctggaaaacaaagataagaagctggttgccaagtttcttgaagcctgcggaatcaaaaccaaatcttccaagaaagctgcaaaaaagtccgaaaagatacccgcggaagccgatgaagatcaggatgagcagcaggcggctgatacatctgacatgctggtttttaccacttatgatgccctgcgccaaatggcagagctgctttccgactccaaactaagtgaaagcgaaaaactgctgcagttcaaagatttgctcacaaactgcgtccattctccggatatagcactttgcggcaggatgttggagaccaaagagcttaaaaacactggcgttgaaggcgccctacaggttgcacatgcgatctccacccacattgccagacctgagatagactattttgtggcggccgatgatgttcccggtgaagacgccggagcgggtcatattggcgaatccatgtttgcctcagcctgtttctacaaatacttctccattgattgggaacagttggtcaagaacctgaaaggggacacgaatctggcagcccacaccgtgggtgcctttctcctcgccgctgccaaaaccaaccccagtggcaaacagaacagcttcgccgctcataactatcccgatggcatccttgttgagttcaagaattcccctattagctacgccaacgcattcgtcaggccagtttccgtggtcaaggaatcggacctggtggaacaaagcatcggccagctttccaactacgtgaacgacatcaggcttggctattatgatgagcaatccccagttatcagcttctggttttctccaaacaatcgctattcccttggcaatgagcattccaaactggcttccagaaacattggcaacctcaatgagcttgtaggcgctgtgttggattatattggcggcttcaagtgggaagaagttcagaaaagcaaggcttatgttggcggctgacatgagtgcgccacccaacaccttattcttgcgcttggagggggctttgcagtcttggggcagcaacgaggctaagtttgctttgcgcaggactaccgacgctcccacaaaatcaggtgtcctggggctgctttgcgcggccatgggaattgggcgcgcggaggctgctgattcatggctcccaaaactcgccaacctgcgcatgggcgtgcggatagaccgccccggcatacgctggtgggacttccatactgttggagcgggacaaagaatgcgcatggcagagctgaaggcacccaaaaaaccttccatggttggagctgccctggctgataccctgacaccaagcaaagtaaaaaccagggcagagaccttgctctcacgccgcgaatatcttgccgacgccagttttctggtcgccttgcagggtgagccggaacttgtggaaaagctctccgccgctctggccaagccggtctgggcaatttatctggggcgcaaatcctgtcccccttcacgtcccgtgggcgagcatgctccgggcttttataacactttggaggaggcgctgtccgcggttcccctgcaaaagcgctggcacaatgaacccctgccgcaaatactgccttgcgtcatggactggatccccagccaggacggagaacatgcgcctgatgacgcggagattcattacgatctgccggtttcttttcagccgccccgccatttgccgcgcttcgtgatcaggcgtgagctggttgtgggagaggatgtgcaagtgagcagggaaaccggaaccagcgtttggaggcccaaaggaacccgggcggattataacaattccgagtataagaaggtcagggcggagcggcttgtgatggaccatgccgcgtgcatggtatgcaaagctcccgccacgactgttcaacacgtgaattaccgcagggcgggaggcaaggaaataccggaagacctgcgggcgctgtgccgcctctgccacgacgcctgcaccatgctggaatacggttccggcatgaccaccgaccgcatcgacccctgcgaccccatctggcgggagcgaatactggcaaagcgcaaagatatagtcgagttccgttcgcgcgggcagcgtttccgcaaaatgaagccagaggaggaaaacggatgatctacttgtccaagctattgatcgatactggaggcaatccagaccgtccccgccccggcagaaagtggctggacaatatctataacgtccaccgccgcctttccatggcgttcccttcaggtttgcgccgggagcaggatccgcatttcctgaagcccttttcgccaaacgacttccaaaaaactcccttccttttccgggtcgataacaacatcgacggaaacgataaaagggcgattattatcgtccagtccgttcttgagccggattgggattattgcttccaaaacgcgcttgatttcctggcagcgccaccggaaacaaaggagtataatccagagtttcaagcgggacaactgctccggttcaggctgcgggtaaacgccagcgtacgccgtcatattcctgagaaggtgcaacaggacggtcaaaccatagaaactggcaacatcctgcacaaaagggtttctctcacctgggatccctcttccaccccggatcaggcccttgccgactggctggctgccaaaagcccaaagctgggcttcacccttcagcgctgtgagcttcttcaactgggttgggtttatggctccaagcctgaacctaaaaatgtcaaagcaaaggaacagggacagggctactggcgtgaacacacatacaatcctctgcgcttccgttcggctctactggagggaattctcaaagtggatgacccgaaactgttcctggaaacgcttagaagcggcattggaaaagcgaaaagcttcggctttggcctgctgtccgttctgccaatcaggaatgatgaataaagacctgcactctatcccccggatcagagatcggcttagctatctctatgtggagcatgccaaaattgatcagaacgggcaagccatcgccattcacgatgccctgggagaaaccccggttccttgtgccggcttggctatgctgatgctgggaccgggcataaccatcacccatgcggcaatactttcactggctgcctgtggctgtctggtagcctgggtgggggaacatggcgtcaggttctatgccgcaggcacaggtacaacccgtagcgccgtcaatcttatgaaacaggcaaagtactgggcagacccggttttgcatttacgggttgtgcgctccatgtatcagttgaggttccaggatgagctttctcctgatttaactttgaaccagatcaggggcaaggaaggtgcccgggtgcgcgatacatatttccaactctcccaaaagtatggtgtgcccatgcagggcagaaactatcaaagagacaactggaataaagcggatcccataaaccgggcattatctgtggcaaactcctgcctctacggcatatcgcacgctgccattgttgctgcaggattctctcccggattgggctttgtccacactggcaagcaactgtcatttgtctatgatatcgcggatctatacaaaatggaaatggctgctcccgccgcattccgggcgaccgctgaagggatcggcgaactcgaccgcagagtcaggcttgcctgccgtgatgaattccacaggcagaatctactcaaacgcattgtcgcggatattagttctctcttcggtgatattatgccagaggatagcccggatgactgttttgccgaagaaccagccttgcctggaggactctggtctccagatggagaagtgtccccagggggcatatcttacgggcaggatgatctgccaaaggaagattgatggtggttttggttttggaaaacgtgccgaactccttgcggggtcagatcacacgttggctgctggaagtaaaggcgggggtgtttgtgggtaaagtctcagcaatggttagagacaaactgtgggacaaggttagaagcaactgcagcggtgggacttgcctgatgatctggagtagccagaccgaacagggttttgatatcgaattctggggtgccgcatcaagagtcgttacggaatgggagggtatcaaactaatgaccaaacatccttgaactaaggcttgaaggagctcaatgacctgttagctctctattgatcaagtgtattccccacgcatgtgggggtgaaccaggagaattaaaatgaatctcaaccagtatcaagtattccccacgcatgtgggggtgaaccgtgatagagcagctgggagaccagtcgtctatcgtattccccacgcatgtgggggtgaaccgttcaacactccgattgcagagcgcgctgatgtgtattccccacgcatgtgggggtgaaccgaccaaattgctgcttcaaacgacaatcgtgttgtattccccacgcatgtgggggtgaaccggttcaacaggcaaacgtattgtaaagtgttaggtattccccacgcatgtgggggtgaaccggca

SEQ ID NO: 525 - DNA, 85735 bp, Artificial Sequence
  Synthetic Oligonucleotide
cccggcgcccgcgacctgcaccgtctcgttctgcacgaagaacaggtcgatgacccactggtagatgccggtccacccggcgcccgcgacctgcaccgtctcgttctgcacgaagaacaggtcgatgacccactggtagatgccggtccacccggcgcccgcaacctgcaccggtccgtaattctggacaaggaacagattgatcagccagttggtgatgccggtccacccggcgccggccatgatcatcgggttcgctgccgcggcggtttgcaggtcggccatcatcggatcgggcgagtcggcatagattgccgggtcggtcggcatgtccgccatgtagagcagcagaagctcaccggcgaaaaccaacgtcaataaaagtgtgaaatacagaaacccttgctttttcactgagttgctttggaaatcgaaagtgtgacgcatcttctttcctcccttgtggtggtcgtttcgggcaacccttgttcgaacaaagcacctcatcttcacacagggctgctgtgtgaaaaactcttgtaaatcaagagcttagctcataacatgctcttccgtcatgatgatgacgcgtgtgacggggaaataatttgcaattcctattccaagtctcgattccatggaaaaaaggattatctcttctacctggagagaagacccggacaggacagatataagcacttacgtttgtaactgattgtttttatagatattatttgctgcttcggctgaatcggatgaacgatcgaccatatccctttctaatccggggaaaaggcaccgttgtctggaaagctataaattttgtcaaaatattggcgtctggctcttgccatgacgtaatgacgattggatgacacactccgacgggaaaaaattgccgctcagaatttgccgggcgcctcttctccgctctggcttgatcgccccgttcgcatcttccggagccgccgccacccctcgatcaggccgatgcccgccagcgccaggaaccacggggtcacgacctcgcggaaaatctgacgcgtgtgaatcaccgccgccatcgctgagaaattgaggaaaaagtagagtgaataccggaagatcggcggatttccggaaaacgaaaaaaccacgccgagcagcaccagcagcgtcagcagggcatgcggttcgatcaaccagggggatagccccgcgctttcgacctttatgctgcgttcgccgaatcggccgaaccagaaagtgaaaatccgcttgccgatgtttttaatcgtccggcggggatgctcctggaccacctgccaggtcagcttgagcacgaaacgatttctcgccgcatcggtcaaactgtcccaattctccggcttgtgttcgtcgaggtaactccacccgatgccgtgcggcgccgtttccccctcatccagaaccgccatcagcatcatgaaacccttccggtcgtaaatatatgaaaatccatgttttttctgcatcatctggtagatcagcaacggcgtcgaaaagcaaatgaccaacgccgtcaacgaggccgccacccgccggcgcttggccggattgcgcaactgcagcgcccactcgccgagcagcaacgccagaaaaagcgtcagcaccggccgcgtcagttcggccagaccgaaacacaaaccggccggcagcatccaaggccagcgatgaccgcgccgaaccgtcggcagacagagcagcgcgatcaggaaaaagagggcgtgcatcgtttccggacgcagcgagcaagccgccgccacgctcggcttccagaacgtccagagacccgcggccagaaccccggccgcccggctgtgccagcgccaacccaaaccgaaaatcggaaaaaccagcagggccgaaagcaaagcctgatacagcagaaactcggtcgggttctcgaaccgactcagcgcgtaaggaagcagcggcggctttcgcgtatggctggtgcgcgcataagcctcgtcggcgtaaaccatgccctcatcttgggcgatcgaccgcgaaagcatgtagtacgccgcgtttgtgtcgatcggcgcgcgactggccggctcctgccgcaaccacaacgccggaaaaaacaatagcgcgggaataacccaaatccaaaatttctggaggatggggcgaaactgcttgctcaacggcggcgccatgtcagccccatctgcatttgctccccggtttgccaccccgccgtgagggtggtcaggccgggacgcggcgtgggaagccaatgggcggcgaccgccgtttccaccgacagcgccgatttccaccaggcaaccgtggggatgaaaaccgtcaaatcgtagcacggcgccggttcggcgcgacgatccagcaactccaggcgaaattttccttctttcgtcttttcccaggttccatcaatggcgacgccgtcgctgtccaacgcaacctcgggcagccagtccggcaacgcctcgccctcgacgatcaagctcgcccgcaggatcggaaacggcagatgcagctcgcgccgcccgaaaggtattcgcaaaagcaacgtgctccgcccggccggaacgtccttggcgccctcgcgcccggccagcaactccttctggctggtccattcgatccgccaggagtccccggccagcagagtcaattcgggatcggggcgggggggaatctgtaagtcctccaccggcctgtatttttcgattccgccccaggcgtgatcgaccgccgcccccagcagcggcggccggcgcgtccgaatctggtcgctcggccggccccggtccaacaccgtcgccgcgtccggcacgcggccgtcctcgtcgtaaaaactgaaggaatacaccggatcgtagacgtgccaggcgccgtcgtactcgatttccggcgccgcatggccccgcagataaacgatccgcgccggcagatcggccgctttggcggccagggcgatgattatcgccaggtcgttgcagttgccgtagccgaaggcgtacagcacccgccagggcgacatctccaggtccgtgacgcccggccgattgtcggccgcggccaggtgattgcgcacccactcgaccagcaccgccgctcggtcggccgcttccggcaactccgcgaccgccgcggcgacctgatcctcaaacgacagccaggggttgcggccgtcgatgctggcgaacggattgaccagcggctcgttgccggtgttcgcgatcgtcagcgccagcggcgccgtttgcccgaccggatgcacgccggccaaaatccgggttcccggccggtcgatcgtccagatgtcggtttccgttttccaccacagcccgtcgaaaagaccgatcccttcgtgcaccacgaaaatgaataaaatgatcgccacgctcgccagcgccagcgtcatccaggccagccggctcagcattcgttttttcgatcgcggcatgagcggcattctacgcgaaaaaccgggcactggcgaccggttgtcgccgtcaagaccgcgggcgtcgcaatggccgcggcctgcttgcatccgccggtaaaagaatccatgatgacgcgactacgaacaacggagctgagcgatggaatttctgcataatattccaatctgggtgtggattgtggccgcggtgctcattatcggcggatttttcgtgaagaaaatggaaatctacgtcatgttgatcgtcgtcggcctgggcatctacgtcctttcacagaattacgcctgccagttgttgaagtagccgccgtctggatgcgccgcgtcggtgccgcgccgtgtctgcggaaattccgcggaataggtgaatgtcgccggggcgtttgttgatttcctgatcgggtcgagcgttcatgaacaccagcgagaaattgcgcgccgatttgctggaaggtctccgcgacctgcacgcgcaggtggatcgccgcgccggcgaggtgctggccgcgctgaaccggccggtgcgttgcgggccgggttgctcatcctgctgtcaggacgaattgacggttttcgagatcgaggcgctgcggatcctggcggaaaacgcggcgatgctcgaaacgtccgcgccgggttccccggggcaatgcgcgatgctggacgaggcgggcgactgccgaatctatcaggcgcgaccctacgtctgccgcacgcagggcttgccgctgcgctggctggaggaaaccgacgacggttggcgcgaataccgggatatctgcccgttgaacgagcaaggcttgaacgtgacgaaattgtccccggccgcctgttacaccctgggtccggtcgaggaagcgttgcgcactctgcaaaaagcgctggccggcggcgccttggcgcgcgtcaagctgcgcgacctgttccgcaccccggtccgcgccgcgctgtcgggcgccgaacaatgaatttgaaatgcatggcgtaagaccgacaagcggaaagcgacactgaccggtctcccgcctccagtcttccagccttccgggggaaccattttcatgggtgtccccatcattccgagaattttctcatcggtaggggcgcatggcatgcgcccccaatgggcagacgcccggacgcaacaaactatgaatttggcgaagatagcgatccggtagttactcatagcaataactaccattcagtgttgcttttttggtttgtgcatggctccaaattaactgccggcaggcggatgtgggggaatgatgataatgacaatttaccggaagcggcagaatgcggcatggaaatcaattcagccagccattttgtctgtcatgggacaaatgttttagccaccacatcaaggaatcgccgattcgccgcttttctcggttcttgcgataatggcatctggtgtcacaccgcaaccatgagccaacgatgtctagcggaggccttgctttttcgtcgagttttcgcagtcgttgccgccacagacagtgttaaatatacgtccgattccgatatcgattacgccaacgaatggacaattcaggaaatcggttatcgctttgcccactatgtcactaaaacctcaccccaccgttacttcgtgggcgaagccttcttcaccgccgcagcgccgggggatgaggcgccgcccgttttggacatgagcgatttattaaacatcctacacctgaacttgctgggcgatccgcgatcgcgcatcaaaaacaatatctgagattaccaaaagaagtcggtcgtttttgggcgaccagctcgggccgccattttttcggtattgcatccgattgttgaaaaagcccatccctggcgctttcaacaacttgctaacggatttcgaaaatcagccagtcgtcgtcttcgaggatcggcgcacctaagagcccgaccagccggtcgcgcaggcggttttccaatgccataccgtcgcccgtgggatcaaaccgcctgccgcgcaaggcgcattgacgtcgattgacgaccacatgcaacacgccgcgctctttccaagccgccagcgccgcggttgagggcgccggcgattgctcgccccgcgaccagcgattgaaaaccgtcagaaccggatcgtcccgcgtcaggtccgtaaaagcgggcgactccagataggccaggtcccgcccccgcccgccgaccatagccttgcccgtcagcacgacgagcggcaggtgataatcgtcggaacccacgggcaagggaatgaaggctttgcccgaacgggtcgccagggcatccgtcgttcggtgatcgaaaaagggaccgatgaagggcgtcgcccgcacaaaaaccgccgaccaggccacggtcatgacgagcaacaatccagccacggccgtggaaatccaggcccgctccggacgcgcgcgcagggaaagaacgatgaccatggtcatcgccatcacggcgtaaggccaaaaggtatccggccaatacagccgattgaacgagggaaaccagttgtaaaggccgatgtagaccggattgcggaaaatataactgacccagccggcggactcccgccagatcgacagcgacggcgccggtccagcgaccagcagcgagaaaaacgcggcgatcatcagccaaaggcccgttttccgccaggcccgtaaacccagaaccagcgccgcgccggccaacgccagtaaaaagccggtctcgattttcgccgcccattcatgaccgaaaatgacgtgcaccgacccccattgcagaatcatcaggtgctgcggcacgggcgtttcgcgcaaggtccggttgtcgggaaacgccgccggccattcccacggggcgtcctgtccggccgtcaccgaacgcgccagcggcccgtaaaaaaccgccgcacccgccgccacgatcgcgatcaccaacacctgcagcagaaggtagcggcgcaggagcgttttatctcgccggtgatgcaacgcgccgtaaatcgtcagaaacgccgccagaaaaaagacgccgtacaggtgctgatagtaaccgcagccgtccaacagcaagaccgcgccggccgtcgcggcggccgcccaggtcggttttttcatgagccgccacatcgcccaaacggccaggggaatgaaggtcaggagaatctggggcagatggccgtcgcggaattccatgaacttgaacggcgcgaaagcccacaagaccgccccggccaaagccgggaaccggcggcgcaagatggcgcggaagaccagaaaggccacgacgccgtcaagcaacagaatgaaaaaacaccagagattgttggaaagcggcaacggcaacccggccaggaagggatagtagaacaagacgttgagcaccgatccgtagagcggagcgaccgccgtaccgaccggaaagaacaggctgtcggtttgccagagggaaaaccggccgtcgcccagggccgttttcacccaccagttccaccacagcgtaccctccgcgtcgcccttcccgccgaagatgccgatgaaggtatgctgcggatcgcgcaacatcggcaggcaaaacaccgtcgcgaggatcatcaggaaaaggacgctcagccaatcgcggcggttccatcggatgggtctcgattcaggcatacgcacgttaaagcaggtatggaagcgccctggcaagagccggcatcggtcaatccgccggacgctcctcggcgggaaggcgaccctcaaaggcgcctttccataaaccgatgaaaaagcgccgcgcattcgtgcccagattgcggatgcgatagcctccctcctgcacgacgaccgtgggcaggcgcagggcgccgatcaggcgaccgttgctttcgaagtccggcgcggtcagcgaccaggagcccgtaggatccgccttggcgggatcgagaccgaaggccactaccagaaacgtgggggcaaagtcggaaatccgcttgagcgcctttttcagatgggaacggtataactcgccttccagtttttccggcagcggaaagttgatgttgaatccctcgccctcgccctcgccgcgctcgtcctcgaagccggtaaaataaggataggcgaagcgcggatgaccgtgcagcgagacggtgagcacatcggcccggtcgtagaaaatggtctgcgagccgttgccgtgatggtaatcgatgtccagcaaggcgacccggccgtgacggctcaggtagtgcgcggcgatcgccgccgagttgaaataacagaagcctccgaacgcccgtttctccgcatggtgccccggcggccgcaccaacgcgtaagccaggcgattggtctccagcacgctttgcgccgcggtcagggcgcaatccacggcccgtcgcgccgaatcgtaagcccggcggttgagcggcgtgaaggtgtcgatgcagtaataaccggcccgcaccggcaggtccaccggcttcctggtcgcgttccgcaaggggaagacatagggatataccgatttgttttcgtcgatcttctcgcagacgcgatgcagataatccacgaaatcagcatcgtgcaccgccaggatatgacggttcgaaaaatggcgaatcggcaacggcgcgaacaaaccggtcgtcgcgagccgctcgtgaatggcgtcgatgcgggccggcgattccacatagccgcgctcgcgcacatggtggatgcgatgccggtcggtcatgaccagcgcgatgcgccggtcggcggccagatccgtcgcgacgggccggacatcctccggtttgatataacgcggttcgcgcagacgggtgggctcgtcccggaaagagcgcaccaccatcttgatatatttcggcggacacagatggctataccggcgctccaaaatggcccggacgatttgccgcgccgtttcccgccgcaagggacgacccgttcccaggtcgtcgaacatcagactcggcgggcagggatcatcctcgcggatcggcgtctcgtaccgcgtcccgatgacgggccgggcgccgaagcgctcgtagaatttcattcgcgccttgttttgcttgataaacgcttgatcgcgacagatcgccggttcatcggaaaggcactccatgaaaatgccgatcgcgcccagcagacgcgcttcctgacgcaaccgttgatacagcgccgcccccactccgccgcccgtcgcccgcggatcgacggagataaaatcgagataacaaaaaggcggcttggccgagtgcatcatcaaggcgaatcccgccagactgccctgccggttttccgccgcgaacagaatggtgcgcagccgatacttgatcggattgtgcaagtggtccgggatcgcctggacctcatcctcggagaccaggctgaattgttcccggagaatccgctggacctgctcgacgatgtccttttctctgggaagaacgacgtcgtaaatccgcctgattctaaacatccatgccccccgaatcgttcgccataatatagccggggaaagcgggaaaaaaaatgcgggacagccaaagcgactgatcccgctgaaaaaatggtgcggaaggggggacttgaacccccatggccttgcgaccactggaccctgaacccagcgcgtctaccaattccaccacttccgcataaatcacagaacaaatgcaggaatgtcttttacccgatcggcggcgagattgtcaagaaacatttcgccacgcaaaaaccttgtgaaactaaagcgaattcgctacattggcccagagcgacgatccgcgacacgcggcgcggcggacaaaccgatcaggtacaaaaagggagtctcgaccatgcctttcgctcggcgatataacccgctgttccttttcctgcccctcattcttctcttggccgtgggctggcacatcaccggttgcgggggtgcaaaggaggccgccgagaaggcggccggaccggaaacccctgtgccggcgccgacgaaagccaaggcgccggcggcggccaaggctcccacaccgaccctccctcccggcgaaaaaatcgaaggacaggtcaagcaaggccagacgctcctgaccgcgttgagcgcgaacggcgttccgggacgcgaggcctatcgactgtataaggccctgcaaaagatcgatttccccgaatggcgcattcatcccggtcatgcgttcacggtctggctggacgaggaaaaggcgaccggcctggattacttcttcgaagaaaacatcgtctaccaggtgcgcattcaagacgacgaattggtcgcccgtctcgtcgaggcggaggcaatcgccgtcccggtcgaggttgaggagtcgccggaagacaagctgcccgagcccaccggccaagcgaacaacggcgtcgtccaggaaggcgacaatctgaccgcggccattaccggcatcgacatcgatccgcaacagaccgaacgcatcatcaccgcgttgcgcaccatcgactttcccttccgcaacatccggcccggccagaggttcgtcgtttggaccgacgggcagggaaacgtcacggcctttgattaccagctcgaccgcgtcaccaagttcgtggtgcgcaccgtggacggcgcgctggtggcgcgccgggtcaaattggtcaccaccacgaaggtcggccgcctcggcggacgcgtcaacaccagcgtgtatcaggcgattctggatgaaggcgaaacggacaatttggcctcgctggtgtccaatctctttgcctgggacatcgatttttactccgatccgcgcgtcggcgattcctttcgcctgattttcgagaagtattacctgccgaacggcgaattcctcggttacggccgcctcttggccgccgaatacaacggcgaggcgaccgggcggaaattcgggtattggtacgacaccgcggacggcgaatgggacggtttctacgacgaaaacggaacccaactgcgcaagtcgttcctggtggcgccgctggacacgatgcggatcacctccaacttcggcatgcggatgcacccgatcgataaaaaacggaagatgcactacggcgtcgattacggcgcggccgtcggcacccccatctgggccgtggccgacggcgtcgtgctctcggcgggccgctccggcggcgccggcaacatggtgcatctggaacacgcgggcggctacgaaacgatgtatctgcatctgtccaagatcaacgtccggcggggacaaaacgtccatcaaaaacaaatgatcggtaaagtcggcaattccggtcattcgaccggtccgcatctggatttccgcgtcaagcacaacggcgattacatcaatccgcgacgcttgcgcgccatcgccacgccgctgaaaaagttgcccttcgagcaaatggcgcgttttcggataacgattgaggaaatgaaaccgcaattagccttgattccgctgcccgaaatgtccacttgacgccgtttccgtccccgcggttcaccgcacgtagacaacccagccgacaaccacgacgtacagcgccagattgacgatcatcgacttgtcgctgatcaacaccttttccagcgtgtaggcgccttccttgatgtgcaccaggtaaagatagcgaaaaatgccgtacaggacgaagggcacggtgtacaccaaatcgctcgaatgaaacttgtcgacggtcgtcggcgaacgcgtatagagggtgtacgcggccagcaaggcgctggtgatcaccgccgtcatctgatcgagcaggtacgtgctgtattcggcgagagtcttacggtgattgcccgcgtcctcccgcaaaacgcggatctcgagggaacgcttggacagcgcgatgaacagggacaacagcatcgtgcagatcaacagccaactcgagggccgcacgccgatcaccaccgcccccgccactacccgcagcacataccccgccgccaccgcgaacagatcgacgatgaccacattcttcagcagcaggctgtaacaaatcgagatcgccgcgtagaccgaggcgaccaggccgaacgaacggccgagcacaaacgaaccgaccagagccgccgcaaccaacgccagacttgcccgtagggcctgaccaagcggcaatcgaccggcggccaccgggcgatggcgcttgctggaatgcaaccggtcgcgttcccggtccaccaaatcattaagcaggtaacccgcgccggacaatccgctaaacagggcgaacgccgccagcgagcgcagcaggctgagcggttccgtcacctgcccggcgaaaacgatcggcgcgaacagcaagacgtttttggaccaatgacggggccgcaggctgttgagcagatcgcggcgccgggcggcggaagccgcatcatttgccaccttccggccctttcacgttcgcacccgccttgggggaaggcgtattggtcaccggcggcggcgtggtcacctcctccggcataaagccttcttccttgccgtcctcgagcgtaacgaaaagcctgccggaaaagatgtcgtagcgtgaaacgcggccgatccctttcggggtttgcgcccgcttgccgattttcggcaggccgcgacggaattcggcatacgtttcatgctcgtaggaaaggcagcacagcaggcgcccgcaaccgccggagactttcgttggattcaacgacaagccctgatccttggccatccggatcgaaaccggggtgaagccgctcagccattgcgcgcagcaaaagatgcgcccgcaaacgcccaagccgcccaggatcttcgcttcgtcgcgcacgccgatctggtacatttcaatgcgggtgcgcaagcgttgcgccagtcgccggaccaactcgcggaaatcgacccgtccctcggcggtgaaatagaaaatcaccttggtgccgtcaaacaggtattcggccttcaccaacttcatcggcaggtgatgctcggcgatggcctcgacgcaaatctgcgccgcctcgggctcgcgggccttgtattcctgcgcttttttcaggtcgtcgtccttggccttgcggatcaccttgagcggcggattcgaccgcttccattcgatgtccgtcgcttcgctcgccacgctgcccaaacgcgagccgcgctcgccttccacaacgaggatttcgttgagcgaaacgtcgaacgcctccacctcgtaggtatgcagcttacgcgaaccgggaaagcgcatttgcaccactttcatcgcggcaatctcccttcggcaaattcggtcggcgtcggcgacagcaactcgatcccgaggccggcggcaatcgccgccttgttgacattgcgttccaccaggcgtcgcgcgtacaccaatgcgccgattttggccgataactgcgcggttgtcatccgtcccgcgtagcgctcgatgtgcggcaaggcatcccggtggcgcaggcgccgttcgtcgcccgtcagccgccagaccaccgcatcgcgcagaaacgcggccagcagctcgatgccgtcgcgcaggtcggccgcggtttccagcaattgctcgccccaggccaggccggccgtcgtgtccgccgcctcggcttgcgccaacccctcgaacaaactcaggcgcggtcctttcagaaaagtcaggtccaacgcggcggcccgccccggcgcgccgccggccaacaacgccgtcagccggacgtccggctcggccaattgcaggtgctcgcggacgtaagcctccaccaattcgtcgggcaccaaaccgaaacggacggtctggcagcggctgaccaccgtcggcaacaactggtgcggcgccggcgtcagcagcatgaagacggtgcggtcgttcggttcttccagggttttgagcagcgcattggccgcctcgaccgtcaactgttcggcgccgtcgatgatgaaaatcttgaaccggctttcgtaaggcgcgtattgcgctttcttgatcacctcgcgcgcctgctcgatcaacaggttgtttttgtcctcctgtttgaccatttcgaaaaagtcggggtggttgccatcgagcagcttgcggcaactccggcaggcgccgcaggcgtcgtccggcagtgagaggcaattcaacgccgcggcgaaggttcgggccaccgtatgcttgcccactcccgccggacccgcaaacagataggcgtgcgccaccttgccctggcggatcgcctgccgcaacatgccgatcggtttctcatgaccgagaatgtcggcgaaaccgctcattcggcaactcccatgacttgatcgagaatcgcttgcgtactccgccacaccgtctcgatatccgggccggcatcaataacgcgaaaacgctccggatgaagctcggcgagacgcaaaaagccctcgcgcaaccggcggtgaaaagcgaggtcctcccgctcgaaacggtcctcgcgccggtgctcggccagtcgctcggcccgggccacggcgcgcgtcaacccttgttccaccggcagatcgaacagcagcgtcaaatcgggccgcaaaccgtcggtcgccgtctcattgagacgatccaccagttcgacgcccagcccccgggcgtaaccctggtaagcccaggtggaatccgcaaaacggtcgcacaacacgatttcgcctcgcgccagggccggtttgatcttttccgccacgtgttgcgcccgcgcggcgcaataaagaaaaagctcggccaggggcgtgatcgccgcgttatcagccgccagcagcacccggcgcaattgatcggcgatgggggtgccgcccggttcgcgggtcagcagcacccggcagccgcgcgcggccagatactcggccgcccggccgatctgcgtcgatttaccggaaccttccggcccttcgaaagtaataaacacgagcatttcctcggtgattcgcaaacgccgcaccctaccgccaagcaacgggtaaatcaagttgccgggcggtcagaatcccttttattcggacggaattggcgtgggaatggtctcgacggcataaaacatggtcgataatggcacgccgtcctccggcgccgtccaactgccgagcagcagaaacgttcgttgcccgtcgcgccaggcgaaggcgatcactttccggtcgcccgcgcccgcgccgcccgaaagccggccttcccgatcaccgatccgaagcggttgggcgatcgccggaggctcgatgccggccatcatcgccgccgcctcgacgagttccggcaacggctgcagacaatcgtcgccgacgatcagccgcaaaccggcgcggccggccggccggggcggcccgtcccaactcagatcatcgggcagaacgttccgcgcctcccaaccgggagcgagaaacaggcgcagaccatactcgggcaactcgacggccgtcaaagccatcgcttccggcgagggcaattcaaccaacggcggacgcgaaatcgcgcaaccggccagcaggaccagcacactgacgaccagcgggattctttttctcatcggctcattccttgatgcaaatccggctgaatatctcatcgagccggcgttgatcgtcgtccgcagaggcggtcatgataatcaagtagatcccccgatcgtgatccaccgcgaacaaggtcatccgtatttccggagtcacgttttgcatccccaccgcccggtgcgcaccgacgttgccgatcagcgccgtccagccgtccttcatccccttgtttttcaattcctcttcgattttcccgatcacgtcgctcgcctggagggccaacggatcgatcgaaatcagcatcgacgcctgtcgtccggcgtcgagcggcgcgatgcgcaacgcggcggtcggcgcgggcagccactccgcccgccagtcggcgggcacttccacctccagatgcaattctcgacattcatgaatgtgaccggttctttcgacaggcaccggcaggccctgatccttgtccgccggcgggcgaccggccgttgcgcaagcgaaggcgaaaaataaaagaaagaacggcccagaccattttatccgcacaattactccttcattgaggcatccaccctgatcttggcgcaaggcgcttttcctggcaagcacattgtcaagctttaaccgagacattacactatgtttctgttttacatcgaccggaaaggaagacgatgattctcaaacatctggaagccggaccgctggcgaccaattgctatattctgggctgcgaggagacgaaacaggccatggtcatcgatccgggcggcgacgtgccccggattctggcgatcctggcgcaagaaggtctgacctgtgtaacgatcttcaacacccatacccatttcgatcatatcggcggcaatgccgaattgaagcaggccaccggcgccgaactggtgacgcatcccgaggaagccaagcagatgggcacggtttcggagagtgcgcgtctcttcggcctgcgcgtcccgcccagcccgccggccgaccggacggtggtcgagggtgaggaaatgacggtcgggctgctgaaaggaacgatcctggaattgcccgggcatagcccctgtggtatagctttggtgctgccgggtcacgcgttcgcgggcgatgccctgtttgccggttccatcggccgcaccgactttcccgggggcaattttgcggcgctgacgaacgccattcgcaacaagttgtttactttaccggaatcaaccgttgtctggccgggccatgggccgcagaccacgatcggtcgggagaaaatgaccaatcctttcttctgaggggaacagcagggaggaacgatcttgctgaccggcaaaaagattatcctgggagtgaccggcggcattgccgcctataaaacgccgttgctggcccgattgttggttaaggccggcgctgacgtgcacgccgttctgacgaaaaacgccgcgaagctggtcgcgccgttgacgctccagaccatcaccggccaccccgtccatatcgaaaccttcgagctgttggagagcaaggacatctcccacaccagcctttcggacagcgccgatctggtgatcgtcgcgccggccaccgccaattttatcggcaagtacgccgggggcatcgccgacgatctgctttccaccacgttgatcgcctcggaagcgccggtgctgctggctccggcgatgaatccgcgcatgtggaaccatccttccgtcaaggaaaacatgaagcgcctggaggaccgcggcgtgcaccgcatcggtccggaaagcggcgaggtcgcctgtcgggacgaaggcatcggccgcatggccgagccggagacgattttcgaagccgctttgccgttggtggccgagcaatggctcagtgagaaaaccatcctggtcagcgccggtcccacccgcgaaccgctcgatccggtgcgctatctgtcgaaccggtccagcggcaaaatgggctacgcgttggcgcgcgccgcccatatcctgggcgccaaggtcattctggtttccggcccgaccaacctgccctgcccggtgggcgtcaagcgcatccaggtggagaccgcccaggacatgttcgaagccgtcgaggaagccttcaccgccgccgatgcgctgatcatggccgcggcggtggccgacttcaaaccgatggaaaaagcgaacgccaaatattccaaagacgagatgagcgaatcgatcgtcatgctgcccaatcccgacatcgtcgcctcgatggccgccggtaaagtgaaacgcatggttatcggcttcgccgccgagaccggcgacgcggataaaaaagccgttagaaaaatccagcgcaaaggtctggacgccatcgtcgccaacgacgtgtccgagccgggcatcggtttcgatcacgacgaaaacgaggtgcgcgtcatcttcgccgacggccgcgccgttcccctggcccgccagcccaaggaaaagttggcctttcatattctggaaacgctgttcaagccgatcgaataaacgaaacgattgccggacgccaagcggatcgcgtcaatccgctttccgcaggagtacctccaccagttccatgattgtgcgtaggaaagccggcgaaccgaacaaaacaaagcgcgccttccgcgtttcggggtggtaaataaggtcatagcgggtgggaccccatgccgggtccttggtgttgagcaccgcgatgaccgtgttggaaatccgcgacacttcattggaatcgccttcctcgatttccaacaccgcggaaacgctgatccgttctcccaacggcctttcgctgacaggctccgggggccggttcgccagttcgccatgggcataaatgcgcaggtcctcctgcttgatacgccaggcgcggccgattttatgcgccttcaatgcgccctgatgaatgaatcgcagaacggtcttgggatgaaggtccagaattttcgcaacctgttccactgtgtacatttcagtcattttaagctccttcgatatggagtatagagtagcattagggagcagtcaaggacataatcagagtattaattgtagcattatttttttaatgattaactctctttggccagcaattgcgccggattgaagccgatacgcaaccagatttccacgccgagcggcaggcaatcctcgtcgatgtcgaactcggggctgtgatgcccggcgaccaaacccccggccggattcccgcaacccaaagcgatgaacgcccccggcgccttttgctggtaaaaggaaaagtcctcggagaccatgcccggccggccggcaatcacccgttcggcgccgaccacctccgcggcaagacgccgcaggttggcgatcatgcgcggatcgttgaccaccggcggattggtttccgccacccattccagacgcgcctcggcgccgaaacccactgctacgccgtcgatgagacggcggattttctcttcgatcgccggcaaggcgtcttcgttcatgaagcggatggtgccgcccagtttcgcctcggcggcgatggccgtgcgcatagtgccgctggcgaccatgcccacgtgaataatcaccgggtccatcgggtccgttcccagcgtcatggcgctgcgcagagccacgatgatgtgggcggcgacggccagcgcgtcaacggtgtcgtcgggtttaccggcatgcccgccgcgccccttgatcgtcacgtcgaaagcctgggagccggccatcgccgggccggaaaccaggttgaccaaaccgaggggcagattggaaaagacgtgaatgccgacgaccgactgcaccacctccatgacgccctcgtcgaccatgaccttggcgccggtcgtttccggaacgtccaaacccggcggcggcgtttcctcggcgggttgaaacaacaagcgcacgtgtccggcgatctgctggcgatgcttggccagcaccgcggcggcccccaacagcatggccatgtgcgcatcatgaccgcaggcgtgcatcacgccctgattttgcgaggcgaaagacagaccggtgttttcgacgatcgccagcgcatccatatccgcccgcaacgccacccgcggccccgaacgaccgccgccgatatcggccgtcacgccggttcccgccacccggcgcggttccagccccatgtcccgcagccgttccgccaaccaatcgccggtttggcgctcctgccaggacagttcggcgtgttgatgcagataacggcgccattgcaccacttgcggctgcatgtccgtcgccaatttccgataattcatcgtcgcgcccccgggcttggatatgggaaacggaaccgacgccgaccgccggtcccgttggctgttcgggttttcgttgttacagcaattcgtccacgttgtcctggaccttgcgaatcgcttcgatgatgtcgtcgatgtccttcttggtgcccatcaggaagggataatgcacccagacggcttcttcgtaagtcgcctttttcgtgaccggcagatcgacggcgtgttcggcggtgatcgcctcgccgtaacgttcgcggatggccgggtaaaaatccgccgtgaccgggaagatatcgcgtccgggaagcggctcgtaaaaatcaccgtcgaaggcgacgccttccgccatcagcgccatcaggaaggagtcgcggtgcagacctttgaaaccttccggattgtacttgaagatgtattgataatggtgctgggcggtcagccgcggatcgcgcttgatggtggcgagacccgggatgcgctcaagctgctcgctgaggtagtcggcgttctgctcgcgcagccgagtgcgttcctccagcgattccaattgcgcgatgagcaccgccgcctgccattcgctgatgcggtagttccagccgaccagccagcctttgaattgatcgtaacccggttctttacgcccgcagttcaccaggctgtgtagcttctggttgaactcgtcgtcgttggtcagcacgatgccgccctcgcccgaggtcattaatttactcgactgaaacgagaacgatccgaaatgaccgatcgagcccagccccttgccgcgccacttgccgccgtgcgcgtgggcgcagtcttcgatgaccagcaggttgtgcttggcggcgatgtccatcaggcggtccatgtcggccgcgctgctgcccaggtggaccgcgatgatcgccttggtcttttcagtgatcttggcctcaacaatgtccgggtcgatcgtgtagtcctcggccttgacatcggcgaacaccggcacgccgttggtggtcaccaccgcgctggccgtggcgatccaggtgtagggcgtgacgatcacctcatcgccgtacttcaagccgccggcccgcagacacatttccagcgacaccgtgccgttggcgcagaccacgccgtatttcgcatcatgggcggcggcgaatttttgattgaattccttggccctggcattcggcgagggatatccgccccatttgccgctttccaacactttcagcaattcttccttttcccgttcggtcctcggcggccacttcggccacggagcggtccgcaccttggcgccgcccttcactgccagtttcgccatgactttctccttttcaccggaagcgccggttgcgcttttcaccctgacgtatttgaacacccattcaaagtcaagttgatctagtatgttaaattaaaacggattgctcgtcgagagccgttttatacgttcaggcgaattatcgccagatcatcccggccagcctgatcggctccagaatcttccattcccaagcgcggaccagttgtccgatcccgtagctggcgccgttggccaggaacgaagcggacagggccattaaaaaaggaagcggccgggcgagcgcccggaaggtcactgcctcaatacccgcgaccaacagctcaccggtggcaatgtaaaggggataaaccagatcgtgcgtcaaccgaccatgacttgcttcgcgcaacgcgccgggcagcaagtcgcggaaccagggtcgatcggccagatcgaagagtaaaccatagacgaacggccgccagacaaaccacagcaatggatgagtgatgaccgtaccggccatccccgccaaggcgccctgccagatcccgacggcccggtaggcaaagaggacgaagatcggcgtttccagcgccagggtcatcaaataggaaggcaaccataatccgagccagtgcgccgtatcgatgaaccgctccttttcccgtccgtgtgtctcgttgtttaccatgcgccggtcatgaaggccagttgcgccggcgatttgcccccgctccataaaacaaggtattactacaatgactttaaccgtaccggggcgcgatgcacgaacaaacttccttgcccctgccgatcaccacgccgcgccgccggcggcaggcggcgttctgcctgacggcgacaatcgccttcggcgccctggctgtgctctggctcatgaacaccgaatggtttctcagcaaattggcggtgccttatccgatgcgcttcatcgcggagaattatcgccaaaacctgatcgacttcccttacctcctgctggtggtgaccggagcctttgccctgttgtcggcgacgctgtgggaatcgagccggcgcccgaacgcctggccggattcgccgtttttcgttcttccctcctgggcgaccgctctgctattgaccgtcctgctgggccttgccgcctggttttcctaccggaactggctgcattggggaaaaccgcgttgggacgattactggaaattcggagaaattctcaattatctgtggcgtcacccgaccggtgaaaactgggcggcaatcaaacaaagtctgcaatcgtatccgcacgcggccagcccgctgacgccgctgttgatcagcctgttgctcttcctgcacgggaattcgttgttctggctgcaaatcctgaatttcgccgcgacgatcggctcgctgttgctgctgggccgcctcggcaaaaaggtcgctcccgcgctttcgttttggattttaggggcgctgtttctgaccaacgccgccacgatgcgcaatgccttcttcatccaactcgatgccgtcagttcatttttcgtgctgctttttttcgccctttggcgccgccggctggcgcggccgacgctgctcaacgcgatcctcctcggcggttgcctgatcctggcggtgctgcaaaaaacgacgctctttccgctgctggccgtgcccctgacggtcgccgttttcgaagccgcccgcgaccgaatctggaattggccgagcctgatcaaaaccgtcctgttgaccgtttttttgccgctgggagcctttctcgcttatctgtacggattcggcttcctgagtaatttcagttcccaagtggaaatcatggggaccggttggaatgaattggatttttctctttcccgcttcgtctttgcgaccggctttatgttggggccctacctgcccctgatctttttcgccgagccccggcgcgagccgttacatctgggactgctgctttttatcgcccttttctttctgagcatcgtcgcggtcaggggaccgttctggagccggtattattcgcatatcctggctccgactctgctgctggccgtgccgcatctctcccgcgccgccgtcaccggcgcctggcggccggttttgcccgcttacctgctgggcgtggcggcggtgcaatacgccatgctgctctggcatattttttaggaaaagccggaaaatattgtccaatatattttacttttgatcttttcgtcattagctttaattagaagctttggaggtggaagcatgccgagtattcgccggattatccgagttacacgatttacaccggcctatgaaggcgcgggcgtgcgtctgcgacgcgctttcgcccaccccgatccacacctggatcccttcctcctgttggatgatttcggctccgacgatccggcggattacatcgccggatttccctggcatccgcatcgcggcatcgagaccattacctacgttttgcggggacggatcgaacacggcgatagcctggggcatcggggcatcatcgaggagggcgacgtacaatggatgacggccggcagcggcatcatccacgaggagatgccgccgaaaagttcgtcggggctcaggggtttccagctctgggccaatttgccggcggcgcacaagatgacgaagccgcgttatcgcgaggcgaaagcctccgacattccccaaatcgaaatcgaccgtaaaattcggatcaaggtgatcagcggtaaggtcaagggcgtgatcggtcccgtctgcggcatcgtcaccgaacccacctatctggatgtccgcctcgatccggatgcccgccttacccacgagcttcccaaccatcacaacgctttcgcttacgtcgtcgaaggcgaggcatttttcaccgaaccggcgaaacgaatcgtccggcgcgggcatctggtcgtgttcgaccgaggcggagatgtgcggatcaccacggccgccgaaggggtgcgcttcttgctgattgcgggcaaacccatcggcgagccggtcgtctggcgcggtccgatcgttatgaataccgaggaagaggttcgccgcgccttcgaagaatacgaaaacggcgccttcattaaatcgactgtttgactttcccgcccagttgcgtttgtatttcgattaatttgacacccacatcggcatccatgcgggtcttgcggatcagccatgacgaaaatgaaggttgactatcacgactcattatgccgcctgctgctgccggcaatgcttttggctctgctgttggtttttgccggtccggcttgccgggaccggtcaagcggaacgcgaaccaagccgctgatcgacctgcagccgtgcccgcccggcgagccgccggaaggactggccgccgaggtcgatggtcgttgcggcgtctttgaggtttacgaaaatcgcgagacgaaaaccggcgccgtcatccgcctgcgggtggcggtcattcccgccctgagtcgtcattccaagcccgatccgctgttcatcctcgccggcggtcccggtcaggcggccacggaagtcggcccgctgttattgcctttcctgaaaaacgtcaaggtcgatcgcgacatcgtgctgatcgatcaacgcggcaccggctcctcgggcccgctggattgcgattttgaaaccgaagaagacctgctgtttcaggatcccgatccggatttggtcgagcaatgcctggccgagctcaagaaaggcgccgacctgcgccgctacaccacgccgctcgcggtggacgatctggacgaggtccgcgccgccctgggctatgaaaaaatcaacctgtacggcggatcctacggcacgcgcgtcgccctggtttacctgcgacgccatcccgagcgcatccggagcgtggtgttggacggggtggcgccgaccgatctgaaactgcccctttacctggccgtcgacggcggacgcgccatggaattgatgctttccgcctgtgaagaaaacccgacctgccaaacaacctttcccaacctgcgccgggaatggaacgaattgtcggtgcggctgaaagagacgccggccgttgtcgggctgcgccatccccgcaccggcgaagccgtcaccgcgaccatcaatcaagaggcgctggccgggacggtttttgccgctttatacaatgcggagctgacatcgctgcttcccctggctatccatgccgcccgggaaggcgattttcaaccactggcggccatttccaataccttgggcggctcggccgaaaacatgagtttcggcatgcatctggccgtcttgtgcaacgaggacctgccgcgcgtcacggccgaggacatcgcccaaatccgacaaagtccctttatggctgacagtcgtttacagctctaccggcaattttgctcgtccgtgccgcgcgttgagcttccggcggcgtattacgaaccggtgcattccgcgattcccgtgctggccctctccggcgagatcgatccggttacgccgccgcgctggggcgaggctgtgtgcggcaacctgagccattgccgacatctgatcgttcccggcaccggacacggcgtcatcgcgcaaggctgtatgccgcaaattattcatcgctttctggaaacggccgatcccgccgccgtcgactccgcctgtttggaacgacaaaaccggccgccgtttttcatcaatccttcgggctccagggcgcgaggcgaaccatgatcgatgtgacggacctgcgaaaacgcttcgggtcggtggtcgcggtcgacggcgtgaccttttccgctcccgacggccgggtaaccggcctgcttggccccaacggcgcgggcaaaacgaccacgttgcgcatgatctacggcctgctggcccctgacgccggtcgcatgtgcatcgacggaatcgacgtgctgggcgacatcaccaaggcgcagcagaacgtcggcgtgctgcccgacgcgcgcggcctgtaccagcgcctcacggcccgcgaacacatccattacttcggcaggattcgcgggctgaatcgcgccgaactcgaccggcggaccgacgagttggtcgaactgctggacatgcgcgacatcctggaccgccgcgccgtcggtttttcacaaggcgagcggatgaaagtggcgctggcccgggcgctggtccatcaaccgcagaacatgctcctggacgagccgaccaacggcctggacgtgatgagcacgcgggcggtgcgccaattgatccgcagtctgcgcgaccaggggcgttgcgtgctgttttccagccacatcatgcaggaagtctcggccctctgcgacgatatcgtgatcatcgcccacggacgcatcgtggcccagggttcgctagatgacatccgccggcaggcccgcgagcaaaacctggaagacgccttcctcgccttgtccgaggcggcggaggaggaagcatgagccggccgccgtccctgggcgaggtgatccgcgtcgtgttccacaaggaactcagcgacggcttgcgcgactggcgttcgatcatctcggcgttgatctatcccatcctggccccggcgatgatggtcttgattttctacttcatcgccgacaccaccgccgaaccagaacgcctggtcattccggtgaacggggcggaacacgcgcccggattgatcgactggctgaagaaatatgagatcgacacggttcccggccccgcggacccgaaaaccgcggtgcgcgacggccgggagcatctcgtcctggttatcccggaggattacggggacaaattcgccgaagcccaagccgtgaccttgcgactgtacatggacagctcgcgcaatcgcggccgcgccgacgtggtcaaggtctcccgcctgttgcaacagtacggccagcaatacgcctccctgcgcctgatcgcccacggcctgaatccagaagttgcgacgccgttgatcgtcaaggaaatggatgtagccgacgaccagcggcgggcgatcgttttgctgcacctgattccgatgtttgtgctgttgggcgccttcgtttgcggcatgcagatcgccatggacgtcaccgccggcgagcgcgaacgcggctcgctggaaccgttgctgctcaatccggcgccgcgccgggcgatcgccctgggcaaatggctggccacggtcgttttttccggcgtgggcatggccatcactctcgggggcagcatgttggtgatccgttatttgccgctggagaacctcggactccgcatcgatttcggcctcgcccagatgatcggcatcttcgccgccgtcttgccgctttcgttgctggcctcggggatgcagatgctcgtcgccacctacgcgcgctctttcaaggaagcccagacctacctgaccttactcatctttttgccgctgattccggcttactggggcatgatgttccccttcagcggccggccctggatgattccggtgccgctgctcggtcaggaagttctgttgacgcaggtgatcggcggcgaatcccccgacttattctcctacgccctggccggtctcacttcgctgggcttgggcctggtgtgcctctggtggaccgccctgctcttccgtcgcgaagagatcatcttcggaagataggtggaccggtaagcgcccgtgattcggtgcgatcgggactgcggcgcggtcgagtccattctgtccctctctcatctccggttcattccaggtgcttctgattacccggttccaggtcaatcacaggccaggcgttcggcggtgaggtcccagagcttgatgagagtggagaattgcggccggcgcccgcagacctccgcggccaattccggcgcatcggcccaatcatcgacgtactcgacgtgaaagaccgccttgccggcggcgatgaaggggtccagggcgtcgcattcgtcgtaggcgaggcattcctcgttgagcgcccaatcgaaatcatccaccagggcggccacctgctccaggtcgtttttcagaccgacggagaggccgcgcgcgcgggccgcgtcggccaggaagcggttgtaggcgagctgatccgcggcggtcagatcgaagccgctgtcgttggcgaaggcgtcgacgttgtcgggctcgacgccgtcgcagcccttggcgacggccagatcaaggcgggcgcgcatgatatcgcggacggcgtccaggcgcacgtcgagccaccattcgccttcccattcgtcgaggggctcgccgcgcgccgcggcggggaagtcatcggcgtcgggccgccagttttcgtaactgccggccgaaaaatagcagacgaccacgcggccggcggcttgcaagtcggcgatccggctcgtcgcggtttcgaagagatcgacgtcatacatcgccacatcgaacgagtcgtcgatttgtccggtaagctgccactgccaggtcgtgcgcggcgcgggcatccagacctcaccgccgtcgtcagcgtcatcatcatcgtcagcatcatggtcgcaggcgaaaaacgccgccgccgcgaaaacggcgaggcagacaaacccaaatcggacagttttctttttcatcggctatcccccgctcggttgtcgaaaagcccgccttggcctgtcggcatcataacggatcgtccgatcggcgcaaagcaacgcaaaaagtctttttcaaacgggagagatgcgatatactcgtcccggattgaaaaatggaggtttcaaatgaccgaccattttggaagtttcggcctcttcctcctgctgctgtttttcctgccggcggccgcctgcgacaacgacgatgacgacgatgacaacgacgcctcgcccggcgacgacgacgacgataacgacgacgcctcgcccagcgacgacgacgacaacgacacgctcggtccgccgcagatgcatacgccggagttggtcgacggccgggcgccggggcttttcggcacggcggtcggtttcctgcccgacggccgcgcggccgttgccgcgaccaggggccgcgcgctttattattatgtagtggacgaggccaaggcggagctgacctcggagccggtgaccgaatatgccgaggcgcccgatctggcgatcgacgcgaacggggcggcgcacctggtctacctgaacagcgccacctggacgatcgactacgcgacgaacgctagcggcgcgtgggtccgcgagtcgatcgaggcagtcgtgcccacctatctttatccgctcattttactggatgcggacgggcaacctcacgtcgcctacgtccgtcacatcacggacccgcgacaagatgaagtcgtctacgccgtcaaatccggcgctgcctgggaaattgaggtcgtcgacgaagcggaacacggcttcgagagccgcgcccagtttattctggatgcggaagggaacgcttacctgggctacaagaaggatatttcttaccgcatcttcgtggccgataacgccgggggcgcctggaacatcgaggaaatccggcaaacagagacggaaggaggtcagttcgccctggccctcgacggggcgggcgtccgccatctggcctattcccaaaacgattattattacgggagcagcgaactgatttacggcaacgacgccggcggcgcctggacgttcgagacaatcgactccgacgacaattacccgctgggcgcctgtctgcaattgcgggcggatgcgtcggggacgctgcatctggcgcacatccattacgcctggagcgatatcgatctgcggttgttcccgacgcagcgcgtgtacggcaaacgcgtcgcgggcgtttggcaactcgaagaattcgcgtcaaacgaccggtcgccggtgcagttatcgctggcgctgaacgccgccgggcaagcgatgatttccgcccacgattccgtcgcgttcgatctgtatctgttcgacaacacgaccggcgactggcgcacccggatgatcgaagcgggcgccgaccggggccagcgcaattcgctggccgtcgatcacgagggcaaaccggccgtgagccattaccagtggggcgacccggccctgctcctgaccagcttcaacggcgaaagctggcagaccgacacgatcagcgactccgaagtgtcggcgaattccaaggtggttttcgacagtcagaacgtcccgcacgtcttttacatcgccggctcgccggagaaattgctgcacgcccgaaaaaacgggaacgcatggcaaaccgaaacggtggtcgccagcaacttactgagcagcaccgtgagcgtggtcatcgcggtggacgattccctccatctgctgtatgccgatctgtcgcgggacaccttcaattacgcgaccaacgcttcgggtcaatggaccatcaccgtcgtcgagcccgacgcttatctgttcgacgatcacgacctggccctggacagccagggccgggtgcacgcggccctgtcctcgaactcgaatcataatgaaccgctgtattacgccaccaacgcctcgggcgaatggacgaagcggcgcatcgaatcgccgggcgaatgcgtgggccggatggagatcgagatcgacagcgcggatcgagtgcacatcgcctattacagccggtacgattacgagccacaggacgtctcctgggaatacgggatgcgctacgccagcaacgtcacgggtgaatggcaaaccgaactggtcaaggttcacgccggcatggcgatcgcgctcgccctggatcggcgcggtcggccggtcatcgtttttagcgagggcggccggaacaatatggattgtggcgatctgagcgcggcctggaaacaggacggcgcctggcagacggccatcctggatcaaccaggcgaagtgggcgattatctctcgctggtccgggacgccgacgacctcttccacgtctcgtactacggcgcccgcagcctttactacgcgacgtttacaatgaacgaatagcctgacgccgcagtttgacatgccggagcctgccgtgtaaattgaacattgaatgttcaattatcatggcaacgcacatgattgaacgcatcttggcccaaaaatgccgacaattggccggacagtttccggtgctcaccgttaccggtccgcgacaatcgggaaaaaccacgctggtgcggtccgtgttcaaggatcacgcctatcagtcgctggaactcccggatcaacgacggtttgccctggaagatccgcgcggcttcctcggacaattcaagggtccggtggttttggacgagatacaacgggcgcccgagttgttctcctatatccaggtgtcggtcgacgagcacccggattggacggggcattttattctgaccggttcgcaaaacttcttgctgttgcagagcatctcgcaatcgctggcgggccgttgcgccgtcctcaatttacttcccttctcgctggcggaactgtcgggacggccgggcctgtcgccgggattcatgggtcaggcggaattgaaaaatccgcaaccgccgaaaaccgacctgtttcagaccctgttcaccggtttctatccacgcattcacgacaagcatctatcgccgcgcgactggctggccagttattaccaaacctatctcgagcgggatgtgcggaacgttttgcaggtgggagacgccgaaacgttcggcagattcgtgcggctctgcgccggccgttgcggacaattgctcaatctttccggactggcggccgacagcggcgtttcccacaccacggcgaaaagatggctttccgtactggaagccggctttatcgtcatgcttcttcgtcctcatcatcgaaactttggcaaacggcttatcaaaagcccgaagctctactttctcgataccggcttattatgctatctgttgcaggtccgttccccggcggaactggttcatcgcgccgagcgtggtgcgattttcgaaagttacgtcgtcgccgaactgtataagaatttcacccatcggggggagcaaccgagtctttttttctggcgcgatgcggccggccatgaggtggatattctcatcgaccagggtaactccctgattccattggaggttaaatccgggcagaccgtggcctcggattttttcgacaatctacgatactggctacacctttccgggaaacagtctgctcccgcggcgctggtttacggcggcgagcaatcgtccaaacgctcaggctcggttgtctatccctggttcgcactgtaacaacgccgcgtcggccggcgaaagcatctgctttgtcggatcgggcgattgcgttatattcaagccatgaacgggctatcgaccgagaggcgacagaagcaggcggtcgggctggcttgcctgttggcggcttcgatgctgacggcggtttgcgccgacgacggggagcctggaacgacttcgtggccggacgggaacgacgacgacgtttaccagccgcccgacgagctgaagatcaccttctatgacgtgggccagggcgacgcggcgctgctgcgttttccggggggctcgacgatgctggtggacggcggcccgaacggggcgggggccgcggcgatcgtgccgaacctacgggaactcggcttggattacttggacatcatggtcgtgacgcatcccgacgccgatcactgcggcgggctggacgaggtgctcgcggcggtggcgatcggcgagttgtgggaaaacggcgagaccaaggatacgacggcctgggacgcgttttccgacgcggtggacgcatccggcgctccccggtgcacggtgtcccggggcgacgagcacacgatcgacggctgtcgcatcctggtcttgaacgccgacgagggttggagcgacgtgaacgccaacagcgtcgtgctttcgatcgactgcgcgggaatcaccctgctgctcaccggcgacatcaccgccgaggcccaggacgacctgatcgctgtttacgatgacgacctggcggccgacgcggtcaaagtgccgcatcacggcagcgccaatcgcgccgcaacctttccgggctacgtgaagccggaggtcgccgtcgtttcctgcggcgcggacaacccttacggtcatcccgacgcggcaacggtcgcggaatgggaagcagcgggcgcaacgacctaccgcaccgatcgagacggcccggtcgtcgttacggcccgggagggcagcatttccgtggaacaagagccctgaagcgagccggcatgaatatcgacgagcgcatcaagcaattcaccttcctgatgcagaaaattctgcacgacgtgaaccgcagttcgtcgcgcgagcagtacatcgagcgggtgtcccgcctgttgctgaccgtgttggacgtggaccggctggaattgcgggtgcgggaggtcgattggttccattggggccgggcggagcggcggggcgggcgcgtctggttcagaagctctcatgtcccctacccgctcgccttcccggccaagcgcctgccgatcgacgacaacgacagcgcctgggaacgtttgtgccgggcggttttcgtggacgagcgggatttcgcgccggggcatttcacggcggcgggcggttttttcagcaataacctgacggcgaccgttctatcgcctctctggccgggcggcgcggtgaaggcgccggacgaggcggaataccgctcggcggcgatcattccgctgcacatcgaacaacggcggctggggctgatgtgcgtggcgtcgcgccaggcggattttttcacggccaacctggtgcacggctacgagtcgctggcgggggtggtggcggccgcgctgtcgcaccagcgggcgatgttcgcgctgcagttgcgggtgaaggaactgagctgcttgaacgagatcgcccaggcgatcagccggccggacgtcgatccggacgagacgcttggagaaatcgcgcggatgatcggtccggccttccgttacccggaaatcgcctcgtgccggatcgaaacggaggaccgcgtctatctttccagccgtttccgcgagggggaccagcgcctgagcgtgccgatcgtcgtccgcggcagaccgcaggggcggttggaggtgaactacgccgagccgcgcccggcgctggacatcgggccttttcttcaggaggaggagcaactgctgcggacggtcgccagccagatcgccctgttgctggtggaaaaacggatcaagacgcggatcgtgacgatggcgcagcagttcagcgcgccgctcaaccgcattttgggattttccgagctgatgctccgggaggaagacgtgccggaacggctgcggtccgatctggagaaggtgcagcgtttttcgatggaagcccgcgagatcgtgcggaaaatttcctcgaccggcgatgagccgccggccggcgacgaggagcgggaatgagcgaagcgctccgtcaaacccggagtctgcgtctgctggtggcggaggaatccccgcacgatctggagattctggagcgccacctgaccgccgcgggccatcgggtgtggaccgcggtgagcgcgatggaaacgctggaattgctggaaagcgaggaagcggacctggtgatcacgggcttgcacattcccggaaagagcggcctggacctggtggccgagatttgcgtgaaccatccgcagtcgcgggtgatggtggtggcgaattacgcgacgatcagcggcgcggtcgaggcggtcaaggccggcgccgacgaatacctggccaaaccttacacgcgggaggagttgctgggggcggtccagcggatcgccaagctgccgccgcggaggccgagcacggttgcggcggccgagcgcgccttgtcggcgacggcggggatgatcggcgattctccggcgatgctcaaggtcttcgccaacatcgccaaggcggcgacgaccaacgccacggtgctgatcaacggcgagagcggcacgggcaaggaattgatcgcgcgggccatccattacaacggcgaccgctcggccgcgccgttcgtgccgatcaactgcggcggcatccccgaaagtctgttggaaagcgagttgttcgggcacgtcaagggcgcgttcaccggcgcggtggagacgcgggcgggctttttccaggtggcggacggcgggacgatttttctggacgagatcggggagatcagtccggcgatgcaggtcaagctgctgcgggtgctgcaggacaaggaagtgtgcatggtcggcgacacccggacgcggcaggtggacgtgcggatcatcgcggcgacgaacaaggacctggaggcgctggtgcgggagcggttgttccgggacgacctgtacttccggctgaacgtcatttccatccaggcgccgccgctgcgggagcggcaggacgacctgctgttgctgctgcaccatttcgcggggaaattcgccaaggaactgaaccgtccgacgccggaattcagcgaccgggtgctcgagtatctgcgcgcctacagttggccgggcaacgtgcgggagttggagaacatcatccagcggttgatcgtgatgagcgagggagcgtacatcgacgcgggggaactgccgatgcagatgcgctcggcgacggggggcggcggcgggtggcgcaaaacgctgccggaggtggaggcggagcacatcgccaaggtcgtgcggcaggtcaaggggaaccggtcgcaggcggcgaagattttggggatcgaccgtaaaaccctgcgggagaagatgaagcgttaccaaattgatgagacataattccccagtcggcactggggaatttcgccccactggggaatttctccccatctccattctccaatattaatcaatcccattctacatcgctttgcgcaggatttgaaaaaagtctttattaataataagttatcctttcaataaaattattgtccaatattgagtaatttggcacgccaattgtattggagaattgccggcgaatgaaacagtgaagaataacaaggagacgatcgccgtgttcaccctccgtttttctccagccgcccttcggccggcccgtacgccgcaaggcgtcacggcgatcgtttccggttcttcagcctcccaacgcatatccggtcgcggcccgttggccgtgaccgccgccccgccgctgctctgcggcggcaaccggggacgctggaccctccggcggcgacaagtcacgggagcggaaggcgcaaagcgcccatcaactcaccagaaagaaaccgttcaaaaccgatcggacgagagaagatacaaaggcgtttgcatgacctgcaagcatcgcgagacctgcgaacgatcgacgattcaagatggcgtctggcattgcgacaaatacgaatgataccgacttgggctattgacgatgtattcacgattcatccagcacagacgacttcagaaacacacgggtcaacccgatcccgccagacggacccgctcgacaatcggccaatggatcgttctctcgctgatcggattttgggggagtatggcgtcggtcgtccccgcatacggcggacaacccatcgacttgacgctcgccgacgccatctccctggctttacaggaaaaccgcacgctgcaggcctcgcaggcggacgtggaggccgcggcggccgaacggcgggcggctttagggcgtttcgggccggtgctgaagatggaaggcaacctgctgcaatggaacgacgcccatgaaatcgacgttttcgactatctcgagctgccgccgacggcggcggagatcgtggatttcatggtcggcccgatggaccccatcgccttgcgcgaggaccgcacgcacagtctgtccttaacggcaattcaaccgctgacgccgatgttttccgtctatcagggctaccgggcgcgccgggccggcgaaaacgccgcccaggccctggaaagccggacgcggcaggacgtgacctacaaggtggtcgaagcctattaccggctgctgtcggtggggcaactgcgccaggtcgcacaggcggcgacggacaccatcgccgcgcatgtggagcaggcgcgggacttcgaggccgagggattcatcgaccgcagccaggtgctgacggccgaggtggaattatcgaactcccaacagaacctgctgcgggccgaaacgggcgaggcactggcccgggcggcgctggcgcaactggtggggctgccgctggacgcggagatccgggccgcggcggacctgccggcgccgggcgatccgacgccgccggagttggccgccgcccggcgggaagcactgtataaccgcgaagacttacaggctctgggttggaagatcgaggccttgcgggcgctggaagacctggggtggtggcagatggtgccgacgctggccctggtcgggcggtacgaatggagcgaggggatcattctgtatccggaagaggaaagcttcatcggcctgacgctggaatggaacttctgggagtggggccgtaaatacaacgaggcccaggctgcccgggcgcgggcgcgtggcgcggcgctgcaacacgcggaagcaaccgaactgattcaattgcaggtgcagcaaaagcgacaggagttgcaatgcgccggggcgcggcagcgcgtggccgagatcgcggtatcgcaggccgaggagaatctgcggctgaagcaactccgttttgccgagaatctggcgacctcgctggaagtgctggacgcgcaaaccttgctgaccaaggcgcacagcgaccggattcaggcgcggttcgaggtgctggtgggccaggccgccctgcggctggccatgggacaggatcccgccggcggtgaagggagcgaaggcgaatgaacacgaggatggcatggggcatattgctggcggcttttctgccggcgttgttcggttgcggcggccgggagcaggccacgacattgaccggcctgatggacgcggtggagatcgacgtggcctcgaagataccgggccggatcaaggaactgcacgtggacgagggcgaccgggtggaggcgggacaagcgctggcggagatcaccagcgatgaaatcgcggcgaagctggagcaggtcgacgccatcaccgaggcggccaaggccaagctgaaaatggccaacaagggggcgcgcgaggagcagatccgggcggccaagcggcagatgatggccgcggagcaccaggtggaaatcacggccaagatgaagcagcggctggccaatctcttggaaaagaaggcggtgccccaagcgcagtacgacgaggtggaattcaagcacaacgtctcgcaagagcagtacgaaatggccaaggcgcaatacgaggcgtacgtcaacggggcgcgggacgaggagatcgaagccttgacggcgctggtgcggcaggctgagggcgccaaggccgaggtggaaagctaccagcgcgagacgacgcaaaaagcaccggtcgccggcgagatttccaaggtggtgctgcacgagggcgagctggccgcgacgggtttcccgattctgacgatcgtcgatctggaaaatcagtgggcgagtttttcggtgcgcgaagacctgttgccggggattcacaaagggcaacgcatccaggtcaccgttccggcgctggaccggacgctggaactggaaatttaccacatcgcgccgatggccgatttcgccacttggcgggcgacggccgagcggaacagctacgatctgaagaccttcgaggtcaaagcccggccgaccgagccgacgacggacttgcggccggggatgacggtgcgctggaccctggagtaagggccgatgcgccgccgcccgccatcgccgctgcgcctggccggagaggtggggcgcggctttctggcgcaggcccggctgctggcccggccgcgctacctgctgatgaccgccttgctgctggcgatgtcctggctggcgatggaggtttaccataaccaggcgatccgcggtctgccggtgctggtgatcgaccgggacaactcgaaaatcagccggacgatccgctcgtttctccacgcctgcccggaaatcgacaccctggaccaaccggacgcgacccgggaagaagggcagcggctgctggccgcgggccggatcgccggcctggtgtacctgccggagaatctttcctcggaaatcaagcaagggcggcgcggcacggccctgatcgaactggacatgagcaacatcgtgatggggaaaaacgcctacaaggccgtttcccaggttctgacgaccgtggcggtgggcacccagatgacggtggtccggaagttaggcgagcacaagagccgcgccatggccaaggtgctgccgattcgggtcagcgaatcgttcgcctacaatccggcgacgaattacggcatttacgtgatgcccggcctgatctttttcttcctgcacgtttacgtgctgattctgggcgtcaccgcctatctgccgatccatccggccgatgactggaaaaaacgtctgggcgcgtttttggcgattctgccggcgggaatgctgctcggactgaccttcttctacggctttctgccttacgagaatctggctccggccagcggaccgggggtcgccgtcgtcgcgctggcggcgtttatcgtgctggatttgctgatggcggcggcattcaacgcggtgattccccgcccgatcttcgccttcgaggcgacggtggtggtgggaatgctgtcactgatgttttcggggatcacctggccgccggacgcgtttccggcggcgatccgtctgatcggcgcctggattccgttcaccgccttcgcacagggattccaggcgttcatccacgcccccacccgcctgagcgaactgggattcatgttccacgccttgggccggcaagcgctgctgttcggcggagtgatcgcggcgggcgccgcggcgcggcggatcatcgtcgcggcgaggcggtcatgaagcggcggacgaccggccggcgacgggcggcgcggctgcggcgccgggttggcgcctggctccgggcgttcggcggggcgatgctggacgaatggcgttttgtggggaagcaacgggtggtgctggtgatcctgatggcgctgcccctgctctatccgacggtgatttcctatctgtattacgaggatcaggcgaccgagcggccgctggtgctggtggacgaagacaactccggcctgtcgcgccgcctgacgcgggcgctgcacgccacgcagggagtggagatcatcgcccgggagacctcgccggccgcggcgcggcaagcgttgcaggcccgtcaggccgaaggggcgatcatcattcccgcggatttttcgacacgcctcaaacaagggtcgaccgccgccgtgaagctttggctgaacacggccaacatgtacacctactccgtatcctatacggccgtggtggcggcggcgaccactctgaacggcgagatcggcgcacggtactttttcagcaagggcatgccgacgtctctggcgtcgcagcgtgtgtttccgatcaaccaggacgtccgctaccttttccatcccaccgccagctacggcaacttcctggtgcccggtatactgatcatcgtgctgcaacaactgatgttgatcggattatgcttttcggtgggtttgcgtcgcgagttgggcctggaggacgcgggcgaccggcggccgttcaccagcctgctggcccggttcagcgcgcagggggtgttttacctgggcgcgatgctgctgatggtgtttttcgacattccgctgttcggctggtcggtgcggaacgcgggcgttctgctgctggtgttcatcggcttttccctggcgatggcgccgctggtgatgctcacggcgcatttctgccgggatcgctacatcgcctttcaactgctgatgttcgtctcgacgccgctgttcatggtgtcgggtttcgtctggccgtcgtcgcagatgccggggtacatccaggcgctggccaaattggcgccggccacgccggcgctggcggcgctgcggaccgtcacgatgaaaagcccggagatcggggccgtagcgcccgatctgctgcggctgctggtcttgacgacggcctatttcacgctggccgtgccgctggtgcgctggacgcacttccgccggcaacggtcgctccaaccatcacttcgggaattctgacggctcgacggtcacctcatcgaccgcgatgaggggcacgttctcgccgccggtctcggcgagacgaagcagcacgcccttgagctgcagccggaccggcgcgaagggcgcgccctgctcggcgaagcggccgccgcagttttccggaatcagcagaaacgccttgattttctggccgtcgatgccgctgtcgtaaaggacctggaaagaaccggcgcggccgcgggatttctcggccggagtcaggatttcccgggcggcgaggtcggcggcgactttccccaggtaatgcaattcggcgccgacgctgattttgccgcccgcgtaccgttcggcctcggcgcgcaaggcttccagggattcgacgcgccggtaatcttccgcccgcgcataaacggtaaggagaaaaaacacagtcagcgtcgtgaccagcgccgatttttttttatcgttcacccttttttcccaacgcaacgaagacgctccgagggtaaggaaagcggcggggaaagtcaatttatcggcggagcaagcgggaaacgcgcctcgaaccaggcagcgaggcgggccgcgcacatccggtggccggcctcgttccagtggacgccgtcggcgccgcgcatcgtttcgccggagcgttcggcctcgaacacggcgcgaccgacgtcgtcgagcaagggcaggccggcctcgcgcgccagttgtcgccaggcttcgtcatagggccggtcgtcgtccacgacaaacaggaccaattgccccggagcgcaacgctccttcatcatgtccagcaagcgcgccgtgatgaccagggattccctgaagagcggatgggccaggccgtcgcgccggatggcgttttcgagttggggtctttttcgggcataaagcaggcgatcggcgcgcgagagcagatagtagaggaagcgggaatgatcgaaagccagcccgtacacccggcgcagatgccggcggggtacgcgttgaatgatccggccgtcgagcgtcaggaagggacggcgcttgttgttgttgtttttgatgctgcgcacttccagctcgtaatgattgttgatcaggtcgttgcctgaggtctggagcagcaccacgtcgggccggaggcgttcgacgtggcggtcgaggatcatccattcctgcaacgtgccgtagccgagggcgccgtaggcgaagacttccgcccggcccgcccagcgtgcggcgagtaatccggcgtaggttttatcgtcggagacctcggcggcgtgggtgaaggaatcgccgatgacgagcacccgcagccgtccagcggcttgcggatcgccggcccggcggaagccgtgggcgtcggtggagaaatcgacgggataggcgacgccggcggcgtcggttttcattttttggaagcggacgttttcccgggcgcgccagccgagatcggcatccgggacgatcaggagggaatcggggctggtcagcaagaggcgcagaacgatttccccggcgacaaagagaaacgccgcgaagagcagcaaggcgacgagcgtatagagaagtcggcgttttctggtcatgggcttcttttaccggagtggtagtccggggtaaagccattttcccagccgagggcggctgggccacatgcagcttttatcccagccgagggcggccgggccacattgcactcagaaataagtgtaggagaaggtgcccatccagagaaaggtgtcgtcgtagagggggtcttccttgaagttgtacttggcgccgagggagacgttgaagtggctggtgacgccgcgcagactgagcagcacggagttgatatcctgctcgttggtagtgccgcgcatcagttcgccctcgtattcgagcatcagttcgacgaaattacggggatggaggggaaaaatgacgccggcgtgcaccaggccgctcttttcctcgtaggcgcggtcgtcgacgcccacatcgcgaaagaccatggtgccgtcggccatgatggcgaaggcgtagtcggtaaaggccaggtcgttcagttccagccccatggcgagcatcaccttgaaaccgtagtacttgacgtcgccggtgcggtattccgtcgtttcctcgcggccgcccgagtatttttcctcgacgtcgcgggtgtattcaccggtcggcgcgatgccgcccagggcgacggcgaaggccggcagaaaatttttctgcttgaggaacccccatttgaaggttccctcgaggccgccgaggttggacatatcctgggtgtcgaaattgcggaccttggcgcccacgaggttgaagtggcttttaactttcaggttggtcatgacccagggaaccttcagggcgaactccaaaccgcccggaatgccgacattgaagaggaaggaatactcgcggcggtagtattccggcacgtcgctgtcctcccagagggcggcggcgccgacttcgaaggagccgggttccagagtatgggtggacgaagtgaccatcatgccggaaaggccgtagatattaaaaggcaaattattgattttgggtttgggcgcggcgatctgcccctgcaagacgtcttcaggaaccttatcgaattcctgctgggcccaacccggacaggcgagaaagataaaacaaagcgtgattagaatatacttagcactatggaacattaaggctccattcctcaccagccgactgtggcgctatcttggcacgtccggggcgcgaccgtcaacaggctcttccacccgggttgccggccggccgacggcggtcatttggtccaataaatcgcggacttcgccttccgcaccccgctcagccagttcgatcagtcgttgcaggctcgcctgaaagttcaggggcaaatcgcgcggtttgtcgaggcgccggattttttcatgggcggtgtcggcgatgccctccgcctcatcccagagttcctcgcgcagtttttcgccgggacgcagtccgacaaacttgatttcgatgtctcgctccggctcgaatccggaaagccggatgaggttgcgggccaggtcgaggatgcgcacgggttcgcccatttccagcacgaagatttccccgccgtcgcccatggccgcggcctgcatgaccagctcgaccgcttcgggaatcgtcataaaatacctggtcatttcagggtgggtgacggtgaccggcccgccgtcggtgatctggcgacgaaagagcggaatgacgctgccctcactggccagaacgttgccgaagcgcaccgagagaaagcgggttttatcctgccggcgggcgaggtccagcacgacccactcggccaggcgcttggtgcgtcccatgacgctcagcggccggacggccttatcggtggagatcaggacgaacttggcgacgccggtggcgacggcagtttcggccagaacgcgggtggcgcggacgttgttgatggttgcggcgacggcattggattccatcagcggcacatgcttataggcggcggcgtgcagcacgatgtccggccgttcgttggccagcaggtttcggaccaggagcggatcgccgacgtcgccgaccacgggcaataccgggatggagggccagcggtgattcaactcccaattaataaagaaaaggctgttctcgttgcgctccaggagaatcaggcgggaggggaacagcgaggcggtctggcgggccagttcgctgccgatgctgccgccggcgccggtgatcaaaacccggcggcccgaaaaagcgccgcggatgagttcctcgtccaggtggacggcctggcggcccaggaggtcctcgacgtccacatcgcgcagttgcttgatcgaaacctgaccgtcgaggatgttgccggcggcggggaccatgcgaaagcgcacgccggtatcccggaagcggtcgagcagatcgcgtaagtcgcggggccggagggcgcgggaggcgatgatgatctcatcgatgccgtgccgcagcatgatctggcccagttcggcgcggccgcccagcacggggacgccgtgaattttaaaacccttcttggccgagaaatcgtcgatgaagccgaccacctgcatattgagccggggattgccgcggatctgcttgagcagttcgacgcccatttcgcgggcgccgtaaatcaacacgtggcggcgcaggctgcgcggcggcaacttgctcttttcgcggaaagcgcgcaggaaaaagcgcacgccgccgagaaaagagatgcagatgaaggcgtcgatcaggaaaaccgaacgcgggaaacgggtgtagaaaacgaacatcaccagcatgatgaagacgagcgtgctgaccgccaccgccttgatgatgccgagcatgtcttccatgccgaagtaccgccaccaaccgcggtagagatcccagaaatagaaggcgacggcgcgcagcagcaggatcagcggcagggttttgagcatggtgtgcaagggccaactgttttcgacggtcagatcgaattcgaagcgcaggaggaaggaaagaacgtaggaaacgatgaccagggcgagctggctgaagatcgtcagcttacgccggtgacgcagcagccaggccccaaaaggggtgtcgaaaaaatggttgtcgaccggcagttccttttcgctcaccgacttcctctccttccgggcgggtatcatagaccaaccgggccggttcgcgccacctccccgacgaggccccagactggtcattgccgtcgtggtcggtataatggcggcgatttatcacggaggaaaaaagatgacgacagcggaaagcaacctggccgtctttatcgactttgaaaatctggcgctgggtttcaaggacaagaaaagcaagttcgaaatcaacaaagtgctggaacggctggtggaaaagggcaagatcgtcgccaagaccgcttatgccgactggcaccgttacgacgactataaaaagcaactgcacgaggcggctatcgccctgatcgagattccccgccgggcgatgaccggcaagaacagcgccgacatccggttggtcgtggacgcgatggacctgtgttattcgaaagatcacatcgacacctttgtgatcgtctcgggcgacagcgatttttcgccgctggtttccaagctcaaggagaacggcaagcgggtgatcggcgtggggatgaaagactcgacctcgaacctgctggccgacaactgcgacgaattcatttattacgaggacttgatccggcccgacacgaagaaggatgttttggacaaacggattcccgagaagaaacgcgaggccttcgaactgatgatcgcctcgatcaccgcgctggtccgtgaaaacaaggaaatcctctggagcagcatggtgaaagacacgatgaagcgcaaaaagcccagtttcgacgaatcctattacggctaccgcaccttttccgaattactggaagacgcccagagccacgacatcatccgcctgaaaaccgacccgcgcagcggcacctatgtcattgtcggcctcggttcccgggccagcgtcaacggcggttgatgttttcaaccttttcgtcggagatccttttctttcccgtgtggcggcgacacccttgccgtccgatacaaggttttcgccgtcatctttatctccaagcgggcgcccagccggacacactatagaaaaagggcggccttgagcgggccgcccttgttgtggaacagtctcagcagcgattattcaccgcaattgtcggcgaaacactgggattcgcatgcctggaaaatatccaccgtgcattcgttgtcctgcatcatgcaggtctgaacgcaatccattaatgcatcgacatcgccggcgcaggcagccacgaaaccgttgtcctcggccaggcactcttccatcgaagcatagtatcccggatcgcaggtattcacgacgtagtcgcaaatatcgttttcgagggtggagccgttgtcgtcgtcatcggccgcgtcatcgtcgtcggccgcatcgtcgttatcattgtcatcatcgtcgtcatcgtcatcgccgcaagcaatgccgatcgccaaggcaaaggcgaccaacagggcgataattgcataccatttcatcgatttcattagtaaagcctcctgtagtcttgattattcggtttcttggaatgaaagaacacattaccccgcagggttaaaggctttgtaatggtttttcatttaagaatcaagtcatttggctgcgactacgtctcaatataagatataaaatcattccactcaggaggcagataccggcgatcggccccatcaggcgcaccgctagtaggtcgagtttaccccgggaaagttccgccaggactccagccagcaggatcgccaccccgttcattccttgaatgaccaaattatagacgccgaagtaaaggccgatggaaccgccgccggtctcccgggcgcaagcgatgatcgcctcgccctccaagccaagaaaaatcgccaccatcggcccgcctaaggcaaaaaggagcatcgccggtccggaaccacggtcgtcgccaagcagggcggtcagcgcatacaccacggccaaggatacggcggcgccgacaacggcgcgctcccacccccacctggccgagattttcggagccagcaggaaacaagggatcgccacgaccagcaacggtcccaacagcaacgccaccagttccttatcaccgcccagcagatccaccgcgataaacggcgcggcggccgtcatgatggtgaaagacatctgcgatccggaaaacaacaggaccatggcgagaaaacgccggtgtttcaatactattctcagcgattggccgacagaaaggctttcggatgccgtagcctgtcgttttgctccaactcgatccggagcggcatagtagggtaaaatcatcagaatcaaggccggcaccgccagataaacggcagcccggaaaaagccccatctctgcaccagcaacggactgaccacaaacgccaggcccgtggccagcaataaaccggcgcccaggatgttcgacagcgaacgacgcaacttgtcgttatcattggaataatcgtcgataaggctccaataggggaccgcgtacatcgtgtaaccgacgacaaaaacaaacatgcccccgctcaacagcaaccagcgtaaactccgcgacatctccggcgaaggcaaaaaacacaacaacaatcccaacgaagggataaaaaaggagaaccacagcagactttgccgtcgatgcccgcgccgcacccagccgtcgctgaccatcccggcaaccgggtcggttgctccgtcgaagatgcgaaagaccagcaacaacgccccgaccgcagccgcagaaaacaaagttgctcggccggcgccggtcgagtccggaatttccgtggcggcaaaggcgatgatccattggtaaaaatagcgcaccagagccatgatgccgatctggccgcacaaataaaagaagcgtttcttgagattcaatcacctttccccggtctgacttccgcaggagcttattaaatagcgagggctcccacaatcgggagccctctgcgtttcacacattgaataggatggttcgcgtctatttctcgtccagcacgacaaattcgacgcgacggttcattttccgcccttcggcggtgttgttgctggcgatcggctgggtttcgccgaagcctttggcaatcagggcgtcttccggaatgcccttggaaatcaagtattggcgaaccgaatcggcccgttgctgggacagcaccaggttcttttggtcattcccgtcggaggaggcgtgcccttcgacgcgtactttcttgatttcgtactctttaatggcctgcgccacctgatcgagcaattcgaagctttcgggcaagatcaccgcgctgccgacccggaattggaccacttctttaatcaggatcttttccccggtcacttgcaccttggtgtattccgggcagcctttgttggctttggttcccggctggttcggacattcatcctgcaagtcgaggacgccgtcgccgtctttgtcgccgtccgggcagcctttcaactgctgcaggccgggttcgttgggacacttgtcgtttttgtccaagacgccgtcgccatcgttatccaactcggggcagccgtccttgtccttgtaattgtcgaaatcctcgggttgattcgggcactgatcgacgtcgtcgttgatcccgtcgccgtccgaatccttaacctcttcaaccttcttttccttctttccgcaaatcggctcggggaagtatttcaggccggcttccacccgatagtccgggctgccgtaaccattggtgatgcccgcgccgccgccggcgtgcaccgcaattcctttccagatgtgcacttccgctccggccaggaattcgatcgggtttttggtttcacgactccaaggctctttcagaatcgtgcggttatccagttcggcaaacaccttgtaacagggcgttccgaccactttccacgccagaccgagccggtggtccaactcatccttgatcttgtgctcgttcaaccggcgggtctcatcccgaaggatgaagtccaggttataggccaggatgaagtattcccattccacatcgacgattacgcccgggaaaaaggttaacccaccatcgctggttaagctgtccggtccgaaaacggggacgtccatgccggctttgagcgccacgcccaggatgtcctcattccgtttcaggaagctgtatttcagaaagaattgccagtcatcccatgcctgtgcgcgcattttagggatgaattggttgatttcctgttcgatataagcagggcctttaatcgacaggtccagggaatccaggatgccgaaagccgcgtaaaggttctgatcccatcggttgttgaccatatccatgaccgaatcctggtcttcggcccacatcagcggcttgttcatgaacacggagtagaaacccacgccgtatttcagttgacccaggttcgtcgttccccacacggagccgaagccggaattatccaggttctgatgccagagttgaatgtccatgccgacgtgatcggaataggcccaggtgacggcaaccggcagaaggatcagcaacgcaaccaacggcaaagcgcggcgcaacgccttttcgcgtttgcgcagcaggaacacgccgcccagcataccgagcatcagccagaaggacatgccgccctcgccgttctcggccacgctgcatccgccgccgccgccggtttcttctttatgcccgctgccgcagccgggatcgtcgtcttcctcgtcctcgccgccgctcggcgtcggggtcggcgacgggctatagtcgtcatcaccgccgggcgtcgagtcgtcgtcgccgggagtcacgtcgtcgttgtcgttattgtcatcatcgttgtcatcgttgtcgtcgttgtcgttgttgtcgttatcgtcatcatcgttgtcatcattatcatcatcgtcatcgtcatcggcgcagggatccggagcattcgcaaagctatcggtttccaaaccggtcgcatcgcggcctccggcgatgaacagaccatactcatcatcaccaccgcccgcggcgcggaaagtcgcgccaggcaagctgattccgcaatcggaccacagatcggccacgggatcgtagacatagcaggcatcagtcggcgtatccgtgctgccatcgacgccgccgtaaacaaacagtttaccgcaagccaccgtatagccggcgccccacaacggcagcggcatggcggccagcgtcgaatcccatgtcccggccgcgatgtcgtacgcgtccatcgtcgccgtggccgtggcggtcccatcgaaaccgcccgccacatagaatgtgccgtcaatgacgccgcccgccgaccacatccggccgatcggggccgccgtcagggcggtccaggcatcggccacgggatcgtaggaagcgaagttggtctggccgttgggccagatattcggcgttgtgccgcccatacggtacaacagcgttccgtctgtcgccgtcacgtagccgcccgaatcgttcaaggcatccgcgcccgtggtccaggaatcggttcccggatcgtaaatttggaccgcgttgatgacgacgccggccgtatccaggtcatgaccgccggggaaatagagctttccgtcgatggccacgcctccggtcacgtaaagattcacactcggtccgatgccggtgccccaggtgccggcgacggtgtcatagatgtacagattggtgttcggcgtccagtaccaggaatccgtggcgccgaaggccaggtagtattttccgtcaaagaaaaagccggcatggtcgaagaccgtcgtcgggatgttcggcaggacgttgaatcgtttgatcgccgtcgtggtcagcagcagttcatcgacgtagccgcccgtcgaagccgtcaccccggcggtatcggtgtcgccgcccatggcggtttcgggaaccgcaacggtgacttcaaaatccccggcggcgccgttggccacctcgatttcagcgggtcccgtcgtcggccagtcgaaaccggagtaggtcaggccgatgatggctttggagccggaattgttgaagaccgagagttcatagacgacatcggagccggccaaacccgaggcggcgacaacgccccccagataaatgcccggttcgttcgaatcaccgctgagcgtaatgtcgtcgattccccaataccaattccagcccccggctacgtatgtgaagcggaacatgacattggattgtccgttcagcgccggcagttcgtaaacttcgacgtttccttccacacttgcttcccacccctgcaccggaacccagttcacgccctcgtcgatcgagtagtgaacccaggccgtatcgccgctcaaaacacgaaagtaatggctgaagctcaattcaatgttgatgtaatccgagcaattgatcggctcggtgatcaatgaggtgttcatcgtggtgccgctgccgcaggcgtcggaattagcctcgacataatattcatcaccgaagtaagccaacggcagagtgccagttccggggctggtccagacgcaatcccctccgttgttcacattcgtccaatcctcaggaatgccggcactgaaatcttcagtgaagaaatccaccgcccaggccggtgaaatccaaagcgacacgagtaccaagaacaaggcaaattttttcattcttttcctcctggaatgatttccttcgttgtcgatcctcaacgagttttattcgtgagggtgcttttcacaatttttgtctcgataaagcctgtaatcaccacaagttgcaccctattatttttctataacacccttaagtctggcattacaatagaatctcttttactcaaatgtcaagtagagtttcaattttccacgacctgggaggacgaggaaattcagcgtttttgaatgtcccttcaagcaaaatcaagcttggcggctcattcgttagatgttaatgtacactgcttttcgaggatcaacagttacaaggacaatccatgaaacggcttcctttcttcctcctgctggtctttttgaccttcattccactgtcggccgcggcgtttacgctgctggacatgcaaccccaatacgatcgttacgtggttcatcccaacgaaccgctgaccctggtgttcgacgcttcgttggacgcgaccacggttgccgcggacagcgtgaccgtcgccaacctgctcagcggcgaggccgtgccgggaacgattgcgctggccgccaccaaccaggccgacgacacgctgattttcacgccgaccgcgggtgttttcccctttggtcgccggttgcaggtcggcctcaatgaatcgttgctcgacctgggcggcgccggcttcaccggcgagttgccctccgggggcgtcttcgtcgccaacattcccaacgacctggacgtcgtggcggattatctggaacaatgcgcctcgtactacggttttgatccgaccgatccggaaaacacgaatcccgaggaatattatcgcattccgggcatgtcggtgaccgaagcctggaaaatgacgaccggcgatccgagcgtattgattgccgtcatcgacgtgggcaacgagggcttcgccaacactgaatttgcggaaaacgtctttttcaatcgcggcgaagtccggcagccgcaggacgcgggcggcctgtgcccggactgggactgcaacggcgacggccgcttcaattatctggactatataaacgatccccggtttgcggatttcaatgaaaacggctggatcgatccggatgacgtcttcaccgccttcaccgacggcgtggacgacgacaacaacggcttcatcgacgacatcagcggctgggactttttccgcaacgtcaacaaaccgttgggcgttgaggaattccccgaggggacgcacggcgacggcatcggccgcggcgcggcgggtctggcgaacaacggccaaggcactccgccgggggtctgccccgattgctcgctgatgtggattcgcgtcggcgacgcggtggtcaccgagggcaatctgatggccgccggcatcgaatacgcgaccatgttgggcgtagacgtggtggccatcgccaacggcatgtacaactacagcagcctggcgcaacaaaaattcgtcgaggcttacgaagcgggcgtcttcgtggtggccgcctcgggcgacgagttgggcatgcaccaggtgtatccggcggtgggcgacgacgtgtacagcgtcaaggcggttctgcccttcgccccgatcgaacttttcgggccgatcgacctgtcgttgatcgccttcaccgaaagctactgcacgaactacggagcttccgtcgaagtatccatttcctccgaccaatgcacttccaccgctacgtcgtacggcgccggcttggccggcctcatcctttcctgggcgcggcagcaaggcgacgacctgacacccggcgagatcaaacaactgctcaatatgaccgtggacgacatcaagtcgcgttgcttttcctttaacctgggcggctgcaaggaaggcttcgaccagaacttcggttacggccgcgtcaacctcgaacgggcgctgcaagcgatcggcgacccgctgttcggcctgcccgaacgcattccgcccgtcgtgcgcggcaccagccccgcgtggtgggcgacgatggatcccctgcaacaaccaaccttcgacgtcgaggcgcagatcgacgcccgcggccggtcttatgaatggaccgtggaactgggtttgggcgtcgaacccgatgacgacgagttcttcgccgtgacctccggcagttccacgacagcgacggacggcgttttggcgacgatcagtccgctggattacgtggatgaggaatggctgcgccgcgatccgaccgacaagaacgactttaccgtaaccctgcgggtgcgcgcctggtgggaagcggacggcgaagaggtgctcggcgaagcccgcaaagccatcgcctggcacaccgacgatcaggaagggaccggcctgctgcccgggttcccgctggatctgggagcctcgggcgaatcgagcccggtgctctacgatctggacggcgccctggacaacgcgctggaaatcatcgccgcctcatcctggccgcgggtggaagtgttcaaacgcgatccggacaccggcatgtaccagccggcgcccggtttcccggttgatttggacgccgaccgcttgtttcccgattcggtgttggcttcggtggcagtcggtccgttattcggcgacggcgtgccctacatcatcgtggccggctactacggccgggtatacgccattcaccccgacggcaacctgcacgatggcggtcccttcctggagggctttccggtcgacaccgatgtcctggataactccacgccgttgagctacgggcacggcaacgcctattgggcaagtccggtgctcgtcgatctggatatggacgggcagttggaaatcgtcgccgcctccgccgaccaaaaggcttacgcctggaaaccggtcgacgaggatcaggacggctccgccgaccggctggccggctggccggtgccgttggattccagcgccgaagccggtctggttccctatttcgacagttgcgaggacagcggtccggccccggtgatgggcacgccggtggccggcattctggatccgactcaccagaacgccgacatcgccggacaccccgcgatcatcgtggccagcagcgagacgtgcaacgaaggtttactgcccaccggccgcgtctatgccatctattggaacggtttggaaaatgccgccggccccttcctccccggctggcccgcccagccgttggcgccgctgggcgacgcgctgccgattccgccgctgacgatcggcatgacctcctctccggcggcgatcatctacgacgaacaattgatggtcggcaccggcgcgtttttctggttcccgcagttgatcacctgggacggcgcggaaacgaaaatccgtcacctgaaatccaagctcaacctcggcagttcggccgccggagccttcgcccgtttcgacggttccgacataccctggtacttcttccccagcgtcggatttctgcaactggacgggaaggccgtcggaccggccctggaagccttcaacatcaccggctggaagctcagtgagttgaacgacgggcccgccctgcggcttcgactggacgacatcaacttcttcatcaatccgatcgtggccgatctcgacggcgatgccctgccggaaatgatggccgggagcggcggttatcggctgcacgcggtcaattaccgtaaggaacaaccggccgattggccgaaattcactcattcctggcaaaccggcacccccgccatcggcgatgtggacggcgacggcctccatgaagtggtgtccttcacgcacaacggcaagcttttcgcctgggaaacaaccgggaaatcgtgcttttacgacggtcccaacggcgattggcccaagtaccaccacgacgcccacaactccggtttttacggtttggacgccacgccgccgggattgaccaccgacctgaccgtttacttcaccgatgttgcggacgttttcgaagtgactttcaccgcgcccggcgatgacggcgcctgcggcacgccggacggctacgacctgcgctacacgaccgatccgagcgccgatctacgcgatccggacgtctggcagtcggccgccgcgctgaccaccggcgcgccggaagtcggcggaatgccgatgagctttaccgtcacggcgcccagcgccgcgctcttcgcgctgcgcacttacgacgaggtcggaatgatgtcctacatttcgaacgccgccgccccgaccgaaccgggcgccgatgacgacgatgccgcggacgacgacgatgccgccgccgatgatgacgacgacgacaccgtggcgccggccccctccggcgacgacgatgacgacgatgaagggtgcggctgctgacgcatccgtgagctgaaaaagtatcccgtgcggctgaagccccggcgttgaccgccggatctttatgccgtaccgcaacaggggaatgactattcacccactccttgcctgtttcatgggtttttatcgcccaatctcctgattttcatcgcacccagccacatttccatcatttttccatggttgcgtcataaaatttgcacatcgatccggtatttatgcctcgaaggaggtaaggacccatgaaatccggcgagaaaaattttttttgcacgacgatcgccttgctgatcgccgccctgatctggatatcctgcctcgggcgatattaccaccccaatccggccgattatcgcgtcgagacgggcatcgccccgaaagcacacgcgttggccgcgcgacacctggccatctggatggacgaggcgacgaggaatcgcgaactggcgcgaatgttcgaggtcaatcccgagtgggattttatgagccgcacctttttcgtcctggccctggccaacatggcgctgcgcgatccggcaatgcaatcgcaagccctggagatcatcgacacgattatcgacaataccctgcgcatcgaacgtgaacggggcttgtatcattttctgatgggatattcgaaagattcaccctgggtgatgcagccggcgcgcagccaatttgtcgacggcgaaatcgcgatcatgctggcggcgcgccggatggtggcggaaaagcccgaataccgggcgccgctggcggagcggatcgccgtgatgatcggacgcatggagcaaagtcccgtgcttttggcggaaagctaccccgatgaatgctggctgttttgcaatgcggtcggtctggcggcgatccgcatgtccgacgcgctggacggcaccgaccattccgccttcctgaagacgtggatcgcgacggccaaaaccaaattgctcgatccgcagaccggcctgcttatcgccgccgccaccgttcggggaacaccggcgcccgccggcgaacatccggaaggctcgaccatttggctggtcaaccacatgctgcaactgatcgatcccgatttcgccgccgatcaatatcgccgggcgcggctcgaactcggccgttccatcgccggcttcggctacgcccgcgaatggccggcgatgtatccgacgcaacccgatatcgactcgggcccgatcgtgccgttgctgaacgccagcgccggctccagcggtctggccatgatcggcgccgccgccttcggcgacgcggattatttcacccgattgctggcttcgctcaattttgctgctttcccggtggaagaaaacggtcaattgaaatatctggccagcaatccggtgggcgatgccgtcatgctatatgcgatggtcctcggcccgctgtgggccgaagtcgaacggagggccgaatcatgaattggtcgctattcaagccgctccgacgccgccgattggtggtttatccgatcatcttcttcgtcctcttgattgcggcgcacctggccggcttccgcgagcatttgcaggtgctgtccggcgcctgcggcttcgttccctggtcgatgtttcagggcgcagcttacttgatattgtattttctgtgcctgatcgcatcgccgatcatgctgctggccgccgccctctcggcgatggcccgaatggtgatccgccgctcatcccggtgaattcagcaactgcaggcgtcttcatcgtcgtcgtcgtcatcgtcatccgacggtgattcgtcgttatcatcatcattaatatcatcatcatcgtcgtcgtccaccgcgtcatcatcgttattgtcattattgtcattgtcgtcgttgtcatcgttgtcatcgtcgtcggccggttcgccgagaatgccggcctgttcccccaggtaggcgacgaccagccgcgcaacgttgttgcattgctccagatcgagacgttcatacgtatcgtcccagtgcataaagccgctgagttggtaggcgctgcccagaatataggcgtggtaaccgaaatcccagaaactggcgtgatcggacgagtcgttgccgggccagaccaccccgacatgcgccgtccccgccgggtagacgtgggccagttgattcatcacctgaagatcgggccaggagggataattggaactggacaacgccgcgttgattccctccagacgccagccgggcagatcgaggttgagcagattgcggatttcgtcctggcgattgaaggacgcctccgcatgcactcggctgcccatgtgaccgctttcctcggagtcgaaaaggatgaaacgcaaggtttgcgcgaaggtgtagtcgctcagcacccgcagggcttccaacacgatgatcacgcccgaggcgttgtcgacggcgcccggcgcgtaatcgggatcctgggtggaatccagatgggcgcccaccatccagatggcgcctggatcggtctcgcccgcgatttccacatacaggttgctgcaactcaggtccgtgcgacagtcataggtctccacttcgaaaggcaaaccgatttccgtcaaccgatcctgtaaaaaatccagggctttgtcgtgatccgggtggtcgatatcacggctgagaatgtattcgccgtgatagggatccacgccggtaagaatccgggcgtcggcatcgatgcgcgccgggtcgattttcccgtaagcgtcgaggatttgcggattggctacctgggcccgggcgattccgccgcccaccgccagacaaacgagcagcaaaagactccattgcacacatgaccgctccatgatccctccatcgaccgtcatttcattatcaacattcgctccagcgctctccgtaacattctaccacaacatcgccaagaaatgatctattcaaaatcgactttcaggaaaacatcggcagcttctcggcgcaggcggtcaaaggtcaataaatcgaggggcgtcgccaaacccgcatggttcaatctcccggacaggcattcccgggcgatcatgaccggcaggcattccatcggggcggcgccgtcccgcagcagcaccgtgccggtgcgcgtcgatccggctccatagaccgtgacggagagaagcgcttcgcggcggaaaccggcggcgacggcgcgttgttgttctttcacgttcatcgggcgcgcgatggtttcgatcaggcgataagcccatggccgcttctgcggctggagcaggcgaatcaacccgaagatccaggtcggttgctcgcccaaatagaaccaggtgtgcaattcgcgcaggggaaagcgtgcggaaagcgccggcgtggcgatcgtcgggacctccagcagccggagccggccgaacggaaaaggcagttcgacgtttttctgcgaatcgccgagccgcaccggctgatccttgccgccggataaggcgacggggcggtacccggcatccaaaacgccgctcatcatcgaggcgagtccggaattcgcataggcatgttgaaattgggcgaagatgatttcggcggccttcgcccagggcgcatcctccagaagtctggcggccagcagcgtcgatacgccgggaatcgcgcccgccccggtggccaacagcagcccgtttcttcgggcttcggcgtccaactcgcgcatccgacggtaatgcacctgttcattggcgcaatccacataggggcgaccgcactcgacggccaggcgggcgatcgccgcgccgtggacggcatagggaccgatcgcattgatgaccagggccgattgttggaaagcccgccgcaaagccggttggtcggtcgcttccgagatcagcagttcgatgcggtctcttccctcgctcggtaaaaccgccgtgagtttttcagggttgcgtccggcggcgacaactcggtaaggggttcgcttgatcaagccctcgacgatcgtccggcccgccagaccgttggcgcccaataccaaaatcgactggtcggaaatcttcatcggttcattgcacctgatgcgtcttccatcaacgccaaaccacattcaatcaatcccgtaccccgacaattgaacatagcaccaaacgccggccggcaacaggacatgaaacggggggagggaggggattgcgcggtacgggcttttcatttctcatctccagccggttgcttcacccgagtaaatgaagcttttcacctccgtgcgcaatggccgattaaatagcggctgccggcccgaaaaccggcagccgcgggaggaaatgggactcgtatcaacatcaggcgggcggcgtcggtgtcgccgcgtcgcgccccggcacgcactcagtcaggcttgcgtttgcgcaggaaagccggcacatccagatcgtaggcgtcttccgcggcacgcagatcgggtgtttctttttccttgagccgaggatccagcccccgcggcggattgagccgtgcgcttcccacgtttttcttgccgaaatcgggccggcggatctggggctcgcggcgattggccggcggctgctcgcgtccgccctgttcctcctcgcccttgaacggttcgggacggggaatgttttgggaggtgaacgccgcgtggtattcggactggctgacatgatgggtggagcggttcagataggtcggcaccgtccgttcgatcatctgttcctgggcttcatcaaagccggtggcgatcaccgtcacgcggatttcctcgcgcaggttctcgtcgatgacctgtccccaataaatttccgcgtcgcgcgagcaggatttcatcaccagatcggccgcctcgctgacttcggccagacgcagatcgaaaccgccggtgatattgatcaacacgccccgggccccgtcgatgctgacgttttccatcaacgggcaactgatcgcctgcgccgccgcgtccacggcgcgcttctcgccggtggcctgaccggtgcccatcagcgccagttcgccggagacgttggtcgccttcatcaccgagcgcacgtcggcaaaatccagattgacgtgaccctgctggacgatcaggtcggagagcgagcgcacgcccttgagcagcacgtcattggcctttttgaaggcatccatcaacgtcgtgtcgctgccggccacggccagcagtttttggttggggatgacaatgatcgtgtcgatctcatcgcgcagccgcttgatgccctcctcggcgacggtcatccgccggcggccctcataatggaagggcttggtgaccaccccgacggtcagggcgcccatttcccgggccagcttggcgatcatcggagcggcgccggtgccggtgccgccgcccatgccggcggtgatgaagaccatatccgcgccctcgagcacttcccgcagggcttcgacggacttctccgcctcgcgcaaaccgatttccggattgccgcccgcgccgagtccggagcccaacgacaccttgatgccggccagattgttggccaacacctgcttgtcggtgttgcaggcgatgaactcgacgccctgcacattgtcctcaatcatggtgttgatggcgttgttgccgcagcccccgacgccgatcaccttgattttggctccggcccgttccggttccacaatgttgaacttgagacccatgataacctcccttgttgggggcttttcgcccccgtgccgcgtaattcaaacagagatcacggacttcccaacaatccggtgatccttgatttcacaccttgcaacatccgggaaaaccagatcggtttttcctcgtcccagggcgtcagattgacgttgtgcaaacccaacagcaccaagccgacggccgtggcgttgccgggactggccaccacatcgaccaggccgccgatatgatgcggtagaccgatacgcacccggcggttgaaaatcgaccaggccacatcgtcgattccccgcaggtgacaaacaccgccggtcaggaccaccgcggcgacgctgcgatccaggtcttggcggataatttcctcgttgaccaattgcaggatctcggccacccgcgcttcgatcacctcgcacagcttgcaatgatcgatgagatgggtccggccgttggcgccggcctcgacctcgatttcgtcgcccgggatcgcttctcccggcagacaatggccgtaacgtttcttgagccattcggcgttggacgctgaaatattcatcatctgggcgatatcattggtgatgtgattgccgccgacgggcagcaccgccgtatgcagcaccgcgtccttcttcatgaccagcaaatcggtcgtcccgccgccgatatcgatgaccgccacacccatttcccgctcatcggacgacaaaacagcctcggcgctggccaacgccgaaaggaccaactgatccacatccacgtcgcattgcttgcaacactgccgccggttggccaaagaggttttcgagaccgtgacaatgtagcaacgggcttccaggcgcatgccgcgcatcccgatcgcattcttgatgccggagacctcgtcgagcatgtattcctggggcaggacatgcaacacctcggattcctccggaatcgtcaccgattgcgtgccttccacgacacgccggacgtcctccgccgtcacggtgcgaccctgcaacggcaacatgctgtcgctgttgaaacccttgacgaagctgttggagatgctgacgttggccgagcggatctgcacctgcgccattttctccgcttcctcgacagccttggagatggcttgggcggtcttgttgaaatcccgaaccacgcctcgccgcaaaccgacggaaggatgcgtgcccaggccgatgacctcgattccgcgatccgtttcctcggcgacgacgacacagattttcgtcgtgccgatgtccaatccgactactaattcgccgttcttgttcttcatgctcccgaaccccttcgcaggccgcgcaccacgaccttaccggccacggccaaatcgacgacacggacttgattcatttgctcacccaaatgctcggcgaccaaggaaaaatgcctaagcttgcgctcgtaatccccgtatccgaagtgcaccagcatccccgtttgcgcggtggtcaacgagaaaccactgaccgtatcgaaaccgatttcactgacgcgctcgtccggaaagacgccggtttcaccgcccagccgcaacaactgcaccgcctcggccacccgggcggcctgatggctggccgaagagccgcccgccgcgaaggagtcgccgcggaacccggtcagcacgggcaaatcgatcggatcgccgctaccctgccgcttgaaaacaacgccgcgctcgtccaccagataaaggccgccggcgtgcagcaacgccacggcatgccgctcccggatgtcgacgaccatgccgtcgggcaattcgcggcgcacggtggcagcttccacccagggatgcgaaacgacacgctgcgccacgtcgttcagatccactgaaaaaatgttttgccccagccgcgtatgcagaaagtccagcagttcctcgcgcgacacttgctcttcggtccggacgtcaatccgggtcagacgaaagtgatccgcataacgcgtttgatgccagacggttagcccgatcgccagcagcaacaccaccggccaggcccgccaggcgtgggctttaatgaacgccgccgcccaatgccaaaccgggcgcaacggtttggcgacacccgcggccgcccgtcgcagggtcttgaccaggcgcccccgataatttttgggaggcgtccgccgcttattgggtctggttttcgcgcgcctcgacattgtgctccaccgtcaaaccggcgactcgattttcaagcgcgccgtgttcaacaccgtttccaccaactgctcgaacgccatcccctgccagtcgcgggcaatcatcggcaccaacgacaattcggtcagaccgggcaaggtattgacttccaacaaccaaggctgcctctgttcgtcgaggatgaaatcgacacgcaccacgccctcggcccgaatcgtttgggcggcggcgacggccaggttctgcacctgggcgacgacattgtcgtccaaaccctcgggacgggtgatgtagtcggtcatgcccttggtgtatttgtgccggtaatcgtaaaaagtaacgctttcgcccggcaacttcttcgggcggatttcgaccaggccaaacgcctgttcacctaaaacggccacggacaattcgcgcccgggaatgtactgctccaacagaacgcattcgtcgtagcgaaaagcttccgtgagcgctttttccagttcgtactggcggccgacgatggcgatcgcgacgctggagccctcggcggccggtttgacgaccagcggccagccgaaaggggattccatcaccccattgcgcggtccgctccgccgcagcgtccaatacggcggcaccggcaagccctcgtcctcgaacagttttttactcaccaccttgtccatcccgatcgccgaacccagcacgccggggccggtatagggaatccgcaggatttccagcaggccctgaacgcagccgtcctcgccccacttgccgtgcaaggcgttgtagaccacgctgacgccctcggcgacaagaagcgcggctgtttgttcattcagatccagctcgaccacatcgtagcccgtgtcccgcagcgcccgcgcgacagcccggccggtccgcagcgaaacctcgcgctcggaactgggaccgcccatcagcacgcccacttttttattgcgatacatcacgctctccccaaatgatcacttcgggttccagccagatcccggtttgttcgaagacgatctgacgggcttgttcgatcaacgccagcacatccgccgccgaggcgccgccctcgttgacgatgaaattggcgtgcttctcgctgatccgggcgccgccgatccgccgccccttcaagccgacggcctcgatcagccgcccggcgtaatcgctttccggattcttgaaggtcgaaccgccgctgggcagttccaggggatagcgggcgcgccgccgttcgattgtttcctccacccggcgccggatcctttccgctgcaccgcggcgcaaggacaaaaccgcctgggtgatgacgtacgggccgtccaaggccagaccgcggtaacggtaaaccagctcggcgcggggcaatcgccgcagtcgcccttcggcgtcgactatttcaatctctgcgagcaccgaggcgaaatcgccggcgctggtgccggcgttcatccgcacaccgccgccgatgcagccggggatgccggccagaaactccaggccggcgatgccttgttccatgcagcgctccagcgcgatttccatggacaggccggcgcccaatgtcaggcgtacggcgtctctggcttctgtggccgcgaattccgtaaagttctcgcgcatcaggatcgtgacgccgcgcaatccgccgtcgagaaccagcagattcgagccggcgccgatgacgcgcgtctgttgcccggccgccagtgaccagcgaacgatcttggcgatttccaccgccgtttcgggctgcaccaggcaatccgccggaccgccgacgcgccaggtcgtcaacgaggccatcgataccccgaggcgacaacgcgcgccgagcaattcggtcaattgcctttgcagcttcagatcgatcacgctctctcccgcttcaaacgttcgaccaaccgcgcggacaattgattcaaatcgccggcgccgagggtcaggatcaagtcttccggttgggccgccgcgatcagcaaatcgagcatctcctgttgatcggcgacataggttacatccgggtggcccatcgcccggatgccgtccaccagcttgcgcgagttgacgccttcgatcggcgtttcgctcgctgcgtaaatatcggttaccaacagcttgtcggcctggtcaaaagcggtgagaaactcatcgaacaggtcctgcgtccgggtaaaacgatgcggctggaaggcgacgaccaaccgccggtcgaagccggcgcgcgccgcggagagggtagcgcgaatctcggtcgggtgatggccgtaatcgtcgatcaccaggatgttgtcgatctcgccgatgcgctggaaacgccgccgaacgccggtaaacgaactgagcgacttggcgacaatctcgaagggcacaccgagctcgcgggccacggcgatcaccgccaccgcgttttgcaccatgtgccgaccgggcaacggcagcaccacttcgcccagttcgccctcgcggttgctgaccgcggtgaattgcgtctggaagtcatgctggcggattttcacggcccgcgtctccgcctccggcgacaggccgtaagtggcgatgcgcttgcgcacgcccgggatgatttcgcggacgctttcatcatcgatgcacaacaggcagagcccgtaaaacggcaccttattcagaaactccagaaatgtgcggcgcagttgctccattccagaatagtgatccaggtgttccagatcgatgttggtgacgacggcgattgtcggattcaacagcagaaaactgccgtccgattcatcggcctcggtcacaaaggtgtcgccggcgccgagtttggcgttggagccgatggcgtcgacgcgcccgccgacaaccaccgtcggatcaaagccggcggcgcccaataccgtcgccagcaggctggtggtcgtcgttttaccgtgacttccggccaccgcgacgccgtattttttcatccgcatcagctcggccaacatttcggcccggggaatcaccgggatcttggccgccttggcggcgatgtattccggattgttcgacttgatggcgctgctgatcaccaccacgtccgcgtcgtcgatgaacctgctttcatggccgtgatgaatccgcgcgcccagacgctccaggttggtggtgatgtcggtttcccgcaggtcggacccggaaactctaaagcccaggttgagcaagatttcggcgatgccggacatgccgatgccgccgatgccgaccaggtggatgtgttccgtcataccaagcatgttcattctcccgcttccgcttcttggtggcgcatcgccagcaggttgaccacccgttgtttgccggcggcctcgcctcgcgtctgggcgacagcgaggatgatgcccatcaggatgaaattgagcagcgtgttcgaaccaccgtaggaaaaaaacggcatggccagacccttgttcggcaacacggacatcaccaccgccgcattgacaatgatctgcagtcccaacaagcttgccgcgcccaccccgcaatatcgcaggaaggagtcttccacccgcatcgtcagacggatcgagcgccagacaatgaaaaagaagatgcccaacacgcccagtaatcccaccagtccgaattcctcgcccaagttcgccaaaatgaaatcggtgtgaatttccgggacgtaatgcgctttttgccagccgttgccgaaaccgacgccgctcagcccgccggagccgatggctatcttcgcctgccaggcctgccaattgacctgatagagattctgatccggattcagatagccccgcagccgctccatccgccaggatgaggtgaggatcgccagcgtaacgaatgtcacgcccgccgcgcccaggatgcccagggaactgagacgcgccccgccgatgaacaacatgacgatcaacaaaccgcagataacaaccgcgccgcccaggtccggctctttcgccaccagcccgatataggccgtgacgatcagggtcaccggcagcacgccgaaaatcaaagaccgaatccggtcctggcgcaccgccagataatgcgccagaaacaacacgaggaccgccttggtcaattccgagggctgaacattcagccccccgcatttgaaccagcgatgggcgcctttggcttccccgccgaaggccggaacaaagaccaacaccaacaacaacaacgccccgcccatcaaactggaaatcaacaccttattattgaaggctttcagatttattcgggtgatcaacagcatgaaaaacaatccgacggccacgttgaaactctgtttttccaagtaaaataccggcccgtgtttcatcggctgggtgacgctgtaaatggtgagcaagccccagaccgccaaacccagcaccagcgtcaggagaatccgatccaaaccgggcgcccgctgttctttgactctgttcattgcgcctccacccagcggcgcatggcctcgccgcgctcctcgaaattggcgaattggtcgaagctggcgcagccgggcgacaagagaatcgcttcgccggaccgcgccgcggcgcgcgcccactccaaggcttcggccatgggcccgacccgatgcatcgccgcgtcaggaagcgccccggcgatcaactcggccgcttcgccgtaagccaccaccgccgcgcatttttcccgcagcagcccggccagaaccgtccaatccgttcccttgtcccggccgcccagaatcagcacggccgggcgatccagcgccaacagggaagtgcgcaccgcgccgggcgtggtggccttggaatcgttgatgaaccgcacaccctttttctcgcccaggtcttccaggcgatgcggcagaccgcgaaattcgaccatggcgctttcaatcgccgccggatcggccccagccaacgtcgccagcagcgccgcggcggccaggttttcgcggttgtgccgtcccggcagacggtaagcgcgcaagggaatccgttgctcccgttccgttagtcgcaacaccagatcctgatccgtgcaaaaggcgttcgcctgcaggccgttgaacgtgaacagccggcccggcaacgatccggcaaagcgcatcaccccggcatcttccgcattgaagaccgccgcgtcgcccggcaattgccgggcgaacagtcgcattttggctgcggcgtaagcggtcatatccgggtagcggtcctggtgatccgaagccagattgagaaacgcgccgatgatggggcgcaattcaacgatggtttccaattggaagctggacaattcgacgaccgccagatcgagcgtcgcgtcatcgagcagcgcctcgctgagcggttgcccgagattgccgccgacgaaaacccgcttgccggccgctttgagaatttctccggtcagcacggtggtggtcgatttgcccttggttccggtgatgcccagcagcggacaagacagttcgccgaacgccagctccacttcgccgatgatccgcgcgccgcgttcgcgggcctgcgtaaaaagcggctgggccagcgggacgccgggactgatgacgatcgtgtcggcccaggagaaaagctccggtgtatggccgccccattccaccgcttccaactcggctcggatcggctccaacagactgcgcaacttcggattgtcgcccgcttcgctcaccgccacccgggcgccgcggcgcaaggccagccgcacggcgtcgcggccgctgcgaccgtaaccgacgacgagcacccggcgccctgtccaatccatcagatttcttcccccttgaggccgcggaccacgcgctccatgcgcatcccccggctgcctttgaccagaatgacatcgccgcggcggccgtcgcgccgcaactcggccacaatcgccgcatggtccggcgccgcgacaatggcggccggggacattttttcctcgcgcgctccttccgccaccaggccggcgtgctcgcccaggagaaacaaccggtccaggccgatcttggccgcatggcggcccaggcgccggtgagccgcctcggtttcggggcccagttcgaacatgtcgcccagcacggcgatcttccgcccttctccggccagttcgtccagcgccgagagggcggcatccatgctgcggggattggcgttgtaggtgtcgtcaatgacggtgatgccgaagatgctcagcacccggctgcgcatcgccgccggccggaaggtttccaagccttgtttgatcgccgccggcgacacgccgaaagcgcgggccgcggcggcggcggccagggcgttatacacgttgtggcgaccgaaggtggagagtgccacgtccaacggctcgcccagcacgctcagcgacaggtcgatgccttcaaagcccttggtccgcaccgccagggctttcacctgcgcgtcggcggcgggatcggccgagaaatacacacagcggaaaggcttgtcttgccccatgcgggcgactcgcggatcatcggcgttgagcaccgcaatgtgatcggcgccgaagccttcaagcagttcgcccttggcctcggcgaccgcgccgatggttttcagatgctccaagtgcaccgcactgacgttggtgatcacgccgatggtcggccgggcaatttgcgccagccggcggatttcaccgcgcatcgacatgcccatttccaacagcgccacccgatgcgcggccgtcaacctgaaaaccgtcaacggcaggccgatcaaattgttgaagttgccctcattgcgcagcacccgaccgggcagatgcgcctctaatatttgatagagcatctccttgctggtggttttacccgtcgagccggtgacggccagcacgggaatcccccgccggtccagcgtccagcgagccagatcgcccagggcttgcagcgtatcgtccacccggatcaccgccaagtctttcggcgccggggcggtgagcgttcgactgatcacgacgccggccgcgcccttggcgatcgcttgctcgagaaagttgtgaccatcgaaattgggtccggtcagggcgaaaaagcactcggccggcagcacctgccgggtatcggtgcaaattccggaaaacggctggtcggctcttccggcgatcaattcaccgccgatggcgcgactgactgtttccgccctatacagatcgtgcatcagctttctccgaagcggcgggccaatgccgccgccgccatttccgtgtcgtcaaaatgaatacgctgagatccgaaaatttgataatgttcatgtcccttccccgccagcagcactacgtcgcccgcctcggccagatcaatcgcccaggcgatggccttggcccgatcgggctcgatcgcgtaagccggaccttcctcccaccgcggcgactcaccggatttgaggaatcgccggccgaccttctccacgccggggacgatcatgtcgatgatcgcctgcggatcttccgaacgcggattatcgctggtgatcagggtcaggtccgcctgctgggcgaccgccttgcccatcaacggccgtttgccctgatcgcggtcgccgccgcagccgaaaacaaccaacaagcggccggccgccaggcggcgcaaggtggagatcacattttccagcgcatcgggcgtatgggcgtaatccaccagcgtcaggaaatcctgccgacccaccggttccaggcgacccgggatactgcggcaaccggctaatccctgttccacgacccggccgtccaccttcagaccgtaagccacggccgcggcggccagtacgttcatggcttgaaaatcgcccagcagcgggcagcggatgtccaacacttcctgcccgtactgcagagagccacgcaagccattgaaatcgcaggtcaattcacgccaataaatcgaggcgtttttcccgaaggtaatcgtcggcatcggggtggctttcatgattttttgcccggccggatcatctgcattgacgaccgcgaaagccttcggcttgcggctggccgaaaccggcagcaactcatcaaacagacggatcttggcgcccagataagcatccagcgcgccatggaaatccagatggtcgcgcgaaagattggtgaaaacgcctacatcgaaatggcaccccacggcccggcgcaactgcagggcgtggctggatacttccatgatcacgatttccacgccgaaattcttcatttccactagaatttcaaccagatctggagcctccggggtggtgtatcgcgattggatcgtatgaccgttgtaatgataatcgaccgttccgatgatccccactttgcgaccctgagccttaaaaatcgcctcgagttcataggccacggaggtcttgccgttggtgccggtgattccgatcaacgttaatccggccgtcggatcgccggccaggcgatgtgatatcagcgcgacaaagcggcgggcatcaggcactcgaacgagcggcacccccttggtatcgagatcatcctccgcggcaatcgccgccgccccggcttccagggcttgcgggacaaagcaggcgccgtcggtttgcaggccgcgcaccgcgacgaacaaatcaccgggccgcacctgacgggaatcgaccacggcgcgaatgacctcgacttgccggttgaccgaagcccaaggcaggtcatcgatcacctgattgagcagcatgtttcctccactactgtctgggggcgaaaaccaccgttatttgtctgttttcagccaacgtttgcccgggtgcgggttcctgcttgatcgccactcccgagccttcgaaggtcatatcgatggtcatccggtgcgccaggctccgggccgcccgaatgctaagacccctgaaatccggcgcttgatccgcgccgaacaatcgtttgtccatggtgacgccatgattctccggcgccgcgtaaacaatgtttttttccaattcactgaccaaagttgcctcatcttgccgctgttccgaatacacgccgagataatccagcgttttttcagcgatttccctgaacgccggcgcagccacggtaccgccgtacgtccggcccggaggttcgtccgcgaccaccaggatccccaggatgggctcgtcgccgggcaccaaacccacaaagctcacgacacgccgcgatggatcgggttggccggtgcgggggtggtaatggaacgcagttcctgtctttcctgcgatcggaaaaccggtcaccgccgcccgtgtccccgtcccgccgtcctcagtgacctcgaccatcattttaaggacttccttggcgattttagcgctgacggcgcggccggcgatcgtcggattgtttttcctgctgccaatcccgtcgggactgatttgttcgagaaccacaaacggcgtcatcattcgaccgccgttgcccaaggcggcggtggccatgagcatctgcagaccggtcacggcaatcccctgcccataagccttggtagccgcgtcgatgggataccaggttttgtagaacttaagggagccggccgcttcggcggccagatcgatcccggtgcgttgaccgaaaccgaaccggcgcaagctttcatagtattgttgataggtcatgcgaatcgccaatttggcgatgccgatgttcgaactgtatttgatgatttgcgccggcgtggcgttgccgagcttatgcgtgtcggaaatggttttaccgccgtaatgccattgaccgtattcacaatcgaccagctcatcgagcctcaccttgccgtccgctaaaaccatcgccatggtcagaggtttcatcgtgctgccgggttcatattgatcaagcaccgcccgattgcgccggtccagatcggcgctctcacccggacggctcggatcgaaggtcggacgggtggccatggccaggatttcgccggttcgtacgtccaccacaatggcccaggcatgtttcggtttgaattccctgaccattttatccagcgcctcttcgacgaaccattgaatatgaagatcaagggtcaagcgcagggtttgaccatccttgcggccgaccacctgattgtcgctgaacaggtattgggtgcctttagcgtccttgatggaaaccagatgtccggcttccccgaccagggattgttcataagtggcctccaacccttcacgccctttgatgtcgatgtcggtccagcccagcagattggcggccagcgctccgcgcgggtagatgcgcttggtttccttgcgcagtctgacgcccgccaacgactcgggggccaaggccgccagagcggctgattcctcattggtgatgaagcgcttgatccattcgaattgcgtatcactgcggcatttgcggtaaatgtccacctcgccgatctggagcacatcggccagcgccttggacgttcgcgcggggtccttgaccagggtcggatcaacccacaccgagtccaccgtcaccgtggtggcaagaacttcgccatggcggtccaggatgtcgccgcgcggccgcggcagtttgatttcaaggctgtgaattttttccgcctggttgaccagttcctgatgtttgatgatcgtcaaatagaaggcgcggcaaccgagggaaaaaaagccgatgataaacaacaccaatagcgtgccgacccgcacgcgacgggcctcatccaagttgaagggtttctccggttggatgtgcttggcctggaggcgtcgtccaggcaaaagtccccggtgcgaaccgtataactgtggttgtctagggttcctcatgcaaaacaatccgttggtttagccgcgattccttcagattgagttttctcgcctccgccgtcagacggtctttgcgtcccaactgttcatattcaaggcgtacatcattcacttctttttccagcgatcggatttcatcccccagcaccaaaacatcgtgacccagcgccaccacttccccccggatgtggcccagatacagcaaataggccgaaaccagcgccatcacgccgatcgtcaccagaatacccgtcaaatccagccatttccccagcgccacacgcaccgaacgccgccagcccccccgtttgacctttttttgtccgatcgttcgcgcccgaggcaaaatatattcagacatcatcatcctctttcatggattggcgactcgccgattttttccgccacacgcagcttggcgctgcgcgcgcgcggattcccccgcacttcctccgccgagggcgcaagcggtttgcgcgtcaggacccgcaaccgcggccgatgaccgcaaacgcaagtcggtatgttcggcggacaaaggcaccccttctcttcctcctgaaaccggcgtttaatccgccggtcctccaagctgtgatacgcgatcaccgccaggcggccccccgaccgcaacagcgagatcgacgcatccagcagttcatccagcgcgttcaactcgtcgttcactgcaatgcgcaacgcctgaaaaacctgggttgccgaatcgatgccgcgacgccggggcgtcccgaccgcccgatgaaccaactccgcgaaggcgcgaccggtgaacggccggtccgactgcctttccctcaccgtcaaccgggccaccgcccgccagcgcgcctcttcgccgtactcccgaaagatgcgccccagttcctcctcggaggcggcggccagcaaaacggccgccgtgcggggcgaccgccgatccagccgcatgtccaactcccgctcgctccggaaggaaaaaccccgctccggatcgtccagttggaaactggccagccccaaatcggcgcaaacggcatcgacttgttcaatttcgaaagaacgcagcacctgtcgcaattcgcgaaagttggcccggtgaaacttcacttgcggcaactcacgcaatcgccgccgggcgatttccagggaggcgtcgtcctgatccagggcgatcaccatgccggtcggtccgacctggcgggcaatcgcttcgctgaagcttccgcctcccgcagtgacgtccaggacgatctggcccggctgcaacgccaaacccgcgatcgtctccggcaacagcaccggttggtgctcgatcattaatcaaagagccccgacaaagcggccttgatttccggaatatgctccgccgtttccgtcagcgacttggaccacgattccgcatcccagatctgcagcgtcttgatggcgccgacgatgataacctggcgatccagaccggcccattcgcgatgcaattgcggaatcaaaatgcgtcccgccgaatcgaacgacaccttcttcgccggcatgacgtaatacttgatgtactcctcgagcacgggatctgccggatacttggaaaacagcttgtccatccgtttgacccattcgggccacggcaccaggtcgagatacgaatacgtcttgacctgttcgtgcttgctggaaccacggtccatcgccaggaccagttcggtgacgccttcggcatgaaacaactcgcgcaactctttggggacaatcgccctacccttttcatcgatcttgaccgggtaggagctgatgtacattgtttcgcttccttaagtccccacagcagtggagtttagcgccacattttcacaattttctacacgatactccccaaatccccaccgtgtcaagaaaaaaaatgaccgccccccacattcaaccatttgaaatgaaaagtaatttttacgaagtctatatctggctcgttttccgtaaaatacaccacagattgtgccaatccccaccggctagtgctttccggcgaaaaaatcctctaaaatttttcgatggtcgaaggccaacgacaaggctaatgcttcatttttcgtaaacttggcgaccgttttcgcatcgtcagcggcacgcggttccccggcggcggttgcctcgaaaaccaccgacagcgtatgaaaacgcgtatcgcgcgccgggtccgaataaacgtgaacctgacgcaccagccgcacatcgagacaggtttcctctctggcttcgcgaaccgcggcgctttcggccgattcgcccacatcgataaaaccgccggggatcgcccaaccgtaaggcgggttcttgcgttcgatcaaaacgatgcgctcgtcgggaagacggatgatgatatccaccgtggccaggggggttttcgggaggggtctcatggctgggccgctttaaattgttcaagtctggcttgccattcgccgcgttggtcgatttgcagcgcccacttcatgtggcgcacggcgtcccgataattcttgtcggcgtaagccgtttcggcttgttgcgccaaagcctgagcgatgagatcgaggcgctcccaggcatagtggttgtttttatcgtaccgcacggccatcccgtaaaaggacgtcgcgttgaacagcatcggttggcgatacatttcggcgtcgaaatacgcgtcgccccacgcggtcaaatatctgctggttgattgactgacgatgaagctggccgccagcgcgatgaacaacgcggccaccaccgcgagcccggcaatcaaaaccaaacgcggccattttctccggcgcggcacggtttccgtggggctgattttttcctcttcggcaatcggtgcggccgatgttttaccgagcgaggcaagaaacgaatcgtccgtcggatttcccggatcgcccgaaaccgtctgcggcggctgatgcgtggcggttcccgcctgcgtccgtaattcctccgcatccagccggagcgtgctttcctccctggcttcccggctcagcgccgcctggctggtggtgtgaatcgtccgatcggtgaattccagggcggcgcatagatccgccgcggtggcgtagcgatcgttcggatttttcgccaggcagcaatgcaccacctgcgccagcgcctcgggcacttgcggtcggacattgcgcaagggcgtgggcggtttgcgcagatgcgccaccatgatttccgaaatgctgtcgccggcgaacggcggcgagcccgccaacatttcatacatcaggatgcccagggcgtagatgtccgagcgcggatcgttcaagccttcccactgttccggagccatgtacggcgcggtgcccaacacctcgccgtcggcggtcaggttggcgccgccggcgatcttggcgatgccgaaatccatcaacgtggcgttgtcctgctcgtcgagcatgatgttcaccgatttgatgtcgcgatggatcgccccggcgcgatggatatagtccaccgcccgcgaaatttggatcatgatgaccgtgacctgctcgggcgagagggtgccgctgtggcggatgcggcccttgagcgtttcgccccgcaggtacttcatcacgtagtagacgatctccccctcttcgccgatcgtatagatcggcacgatgttggggtgctccaagcgggccaggatattgatttcttcccgaaaacgcttgaccagcttttcatcggccgccaggtggctgggcaggattttgatggcgacggagcgctcgacgtcgaaatcgagatcctgggctttgaagaccgcgcccatgccgcccatcccgatcttctccagcaccttgtatttcccggaaagtatggctcccggttcgatcatgcagccatcctgttttcgctcgaatcccgtcgccttcaccccggcggggcggcgttcattatcttttccacaccaagcgtatcgggcgcattaaaattatttttcttcgtgaatgcaagcgcattcgatccttcccttcagtcactccttgcctttttccctttgcccttccagcaaatccctgggcctgtacctggatttcaggatttacgcgggggttcgattagctcctggtctactcggggcggaaggcttttgttaccgccgcattatccctggcgtttttaccataatggaaagcatgtttgcatttatttagcgaaaaggtgaagggaaaaaggaactgtgccccttcatgacatgggtcgattatggtatagctaatcgtcatcaaaaattcgttggaagaccggagcggaatggaaaatagttttgcaggcgtatgcaggggatgtcaaaatcaatattcattaatcatgggggtcctacatgaactacaaccttctcgatgaaaaatggattccggttctctataatgatgggcgcacggatcgcgttggcattaaagcggctttcaaggaagcaggccacatccgccagattgccgccagcaatccgatggatcgttttgcaattttgcgatttctaatagcattgctatattggtgtaaagggaacccttcaaccgatgatttcaccgacttagataaaccgttccctgaaagctggtttaaaaaattagaagaccaaaaaagctgtttcgatctttttgccgaaaacaagcgattttgccaggcccttacacattctaaaccggtaccggatcggcttactgtaaattatctaatacaagaggttccgactaaaacaaattttaatcattttcgccatgcaattgataaaaaagacggtctttgtcccgcgtgttgtgcaattggcctcctacgaatacccatattttccacatcagggggaaaaggcaaatccccaggcattaattttaaaccgccaatttatctcatcttacttggccatacgctcgcaacaagtatcaggctttcttggttgcccgtaaaaagtattggcttcccattttgggagaaagccgatttttcacttcctgaaggtgaggaaatccccttactgactggtatgacttggctaccgcgacaagtatggcttgatgagccatcagaaaaagaaggcaaatgcattttatgcggcaggcaagaacgattggttgaacaaaccatttttgccgggctggggagcaccaaagacaaggatgaatcaaaagtgcgaatgtggattgatccacatgtcatttacgatacagcgaaagatgggaaacaaatttcgctacacagtaagaatacgattggactagccgatactggggctggccaatggttggatatattattcggccaactctatttggatagaatccattcaccggcggttaaggaagcaatccaaaaaacaaccgaatcaggaagccaaatcaaatcatgggcaattgggttttcaactattcaaaacgataagtacttggaagcaatagaatatttgcttcccatctcgaatcaaggagatgccccaacctcaggaatcgatcaagtaaagcagtggcaagatgagggtaaaacaattgataaaacaataaggaaaaggactgcatggggaaaagatgaatccttaaaaaagcgaaagaacagcgaattaaaacctgccatatccgccattcgcccgcatgtggagcaccaggtatcgtcagcggcgggaaagctgctgaccgatgaccgcgaaacgtgggagcgggcggcggaagaataccgaccgatgatggaagtcgtggcacaggcgctttcacccggttatacggccaaggccttgcgaaggcggcgacaaatagccaatgccattccgaacatgcgtcaaaccgaaccaaagaaaaagggcaagaacaaagagaaaggaggtgaggaatgaacgcgaccgaactcttcattgacgctttgaccagtctaaaagaaggtgaactcgggctattgcgaaagcatgcagggcaaggtttagatgaaacggtagaggggttcgatctgttcaccggtatctggtggccgctgcgatctcaaaaacatggaattccgcccaagagggaagttgcctggttggtggccaagctttacgcattccggcctttagcaccctcaccgggagacaccctttctaagcaattagcaaaaagcattccgagaaacgaacaagaacaaatccgctacgtggaacgattcgatcagatgctgtctttgcccatccggaaaatcgaggccgggttgttatgggcgctcgatgtcatcgctaaaaaggaaaacagactcgattgggtcagattggcggaagatctccgctcttggaataacgaatctacccggctgagatggtcggaagaattcacaaaaattgatgaaaggaaagaaccatgttgatcgaaattcatgccattcaaaaccacagcccggctaatttgaaccgagacgaccttggggcaccgaaaacctgttacttcggcggagtattgcggtcgcgcatttccagccaatgcttgaagcggagcatccgcaccagcgatgaatttaagacactttgcggaggaattcgtacccgtcagttggcgaaaaagatcgcggagcaaattccggacgtgaagaaggccagggaacgggcggaaaaaatactcgaacaatgcggttttaagtcaaagaagaaaaaaggagaagaagaacaagacgacaaaagcaagatgctgatatacacgacttatgccgccatcaaagaaatggccgaattgattaaaaacaatgaagggaaaccggaaggcaaactggcagaacaattcggcgccatcatcagcaagcacgtcagtgtgccggatatggctctatccgggcgcatgttggaaccggatgcgtctgctaaagagatttggaaaaacaacgaaacgaccgtggaagcagccttgcaagtggcgcatgccatttccacacatgccgcgcgcccggaagtggattactacgtggccaaggacgacgtgccgggtgaagacgcgggcgccggatttctggacgaggcgatgttcgcctccgcctgtttctacaagtatttttcgatccattgggagaagttggtcgaaaaccttaagggaaatcaggaactagcggcccatacaattggggcgtttctgcgcggcgtcgctaaaatcacccccacaggaaagcaaaacagctatgcagccaacaattatccggacgggctgctagttgagatcaaaaaaacaccggtcagttatgccaacgcatttgccaaaccggtggaagaaggacagcgtggcatcatcgagcaaagcatcgctcaacttgcccaatacgcccacgacctggatgtcggattcgggaatccggagcatcgattttggttttcgcccaaccttcgctatcccttgatgctggtcgaggatggaacagaaaaggcgatgaccgaaaacaacatcaaatcccttgatgagttgatcgccgtgatcgttcgcgcgctcggccatgattggcagtcggttcagaagacggtgaccagcatggagcccacattatgagcgaaaacacgttgtttcttcgcttggaggggccgttgcaagcctgggggaatcaggaatcaaaatttctgattcggcgcacttcagatgcaccgacaaaatcgggagtcatcggtatgctttgcgccgctttgggcatcccgcgagcactggccggcgaggaatggctgccgaagcttagtgccttgcgctttggggtacgaatcgaccggccgggaatccgctggtgggattaccataccgtgggcgccaagatggaaatgcggattgcggaaggagaagggaagtccaagccgggcgcgatgttaacccgacgcgaatacctttgcgacgcttcctttctggttgttttacaaggcgaatcgggactcatcgagttattggaaacaaaacttcgcgaaccggtatggacgctttacctcggccgaaaatcctgtccgccatcgcggccgatattgaatgccaaagactcatcgggagattaccccgaccttctttcagcgctttcatccgttccatggcaaagaaggtatcaaggggaaccggcgccaccaagtgtaaagtttctcatggattggaatcccaccccaagccagccaaatgcaccgccggatgcactgattctttatgatgtggcactgacgttcgatcctcccgctcatgagccgcgtttcgccattcagggcgaactcaatgtcggtccggatgccaatgtacacttcaaaacaacgccgtcccagaagataaccccagcaccgccaagaccaagggcagattacgcaaacgatcaataccggaaaatgcgaaagaaacgcctggcggcagatcatggcctttgtgttttgtgcaaatcgccggcgacaaccgttcagcatattacctatcgaagagcaggcggcaatgaagccctggaagacctccgatctctctgtcgtttgtgccacgatgcggtaaccatgctcgaatatgggttgaacatggacctggatcgaatcaacccggaagagtcccactggcgcgaggccattttagaaaagagaaaagagatcgaacaaaaccgctcccttgtcaaacgccaccgcagattatcagccgaggaggtggagtaaaatgtatcactcgacccttttagtaaacgtcggcgacaacccggatcaaccaagacccggccgactatggttacggaacgcctatcgagtccatcaacgcttgtgcatggcgtttcagacagaggctaagaaaaaggccgatcccgattttctcaacccatacaatccgaccaaagatctggatcaacagcaagtgcatgtgccgcggtatgatcccaaacggaatgttactgccgggtttctttatcgcattgatccgcatccgggtgggtcagtggcgattgtcgttcagtcaacccaacgtccggattggaactacgcttttcacaacgccccttctcttttagcggccgatccggaggtcaaaccgttcaatccggaattttccaaagaacaactgcttcgttttcgattacaagccaatccgacgaagaagatcgttgcaatgaccgagagaggtgaaataaaacgaaacggcaaacgcattccggtgaaatacgatgagctaaacgattggctgacccgccatgccaccgcaggaggcttttctcttgatgaggaatccatcggcgtacagacaggttatgtctatatcaatgactcgcacgagggaaaagggcgtcgtgtgttttcaacacggtatgagggcacactgaccgttaccgatccggaacgcttttaccaaacgataaccggcgggatcggtccatccaagtgcttcggcttcggtttgctgagcgtggcgccggtgcggtagcgagccatgaaggatttgcacgatctgcccaagctgcgggacggcctgagctttctgtacgtcgagcatgcgcgggtggaaaaggagcaacaggcgatcgcgctgtaccgggcggaagggtgcgtgtccgtgccggcggcggggctggcggcgctgctgttgggtccgggcacgaacatcacccacgacgccgtgcgcgccctggccgaaaacggctgcacccttctgtggtgcggcgagcaaggggttcgctgctatgcccagggcctcggcgaaacgcgtaaagccgcgcggctgctgcaccaggcgcggctgtgcgccgatccggccttgcacctggcggtggtgatgcggatgtatcgcaaacgctttgccgaagcgctgccgaaggacttgaccctggcgcaaatccgcggccgggagggcgtgcgggtgcgcgaggcctacgcgaacgccgcacagcgctacggcgtggtctggcagggccggcagtatcggcgcgaccggtgggaggcgacggacccggtcaaccgggcgctgtcggccgccaacagttgcctttacggcctctgccatgcggcgatcgtctccgcgggctactcgacggcgctgggcttcgtgcacaccggcaagcagttgtcgttcgtgtacgacatcgccgacctgtacaaaaccgaagtgacgatccccgtcgctttcaaaatcaccgccgagggaccgacgaacctggaaagcgccgtgcgccacgcctgccgcgatatcttccgcgaggtgcggctgttggatcggctggtaccggacctcgattgggtcttggatgcaacggggctggacgacgaggacggcgccggcgacccggacgccgacgaggccttgccgggcgggctgtggaacgggtcggagacaacggcaatgggagggcaaaactatggtggtgatgatcctggaaaacgtggccccggggctgcggggaaaactgagccgctggctgatcgagccgcgggcgggggtcttcgtggggaaggtgagcgcgatggtccgtgacaagctgtgggaaaaggtgctgaaacaaaaaggcgccggatcctgcgtgcaaatcttctcggcggcaaatgagcagggcttcgaggtccgcgccgccggcgaccgcagccgtgagctcatccgcatggagggacttatccttgttttaaagaaaaaagtcgtgtgataatcaagtatgatccccacgcgcgtggggatgaaccgagcggcctgggcctgctgtaaggaggcaacatatgatccccacgcgcgtggggatgaaccgctctcgcctgggttcggcaaatgaccgctctgatgatccccacgcgc

SEQ ID NO: 526 - DNA, 80369 bp, Artificial Sequence
  Synthetic Oligonucleotide
aaatagtaaatgggagctttcatttagttcttcgtatatgatacgtattactaatgacggaacgttgaaaaagtattcccttaaaccctttcaaaacttttcgcgctagcgccgatgggaaggcttcgctcttcccatcggcgcgtatcatgcgaaaagatattgagaaaggggtttcatgaggaatcttcttcttaaacatttccacaggagcgtcggtacgggacgcgtcagcgtcccgtaccgacgcgcaaggaaaagtttgaaggattttcaaggaaacttttcaaagtttccttgaaccgccggaggcgctttaatgcggttaagggaaaacttttaaaaaagttttccctcaaaacatttctatgcgcgcggcggagcgggcgcgttcgcgccatcgctccgccgcgctcatgtgaaaagttttgaagagattccaaagagaaactttttcaaaagtttctctttggccgccggaggcgcttttaaaggcggatttactgcgtctatccgtttgtcgcgcttcagtcgcttccgtatttgtctttgactttcttgaaagcgatgtcggccacttcgagcgatttcttgatgtcttcttccgtgtgcgcgcaggaggtgaaccagttgtggtgcgggtggaagatgacgccccggatggcggcctcgccgctgaagagctgtttgagcatgaagttcttctcgcgcgcgaaccgcatgaacggtatgtcgtacggtccggacatgataatctcaaacccgtgggatttgcctacgctgacaaggccgtcgcagagcgccttgccgattttcatcatgtagtttactccgtccagcctctgcatctctttcacggtggcgatggacgccgccatcggaaccatgctgctgaagaacgttcccgtgaacagaacgtgttcggcggtctctttcagtttgttcgttcccagaccggcggagatcgggtaggtgttggctatggctttggagtagcagaccagatccggctcgtatccgaagtaggcgtggctgccagccatgtcgagcctgaacccggcgcgcacgtcgtccgatatcagaatcaattcttcctgtttgcagactttgccgatggcttcccaccagccgggagcgggcatctgctggtccgcgtatatgcagtggtggtacggcgtcatcatcacgcccgcgacctgccctttgtatgtgttgatcagttccatgaaggagtctaggttgttccattcgaagaagtgaacgtgcgtgcgatcctcgtcgatgatgccgccgtagcttggggtggaccatgcctgagcgccgtgatacgcgccgcgcgcgatcaggattttctttctccccgtgtattcgcgcgccagcctcatgcaccatgtggtgatgtccgcgccgttctttccgtacacgcaccagtccatgcccttggtgagtttaaccatcatctcggcgtactcgatgctgatcggccccggatggctcatgccgtcgcccagttttgcctgttcctgcgccgccgcgtccaccaccgggttgttgtatcccagcaccatcggcccgaaaccgcacatccagtcgatgtactcgtttccgtccgggtcccagtagtggcttccctcgccgcgagtcgcgaaatacggatacgagccggggacggtgaacgcggggtgtttgtgccctatcactccgcccggaatgactttgcatgcccgctcgaaccactcgtatgatttatcaaatttgtaagtttccattttcaagccctccagttgggtatagtcgtccggcgtcaactgatatacaggccgatgcgctccataacgaccgcgaggctttcagccattccgacgtgcccgcgcagccttatgcggcacaggcccagctcttccatgaactctacattggcgttcagcatatcgtacgccagcttgatgtctttaatttccatgacgaccatcgggttcgccgccggccctttggccacagcgaactttccgttgtccagcacgatatgcgccaccggcccgtccggcagcacctttatctccatcggcccgttcggcactttcgacactattccttttacatacgtgtcgtgctctccgacggccttcatgccatagacggccatcatgagtttcacgcgcgtatggaactcgaagaagtccttgtttttgagatcttcttccgacggtctcagatacttctccatgagtttcgtcagcttcatgaactttccgagtttcccgatgttccagaagccccatatcatgggaatgaccgtgccggtgttctctatcattttgttggcggcttccggcgtcggaatcctcagcgagattgtgggcatgctcacagcgcccagtttcgcctcgcatttgccgtctttgaagacgaacctgactcccgccccgccgggcacgtgcatctggatcgtgcagttccagcctttcgtcagctcgcgcgcctccgcgtcatacgcgattatctcctcaagctgaggaaggacggcgttaaggtaaagatacgactttactaattctttttctttttccttatccatcgcggcactcccctgatgaattttgacgggcgcgtcgcagttcgttccgcgacactccgccaacaggcattattattgttattgagatatatttttgcaactttatttaaatcggccctagaacggcgtctatcccgctccaaaccgattgccgccgcgccgtcaatccccgtcaggcagggatatttcgcaaagaatagcgaaatggtcgggcgcttcctgaatcggagcccccttcggatgcccgtccagccgttccgtcccgggcgactgccccagcgtgacgcaagagccgcgcgccgcgttcgttatcacgtggtccagcgtgaacccggagcatgtcctgaacggcgggtcgttttccgcaggaccgctcagatagtaatatttcttgccatccccaacatgcttcagccaaaccgccacgtcgtcttttgcggcgtcccattgaaacgggtccatattcatgtcgcccatgataatcgcaggactgtccgtggccgcaagcgccgggaacccttcgtatccctcgaacaaccttctcaactcttcggcgcggcatccggcgtccgccgccgacggatgcccgttgactatcctcagccgtttcccattaatctccgcgtccgccccgaacacgaccgtctttgtcgagcatccttccggcgtttcgattgtcagcggccagcccggagcgcggcacagttctccgcgcccgcaaccttcaatcgtcccgacgctttttttcactcctatgcactcgtagttggcgcgcccgtcgcacactatcgtataatcatctcccaacagcctgcgaacctgatgcctctctttcctgtcctcaaaccggaagcacacattcttcttgtttttctccacggccgccgcctcgcaccactgaacgtccagaacttcctgcagcgacactatgtcgggcgacagcttggctatcccttccgcgaccttcttctcccattccacgagacacagtttgtaaaaatatttcgggccgcagttcagtatgtccgcgttgccgacgtttgcggtgagaaccctcagcgaagcgggggagggggagcctccgtccgcgagcgcgcggggactgcccgccataaacgccgccgcaactatagccaacgcgattgtttttgccttcattctgaacgcctccggacgcggtcaaccatcgacagttttttaatctgatttcttccggcaaatatttttcttcaagttcgggttcaagcttcgtttttataagggccgctcttgccgccttctttttccataaggcggaaagggccgatggagatgtctttctggacggctttgcacatgtcgtagatagtgagggcggccacggtcgcggcggttagcgcttccatctccacccccgttctgtccatcgctttggcttccgcgtcgataacgattattccagcgtctctgtcggcgctgaactcgacggaaactttcgtcaggctgagaggatggcacagggggataaggtcggatgtttttttcgcggcgcacacggcggcgacgcgggcgacttggaacacgtctcccttggagattccgccggacagtattttgtctatcacgtcgggcctgagccgcacttcgccccggacggttgcgcgccgcgcggtacgttccttttccgacacgtccaccatcgacgctcggcctttttcgtctatgtggctcagttcgcccccgctcattgcgtgtctccgttcgccgagcgcagaatctccaccgcctgttcgggcggaaccggattgatgtagaacccggtgccccactcgaatcccgctatgttggtcaggcgcgggattatctctatgtgccagtggtacgtgtactgtcggctggtgttcacggggatggtgtggatgatgtagttgtacggcgggaagtccagcgccttgtccagatatttgagcgacttctgaaaacactgcgccagagacgcgatgtcggagtcttccaagtccgcgaaattggggtcgtgatgtttcggcacaagccacatctcgaacgggaaccgggacgcgaacggcgcgaaactaataaatcggtcgttctcgctgatgacccttctctggtagtccctctcttcgtctatcatgtcgcagaagacgcagcggtctttgaagtcgaagtattcctgagcgccgttaagctcctcggttattctcttggggacggtaggcgtggcgatgagctgggagtgaggatgagccagcgacgccccggcggactgacccgcgttccggaatatcagtatgtatttgaaccgttcgtcgttctcgaggtctatcatcctttccctgtacatccacattagctgttccatgttttgcggttctagggtggatatggttttgtcgtggtcgggcgtctcgatgaagacctcgtgcgcgccgatgccgttcatgatgtcgtagatgccgcgcgcccgcttgttgaggtcgccctcgattgagagcgcgggatacttgttcgacaccacgcgcacgcgccagccgggcttgttcggctccgtgcacgagtcccgcaccgcgtctatctcaggcggcgtcttgtcttcgttccccggacagaacgggcagaagcccgttttcggaagaggtttcgctgcgatgaaatcgctcggcctgtcgccgcgctcggaggatattatcacccatcgacccaacacggggtcgcgtcttaattccgacatccttaatcgtcccgctttccttgcctagtctcaattatacgcatttgcgccccggtgtataccccgcgcccgcaacccgcaaagcccggccgccccgcataggcgatagcccggctaatgtttccattcgaccgggaacagcatgcgtatgtgcgtgacgtctttcagagctttgtcgtcccgcccggacaccgacggcatccgcgtccactccccgccgccgatccgcgcctgaactatgaacgcccccaaagcctgttcaagcgtttttccctgcggcccgcttttgaaatgtaccggcctgatgaaatgcctgaacagcggagccaccccttcgagcgacgggtccgccgcccccggcggcccgaccaccatccactgcgtcagcagcctcgcgttctccatctccgcgctcatcgcgtggttttcagggattatctgaaaaccgcctatctctcccaccggcgacgtcgagacgcagatgactcccgtgtggttcgccctgattctcccgacgtccgtgtacagcgagccttcgaaccttccaacccccgccaccggtttcaacacctgcccgatgagtttcggttcctctccgggatactttataaggatgaaccctccgaacctgttttcgaagacgatttccgatggatatttctccggctgttcgacgattatcagcagggaatcgccttctgacggcgtataatcctcggcgattggggagtgagcggaaccggcgcgggccgcgagaacccgcgagcctatgaacggcgattcggctcctccgaaaatgctccctccagccgggatattcgttattattgaactgttccgggaatagaaagatttataatccgccggcggagagaagaaatctttgggcaggatgctgaacaccgcgcctctgtcttcgttctgccgcacttttatgtgaatggcgtttacggcggtcgcagcgacagcccccgaagacgcccagccgctggcggtgtacgctcgcggatttatcgtcccggcggccagcaggacttttccggcggccgtccacgaagcgcctccgtcttcgctcacttccaccgctccgcccgccgcgttctccacctttatcctgaaaatttctttcatcgtcgcggagttttcgcctgctacagaggcgtttggcccgcgcgcgtccggaagaaccgccgacgccggagcgcagaccgccgccgccagaaccgccgctattatcgccattttaactttcatctgtttcctccgaaggcttgcggcctcctcgcggctttcgcgcctacagctcgattagctctgccttcatccccgccgtgtcaaaaacggcgatagtcgatttgcctgtcagccatccgcaacactctccgggattcactatcacgggtttgccgtccttgagaacaggctgatgcgtgtgcccgaacagcacggcgtccaccggcagcgccgccatcgcgtcgtccggcataggctcgtgaagcacggcaaaacgcgctccgcccatctctatgaaagccggcggcttctctatccgccctatcttcttaaatgtttcggaaagataaatcaattctccgtcgttgtttccgaacactccgaaacactcctcgaacccggcttccgcgatagctttcacaacgaacggggaaacgatgtcgccgcagtggataagccgcgcggcgccgcgggatttcagcgtcgatatcgccgctcttaaccggtcaaggttgtcgtgagtgtcggatataattcctattaacatacttcgctcctcggcgttcgcgccccgcattctccggttcaatacgcgaatccgcgcaagtttcgcggcgtccccaccgcaaccgcctcgaatcattatatcagcgattaaataaaattagctatcagcgcgctcgctatccgcaaccctgtcatcacgggtggcgtccacaactccgttgcgggcgctctcaatcggcaaaaccgattaagaactgatataatatccgaatcgcggcggcgtcgcgacaaacaataacctgagggccggaacaatgaccagagcggaagaattcggcataaagatagacaggatgcgggagagaatgaaagagcggggctggggcgcgctggcgctatcgcggtcggacaactttgcgtgggccgcttgcggagccagttgccacgtgaacatggccgccgaagcgggcgtcgcctcctttgttctgcttccagaccgatgcgcggtcgtgaccaaccgaatcgagtccgcaagaatcagagacgaggaactcgtcgggctggacgtggagcttgtcgagattccatgggccgacgacaggaacgcgaagatagcgcggatgtgcgcgggggcgggcgtggcggcggcggacatgccggcctccggcttcgtcccggcgggcgaggatttctccgacctgatgatggagttgacggaaagcgagatggacaggttcagggcgctcggagcggacgccggggccgcgctcgagtccgccgcgagggctttgcgtccgggcatgaccgagaacgccgccgccgccgcgctcgcctccgagtgctggacgcgggacgcgcagccgatcgtcgtcctcgtagcttccggaggcaggctcccggcatacaggcatcctctgccgacgcggcagccccttgagcgagccgcaatgcttgtcctctgcgccagaaggggcgggcttgtggcttccgccactcggatggtcagcttcggccccgccggggacgacctccgccgcagacacgccgcctgctgccgcgtcgatgcggctttcaacttgctcacccgacccggcgcgaagatttcctccgttttccgcgacgccaccgccgtttactccagcgaaggcttcgaccacgaatggctccttcaccatcagggcggcccgtgcggctacaagtcaagatacttctgcgccagccccgacacccccggcgaggtcaaacccaattgcgctttcgcatggaacccctccattacaggcacgaaatcagaagacaccataatcgcgtttgccgaccgcgccgaattcatcacccgcacaggcgaatggcccgaactcgaagttgatttccaaggcgcccgcctgtcccgccccgacatccttgagctttagcgcccacacctgcttcgctcttgtccctccgggcgcgccccccaaactcgtttctgcctatgcctaaggatcagccaaaattaatgtggaactttggagtgcggcaattcattgccgctttgcctttccgggaatttattcctagcatcccactccttaagccaccccatccgccctccacaacacacaacctcccaccccccgttgccaaatcgttctccttcgttcataatggcaacataaccgccatgaagctgcgacagaccacacatccgcgaccgaacaactatccctacaacagccgtgcttatacaaaatcaagatcagccaaccagatcaactctaattctgtaaacaggctccgcctgactccaccatatgcggttttgctgatgatactgtgctgcttggtgtggacattgattgcttttgtcagcgcatccgcagatgatttcacgggtttgaaagcgtgtccggatgaagagataaagatgggagaggaagttttaaataagtttctggataatccatctgattctttcagagctgacgagtggtgccctgtttggtcttcgcggaaaccatcatatattgatccccggaaagacttcgatgatatggatgaagaagagcaaaaaaagcatcagcggttgatatatgaatacgatagaagaacgttttgctgtgaactaccgctaaaaatatatcaatacaaaaatcatcttacttccgagtttgcgaagggacttgttttagtagacatagcaaattctcgagacccacgtatcgtccccttgcttgaagacataattaaatctgacataagtccagaattgcgaatgaatgctaccaatgaattatgtaggttggatgtcaaatctcaagctgtgatatcaaacgccataaatgacaatgacattagagttagaggcgtagctgccgggtgtcttctaagatggggttatgaggacaaagcattgtttgtgatggaaaggatcgcgagtggagaagaaaaacagagttactttaacgatattactcgtgacagagaaagaatagatttgtccagaggaaaaatgccgaacccccccagcaatgaatctattcacagagaccacagcgattttcagaactcttgtatacgaaaccttggcgaatatggaaaagacgctgcaattatgctcttgtgcaaacttcttgacgaagcagacaaccaagaaatacaggaatacataatcaaagtattgcgcagaacaaacaatcccaaagctgttgactgcctgactcaacacaaatagcaaatgcgagaagaagcgaagaagaagtggtcaggtttgaaattagcaattttaaaaacgggagcatctatggtaaggccgaggcttttgacagtttacaatgtcgctgataggcgaaatagcatccgggcgggtgaaaatggattcccgctttcgcgggaatgacggcacaagagaaaaggaatgacggcaagaaagaatgaattaagaaacaaaagataaagaatgaaggcacaaaaagaggaatgccggcggggggattgattatcgtttgcgtaatgtctgtttgtgttcaataaacattcgatgtttctactgtgaactctgagcgaaaaaggggactggcagcgcgcgcctcagcgatgcctgtgcctgcttttcgccgctccgccgttgtttctactatgaactcaggggtggattctatatcgagtcgatagctgcggatactttagagatgtcatcgtcggcgtttttgatattgcctgaaaaccgcactatgccttttccatccactacgaacgcggcaatccctttttcatcataaccgtaggttgccgctatctcgcctttccagtccatgaggaacgaaggataacgcggctctttcatgcggtttttcaccatcttcttcacgaaagcgggaacgccctttaagttcgccgcgccgactatgcggatatccttgccggcttttttcccgtcttcccgcccgctatgtttcttgtcgagtttcttgatgatttcagccgcgtcgtcgaatccgtttctgccggtgtagattatgacaaccgtcgatccgcgcagcttgtccagttccaccaactgcatgtgctggtcgttcagtttgaaattcttcgcctttgcgcccgttgcgacatatcctgaatccgaagcgagcgcaaccgaaataacggaggaagcggcgataatcaggctcagacaagttatccgcgcaaacatcgttttcatcttgcgggcgtctcctgtttcacgtcttgttcaacgcgtagatgcagtaattgagatatgtcgcgaacccgacccacagcgcgtatggcaggagtagaaccgacgccgcgcgcgatttcttccacagaaccggaatgagcgcaagcagcgtgatttcaatcgccatcgaatctataaccgccgggcctatcatgcgccgggcaaaaaaaatgtagctccatgcgaggttgaacgccgcgttcatcatgaacagtccggccacaagatagaatcgggaatccccagcgaaaactctccaagctataatcgccgataccgccgtcagtatgtatatcgtcgtccacactatgcctatgacggaacccggcggtgtccatgtcggcagttgtatagtccggtaccagtccatgccggacgacgtgaactgccccccggcgaacgacaacaggagaacgactccgatgataacgatttggttcagtttcatttgacgctcactttgcggcggcggcggccgtcgcggcgcttgccacggaacacaggaatgtcccccaaagcatgtccgccaccgtcatttcccaagaccaccccttgagcgtggccatgttcgtaaggtcgtaaatgccataactgattaatccgaataacgcgcccctgacgagagaattctttatgcgcccgctgccggactccgtatccaccgcgaatatgttcaggcctgccgtcagcgcaacgtaaaccaatatcacggcggtccagtcgggggtcagcccggcgtcgtttcttctggccagttctccgagatgttctttataatagtcgctcataatgacgcccagccagacggagtcaagcgccgccagcgtcgccgcggtcgtcccgattcttttcataaacttccatattttcattgcggcctgtctccttatttcatgctcaacgtcataacgctctggaacttgctaacatagcagtactcattaacgctcaccgctatgacggcggtatcgtccgcccttaagaaatccactaaatgaggatgcctttccgcgtatagctcaaagtaaatgctatcattgacgcggtcgatttccctgaccgctccgagaatggttacggctgcggcgtcatgaacgtcgcctttgctgttgctcctgttgtcaaccagaagcgaaacgcgcggctctccgagcagattgtcgaatttcctcgtgtttcggggcgtcgcaaaaacaagatgtttgagatcgtccgtagccgcaaaaccgattatgtttgaatacggactgccgtccctctgtaccgatgaaagaacagcaaagtactggccgagcaatagatgtttaactttttcaaacaggtctttggaatcgttcacaatatctcaaacctcgccgtgatggatttgtttcacaatcaataataaaacagaataacggcaattttgttccggacgccgaaattccggacgttaattctattaattctattagccggttcacccccacacgcgtggggaagacagcggcaatcgcgccctcgaccacgctcaagccggttcacccccacacgcgtggggaagacatattggcggcgacggcatgatctctaggattcggttcacccccacacgcgtggggaagacgatccgctcacggtcaatcaagtgctgatccacggttcacccccacacgcgtggggaagacgcagacatatgggaacaatttatcttcaacggcggttcacccccacacgcgtggggaagacttgtttgttgatttcctttgttagcttccgggcggttcacccccacacgcgtggggaagacctgcggtgctttctgccatttcaatcgccctccggttcacccccacacgcgtggggaagacgcgtcggcggtcgcaactcaaactgctcgccgcggttcacccccacacgcgtggggaagactgccatccccgaccccgtcagccgacccccgcggttcacccccacacgcgtggggaagactttgcaagtttttgagatgttgtttcttccatcggttcacccccacacgcgtggggaagactatcaatagttgggtttgtgtcatgggcttctcggttcacccccacacgcgtggggaagacccaacggcgggcattccatctgtcaaaggctgcggttcacccccacacgcgtggggaagacgctaaagaagaagccgtaagcgtcgccacccgcggttcacccccacacgcgtggggaagactacgtaagcggcctggtggaagacaacgatggcggttcacccccacacgcgtggggaagactgccacagatagcggcgacggattagagtttacggttcacccccacacgcgtggggaagacgtacatcggttcgccgcacgtggggcatttaccggttcacccccacacgcgtggggaagacgttcaggattttaggcaactgcatagcttcgtcggttcacccccacacgcgtggggaagactttctgcgaaaaaacgctcatcatttcacccccggttcacccccacacgcgtggggaagacggctctcaattttatagacaacatgggaaacacggttcacccccacacgcgtggggaagaccggcgcagatacaggattcgggtattcgagtatcggttcacccccacacgcgtggggaagacacaaacataccgaaaggatcaaagcatgaagacggttcacccccacacgcgtggggaagacttatagctgtacatctggttccagttgacaaacggttcacccccacacgcgtggggaagactgtggcctgtttagtggatttcatatcgcccccggttcacccccacacgcgtggggaagacggcgcgcctcggtcgccgtcgttctcagtcggcggttcacccccacacgcgtggggaagacaccagcatattgtatgccggtttttttaaaacacttttagtagtattgtcaaatcaatcatcttgtgaagactccttattattttgattgatcaaagtctcgtcagtcctttcagttttgtaaggagaaagaacaagggcaagtccatcgacatcgatcattggccgggccggtttcccacaggagcggtaaagatatccttgcggagagcgggtgtcgctccatatctgagtgacgccgccgtcgcgtattttcttgacggctttgttccacagaatatctctaatcctcgcgctcggattgccaaggtagagtcccggtcgcggctctatcatccagcgtgacaagtctcccctcaagctcgccggggatttctccaatatcatcaccagcatctaatacctccgcgatatccggcaagacgcgtttcatcagctttgttttatgaaaaacgtcccgacaagccaatcttacattgcgctcgacatcgacatcgctttcagagcaagtttgaaacgcgagcggaactgctatttccatcttgtacaggtcggcgacgtcatagacgaaggaaagcatcttgccggtatgaatgaatccgatggcaggagaatatcccgccgaaagtattgcagcgtggcacaagccgtaaaggcaggcgaaagcggatgagagcgcccggttgagcgggtcggcctgatcccagttctgcggattgtatattctgccgcgccacatcacgccgttctcttccgcgagcttgcggtatgcctccctgactctgtgcccttccattcctcttacggtgtcgagagaaacggagtcgggaagtttttccggaaagcgcatgttgtacatccggcgaatgacggcgatgcgcgaatccatgttgacgtaaagccccgcttgtcgaagcaagcgtcttgaggagtgagagcctcccgtgctgtgcgcgtaaagacggacgccttgttcgcctgtccagcacacaagcgtgttgttgtcggcaagaaaacgcattgccgattgagtgacggtcgtgccggggcctagcaaaagcagtcctagctggttaatcggaatctcgatagacccgtcggtcccgtgaaatagcaaggctccggccttttcgtccagccttccgtgttcgaggaaaagatggctccatctattttcgaatttcggcagttcacgcaagtccctcatggcggtcatatccgggcgaggctgacaaggccgaaaccgaagcctttgccgccgccgatgccgtttgtcactgcctctttgaatagatccgcgtccgttattgtaataacgccgtcgtaccggacggaacgaagcttttgccctttaaggttttcgttccgcgcgctcacatagacataagacggagttaaggacagagagtttttaacgacggaaaaacccgcgcgttcggctcgcgaatgtagccattcttcaagtttatctgaggccaccgggacacgctttccgttgcgtcttttgccgtcttcgccggtcttggtgcagatttttcgagtcgggtttgcaaggagcctgaaccggtattgcatatcaagggaaaagacaggctcgaaggcttttacttgcggttcggcggagagaagaaacccggcgttgtggaacgcatattgccaatcgggcattgatgcggactgaacgatgattgcggctccgtttcccgcaagagggtcgacgcggaacagaaaaccggtatcaggtttgcgagggacatgcacatggccttttgcgaagccgtcaggcttgaatggcaaaagaaaatccgggtcggctaacgatgcggaagacgaagggaacgccatgcacaagcgctgatggactctgtaaagattgcgcaaccatattcttcccggacgcggtcggtcggggttgtcgccggtgttgattaaaaggcaagaaagaaacatgacgattattccacctcctctgcgctcaggcgtctccgtcgggtttcgagagaccggtatcggactacttcttctcgtttcttgataatttcatcgcgccattgagggtgttcggggtttatccggtcaagccccattccgtgtccgtactctatcatggtgactgcgtcgtgacagagtcggcaaagagagcgcaaatcttcttgagattcattgccgccagcgcggcgatatgtcacatgctgaactgttgtcgcgggagatttgcagaaaacgcaaagtccgtggtcggagttcagccgctcggcccgcgcgttcttgtatgcggagtttgaatagtccgcgcgggaacgtggcggatcgggaactctgctttgcgccgcgtcttccgctatcctgacatctccttctgttccaactgagaggtttttcagcatcacaaaccgaggctgatgggatggcggctcgaacagtatggggacatcgtgccacactaacgcgtcatccggcgcttccggctgttcttgcgtgggcgtccagtcaatcaggcagtcgattgactgcggcgcttcatcttccttgttccttctgcgccaaggaacagatgacaacgccgagatcagatcaggatgcgattccggagggcgctcgctcaatggccgcgatggaacgcagttcttccttcccagatagagcgtccatttcggatttattacggcggtttcgatctgatcgatcactgctgaatctccctgcaaagcgactaaaaaagaagcgtcgcaaagatattctcgacgcgtgagcagcgcgcctttctttgtcttgccctcggcttccgcaatgctcatctgcatttctgcgcccacagtgtggtagtcccaccagcggattccggccctgtcaattctgacgcccataagcaaagagcgaagcttcggcaaccagaatgaggatgcttctgctcgcggaacgccaagcgcggcgcaaataatcccggaaacgccggacttcgtgggggcttcgcaggttctgcggacgacaaacttggactcatgtccgccccacgcttgcaatggcccttctagacggagaaacatcgtgttttcgcccatcatgccacctctgaattaagaacaacctcttttactttgctccagtcatatccgatagcggagacgatggcggggatcagttcgtcaagtgatttgacgttgttatctgagagatcgatttctttattctcctctatcgtctgcaacgggaaccgcaggttcggagagaaccagaatcggttttccggtttaccgtagccggcgtccagatcgaggatgtattgtccgagttgagcgacgctctgagaaacgatgtcgcgccctccgctgatagagaccggccttgcgaatgcattggcataactaacgggcgattttttgagttcaatcaaaatgccgtctggaggattatgcgcggcgaagctgttttgttttcctgtgggattgactgtcgccgcggcgcggatgaaagctcctacggtgtgtgcggcgagttctttgttgcctttcaagtttttaactaaagcctcaaaatcaattgagaaatatttgtaaaagcatgcggacgagaacaaagcttcatcaacatacccggcgcccgcgtcggctcccggaatgtcgtctgcggcaacgtaataatcaacttccggacgggcttcgtgcgttgatatggcgtgagcgacttgaagcgcggcctcgactgttgtgtctttaagaacaccggtttcaagcattcttccattcaaggccatgtcgggaacagcggtcaattcagaaataagccccccgaattccgatgcaagctcatcgtcggacttgccggaactgttttccagcaggtctgccattttcgagatcgcttcttttgtggtgtagaccaacatatcgcttttttcttcgtctttaggagcgatgccgcactttttgagtattgcgacagctctctttttggcgtctgccttgccttggattctttctgaaatcagttttgccaactgtcttgtgcggacgccgccgcatagagatttgaactcctcgctcatccttatgcttcgtttgacgcattggctggaaatgcgcgagcggatgactccgccgaaatagcaggttttcggcgcgccaaggtcgtctctgttcaagttggccggactgtggttctgtatcatgtggatttcgattagcatgttattctccttttcggtttagaaattcttccgcccatctcaggcgggttgactcgcgttcccagatggaaagatcgtcggtcagcttaacccaatcgagattgagtttttttgactcgattctgtctaaagcccattgtaaactcggctcaatgtcgctaagggatgcaagaagcaggttgtcgaaagcctgcctaaggcggtttgactcgtcggaagtctgattgcgcggcatagaactcccaagttgagacgcgagagtctttccttgttcgttggaaacggcgggacgaaaagcgtagagtttcgctatcagccacgccacttcgcggcgcggcgcgcgttgactccgttgtcttaacggccaccatattcctgtgaacaaatcaaatgcggggacggactcgtcaagtttttgtcctgagtgagcgcgcaacaggcttaactcgccggatttaaggttcgtcagcgtgtcgataaagcgctgcgtttcactcatctttttttcctcctttcttcacgcgggattttccggcggattttttttcacgcatatcggggatgacgcgggatatttgtctgcgtctttcgagagccgaagaagtaaaccccggggataaagctccggcaaccgcgctcattaatggtcggtactcgcgcgaggcgtcgtcccatgcggcagggtcgccggttagcaattcgtcaagtcgcgacgaaaccacatgctcaacatgaggacgtatcgttgcggccattgatgaattttctttatcagatctcgaaccgatccgctgtttttctatcagccaactttcttttttccataattcgataagcgtggccgccgtatctgtgcttgcaggttttgacggtattcttatcgttcgttcccagacatctatatttttcgctttgtctgtggagaaacctatcacgagaatcatattgtccgtatttgcgccaatgaatctgtttgattgggatattcgagatgccgtttccggccacggtctatccattctgaatctcccagtcgatgtgggatccggagcttttaatgatttgcgaggttctttgtctgtgtacaaaacatgaggatcatcccataattcgtttcgaagttctccggcgctctggaattcacatgttgttatcaaaaagtcccgtttgccacatcctatacagtctgacatttcgtcatcgggattgtgcagaaagacctttcttgataaggtcgtcaatccgtcaagcaaaggcgcgcaagagctagaattattagtaatcgacggcgcgacccatgagggattgcctatactatcaacatgcatccaatttgaaacgagggtttccttaagattaggcccgatggcaaatatatagattggcggagtcccgttaatgcctgcttttaggtcgggcagaccggacacggaaaacagagggagcctcaatagccccattgcgcaacatgccttgcacaatccgttgatattatctgtcgaatggcggaaatgtcgaaaattgttgccggtaggtatttcttggagcaattccgttgttgatttcttcctattcgctgattgattttgaaaaaatctttttccttctcccagcagattgaaacagtctttttccgcttcaagtttttcaaaccattcggcaggaaatgaatctcctttcaattttgtttcaccttctgtcgggttgcctttgcaccaataaagcacggccaatagaaatctcatgatggcgaaacggtccatagggttgctcgcggctatctggcgtatgcttccggctcgcgtgaacgcttccttaatgccgatggcgcttacttgtccgttgttccatagaacgggaatccattcctcatctactaaattaaacatagcgttgcctcctgttatgtgatatagccgccttattatatcagatacatagtccctttttgtcaatcaattagaatgcgacaaccttgtcatgcattctactcgttgcctgtgacattattgcgcgtcaaattgccgtctttgaaaaatatttaatcggacagtaaaaaaggaatgtcggcagggggtgggattgttcttgttggaattgttatgtcctgcgagcgaaagcaggctatgttccacccgcccggcaaacatttacacgctaaaatcggggactggcagcgcgcgccccagcgatgcctgtgcccgcttttcgccgctctgggaatgaaaggcaaattcggcgactgtgtcggaatactaattgaaaatcccgcttctttccttgattatttatgtgcgctacaaataataccatgtgcagatttggagttttcatttaaacccggatccatcattaggattcgggagcgaatgttcaaagcggaagaaatgcggaccgcaaggcgcgttattcaaagtagaggcggggttgccccgcccggaacaacgccatgatagggcgcggaaaccgcgcccctacagaaaaacaaacatgggcggcgctcacaagctcgtttgtgcgtgagaagcagtgtgccgctataaaaatggcccggttctcaggggtctataaataaagccgggttcaagcatgaatacggcagtttcatttaacgcgtttatgccagttcttaattgattttacccactcgtttgtgtgccatgcacaaaatgttttttttgtgcgtgagcgaaaacagcaacaattcatgagtaatttcaaataataagtcgtttatatcggcgaactattttttagcggcggccagccatttattgtagtctttatcccagccgctttttgccgcgtcggtgtatagcttgatgagcgggtcgaagtcttttatggtaacggggaaaaagcgtatttttgttgttttcataaggcttctgtagggtttcagggtttcggacttgtgggcgctttccatcacgctggacagcctgttgactagcagggtaggggcgttcttgtgtttcattatccccggctgaactgtcgcttccgagcaaacaagctcgttcagtttgcttatcatggcggggttgaacagcttgagggaaaagacgttcatctcgtgcacaagggcgaggtcaacctctttttttgcaagcatgtcgagcgaggccatgccgttgctgttcaatttcacttccttgaaaagcccatcgagaattttgtctccgaacatcttgcggagcggatagtagccgtcgtgttccttgtaggtggctagacgcaggtctttcattttgtcgatgcccgtgattttcgtgtccgagcttgagtagaggcacatccgggcggttttcttgtcgaaaagcgacacgccaagtatcggctcatagccgagtttagtggccagaagaaaaaacggatcggtattttttgtgaacgcgaaatcgagaacgcctttcgcggcgtcgtcggtgaaggccttttcgtcgtcgtaccatttgagttgcatatcgaccttctcgatgtcggcgacgtatttgaccaccgcgccgagaacggttttaagctgctggtcccgctcgtccggccccatgtaaacgccgaagttgtatgtttcagccgcaaaggtcgcgaccgttgacgccgctatcatcgccgccgctatcatcgccgccgccacaatctttttcatagcctccgcctccgttccgagggaaaactcccttgccgcatgttatccggtattttgtccctcattactatattaccgaaattcctcagggtttacacgaaaccgcgaaataattaacagcgccgccggaataataaacaaagaaaaagggagatatgaagagattcagaggcgcatatttgccagcaagcgaaatatagcggaattccgcagtttatgttcaatgtcatataaaaaaccgtttgttcggatgaaataattggtataattcaacaatggaaaatctgagcgacatcgcgaggctgttcgcgctgaatctgccagcagcggcggcggcgtgggtggcgtcggggttgctgacggggaatcgacgcgggcctgagcggttgcttgccgcctgcgtcgtttttgtctccacggtcgcttttaccctgctcctgttgtctatggcgggcgcgattaagtacccgaacgcgttcgcggcgcagatcgtgattctggcggttgttgtcgcggcggcgcgcgtcaaggcgaaatcttcgcgggcggtttactcccctgacgttctttcttttggcgaagcgccgcattcggagccggacgcgatggcgggcgcggcgatggccgcagtgaaaatcatatccgccgtccttttcttgatgatgtgctcgtttgcgctgaccatgccgcctgcccccacggacgcttttctggaccatctggtatttccggcggagtggctgcacgcgggaaagatagttttcgttcagacgctaagcccggaacaggcgacgacctactatccggggaacggcgaactgatgtatctgtggctgatgctgcctctgaacgacgacctgctgtgcgggctgatggagtcggcgggactgctgactgcggcgcttgcggcgcacgtaatagggctgcgggcggggatgccgccgaagagcgcggcgacggcggcggcggcgggttccgcagtcccaattgttcttgcgcaaacccttcaattcggaatagacctttattttacggcatttttcttggccgcagtcgcgtttttgatcccgcggtcggacggcgggcgcgcgaaaggcgacatgctgatggcaggtctagcggcggggctggctgtcggctcgaagtatttcggggcggtgatgctggcgctactggttccgctggtggcggcgcgcgcgcgcggcgagtcatggaaaaaagttctgtccagagcggacgcatttttcgccgccgcagcagccgcaggcatattctggtacgcgcgcaacctttcattgacaggcagcccgttctacccgatggggctggacatattcggatggaaaatattcgagggggcattcgagagggcggcgatgttccggtcatacctgcacatacccgcgtcggacatgggggcgttcgggaagatagtggtcgggcgggcgctcggcggcggcgcggctgcggttttattcggcgcggcgctgattgcgggggcgctgaaagcggctcccggcagggcgactgcggcgcgcgcggtggcgttcgcggcggcagcgggggcgattgcggcgcaggcgcgttaccccggttttttgccggcttcggcggcttctgcgcttccgctggtatcgggagtcctgtttttctcgctgatgtccgcagcgttgaaaacccgccgcgcgccgcatgttcgcttggttatcgcgctagtcccggcggtatttctcctgttctggcatgtgaacccttacaacatcgagaataacgcgaggtttctggctccgggtctgatgcttgccgcgatagggatagggattgcgatgtggaaggggaagtgggaaaggggatggtgggtggtcgcgggcgcgttggcgttgggcaacgtaggggccgcgacgcgtttcggcgcgttcgcgcgggacgcgtttttcggcggggccgggttgccggaatgggtctcaaacgcggctccggcgcttgcgctgttcgctatggcggcgctcgcgggggcggcggcgtttttcgccccggcgggacgaaaacccgctcgcgcgattgtccccgcgatgatggccgccgcggctctgtatttcgcgctcccttacaaatccggccacatggaaagattcagatacgattggtacggcgctcattatctggcgtcaggatggcgggcgctgaattccatcgactcggctttgacggtcgcgtattccggcaactgttcgccgtacggactatacggacacaggctcaaaaacagggtgatatacgcgaatgtggacggcaggcagggcgctgtttttcaccactatgaaaaagacctccgctcgttccccggctacaagccgccctcggaatcggtttggctcaatcacatcttcaggggatatcccgatttcgacgcatggcttgctgtattaataaaggaagatgtggacgttctattcctaacgcgcgagtttgcgcgcgggagagtggaaacgccggtggaagcatattgggcggcggacaatccggacttgtttcatccctatttcattcagggcgacacttttatattcgtaatcaacaaagcaaggttcaaaccggattccccggagcctgtcgaacgagaaacagattcgccggaatagaagaagctgcgagcgacggctgaagatggaatttcgctgaaaaacgagtcaaagagatgttcattgtttgtcgcgccgtgcgcgcggaaccggaagcttttctgacgaaaaatgggagcgctttatgaaagaaatgacgaggcgggattttttgaaggggatggccgcagcgggagcgggtgtggcggcggggatggcggcatggccgttcggcggcgcccgcgcgagcgaggaactgaggatatccgcgcggggggcgttcgtgcgtcagcgcggagagggtttcgcccgagtgcgcgccacatcgctcgagccggggttcaggattcaggggggagcggcggggacggacgcgtttagaatcgaactggcgaatgtccgggcaggcaggctgtcgttttcgggaaaaggagtcgagacggcggagatccgggagtcggatggaatcgtagcgctgagggcgaacgcttcgcggccgggaggcgcagttctggaaaccgcatacaacccggcgcccggcgagcgactgaactttatcgctttcagcgacacgcatctgggggcggacggggcgacggagcagttcgcgcgcgtgcgccgtcaggtcaacttgcgcagaccggttttcgtggtaaacgcgggggacaacgtggatgtggacgaaccagcgcaatggaacgtttttgaaactgagacggcgaaactcgaagctccgctgtttgcgacaatcggcaaccacgacagctacctgtcgaccaagctgtacagggagcggatgggcaatctttattacgcggtgaattacggggacacgcaggttctgatgctcgacaacgcgcagaaacacaacgacgcaacgttgaggatggacgggccgaaaccggacgaacaatgggagtggcttgaggagcagcttgcgcggcccgccgagcacaggttcgtttttttccatttcccggtctacggaaaccgaagcatgcttgacccgatgtacataaggaacacaacgttggaggaaagagaaaaggaagtcgagaggatgatagggatgttccagaaggcgggcgtggagtatgtttgttacgggcacaagcacagcgcgcaaagggaagaaatagaaggaattatatatatacaattaggaggggggggcgcgccgccggacaggacaggggagcgggacttgaacttcgttcatttctttgtggacgaaaaaggcgcgagggattacgccgttcacattcattccgaccccggagagatcacaaggatagagttctgcgaattgagggagacgctcccggtcggcgcgaaagagccgataatcgtccacggagtggcaggagacaggcttgtggcggtggagccggaggcgagaatactttccggccccggcacgatagaggatggttgcgtgctatcggcggacgcgcccggagagacgttgttaggatgttcgctcggtgaactatacgtcgaagctatgttaaatatagcataagcaaatatccaaatagataaaagattattttgaaaatctatgtcatttctgacatagatttctattaatttctcattctattgacacctcttttcatcgtgggtattttgaagtggttatgagaagaaactgtgtaagctaaaggtgtatttgtttgattaaaaataaatcctatgagaggggtgagttcacacacatgaagctgaccagaagaacgtttctgaaagtttcgggcgcgacggtagccggactgtcgctcagcggaatcggtttcgggttcaagagttcccgagcctatgccgcagagttgcgcacaaaaggcgcgacggtaacaaccaccatctgcccgtactgttcggtcagttgcagcatcttggtgcacgctgttgacggcaagataatcaacaccgaaggcgacccggatgctccgatcaaccgaggcgcgctatgcagcaaaggcgcgtcgctgtatcacctcgcggtgaacaacgacagagtgactaagccgttgtatcgcgagccgtacggcaaggaatggaaagaagtgtcgtgggactgggcgctcgacgagatcgcaaagcggataaagaagagccgcgacgcgagttttgccgagaagaacgccaaaggagagacggtgaaccgcacggaaggaatcgcgtccgtagggagcgccgcgctggacaacgaggagtgctacatctaccaaaaattcctcagaggtttgggcttggtgtatatagaacaccaagcccgcatatgacactcggctactgtagcggctctgggagagtcgttcggccgaggagcaatgaccaatcactggatcgatttcagcaacagcgatgtcgtgttggtgatgggaagcaacgcagcggaaaaccatccgatttcattcaaatgggttacgaaggcgatggagaaaggcgggaaacttatcagcgtcgacccgcgtttcaccaagacgtcttcaaaggcggatatttacgcccgccttcgctccgggacggacattccgttcttgggcggcatgattaagtatattctggacaacgatctgatcgacaagttctatgtccagaattacacgaacgcttcgttcctaatcaacaaggacttcaagttcgaggacgggctgttctccggatacaacgctgaaaaacgcaattatgacaaggcgacgtgggcgtatcagaaagacgccaacggcgtggtaataaaggatccctcgatgcaggatccgaactgcgtatatcagcttctgaagaagcattattcccgctacgacatcgacaaagtggcggaagtgacgggcacgaccaaggacgagcttttaaaggtctataagacgtacacttccacatccggtcccgcgaagtccggaaccatcctgtacgcgatgggttggacgcagcatacggtgggaacccagaacatcaggactatgtcgataattcagttgttgctgggcaacatgggagtggccggcggcggcgtgaacgcgctgcgcggcgagtcaaacgtgcaaggctcgacggacttcgcccttctattccacatactgcccggctatctgaagttcccactcggcacacaagccacgctggcggacttcctgaaggccaccacgccgacgacggcggagcctcagagccttaactggtggagccacaccccgaagtacatggtcagcctgcttaaggcattctacggcgaatcagcgacgaaggaaaacgatttcggatacggctggctgccgaagggcgatgtgggagccaactactcgtggcttaacctgttcgaccagatgagcaagggcaaattctccggattcttcgcgtgggggatgaacccggcatgcagcagcgcgaacgccggaaaagtccgcaaagctctcggcgaactcgactggctggtgaacgtgaatctgttcccgaacgagacgggacagttctggaaaggcccggggatggacccgagcaagataaagaccgcggtgttcatgcttccctgcgcggcgtcggtggaaaaagaaggcagcatcagcaacagcggacgttgggcgcagtggcgctacaaagccgtcaatcctccgggagaagcgatgccggacgccgagattatcgacggcctcattcaccgcttgaaagagctatacaagacggaaggcggagcattcccggccccgatactcggactagcgtgggattacgaggaaaacggacacctaagctctcgcaagatagcccgcgaggttaacggctattacacgcaggacgtggccggagcggacggcgctgtgttaaaaaaggggacgcaggttacgaacttcgtcggcctcaaggacgacggctcgaccgcctgcggcaactggctgtacagcggaagttatcccgaagccggaaacatgatgatgcgccgggacaacaacgacgcgtcgggcatcgggctttactccaactggtcgtggtgctggccgttgaaccgccgcatcatatacaaccgcgcgtcggtagacctcgacggaaacccgcgccgccccgaactgcccgtcatcaagtgggacggagccaaatgggtcggagacatcgcggacaacgcggctcccccgatgtcggacaaagaaaaaggcaaactgccttttatcatgacatgggaaggagtaggcaagatattcggtcccggactggccgaaggcccgttcccggaacactacgaaccgctcgaatgcccggtcgagaacaacgctttcagcggacagagaatcaacccgaccgtcaagctgttcaacgaaaagggcgagggcgagggcaaggacgtttatttgacctgcgatccgcgctatccgttcgtttgctccacgtacagggttgtcgagcactggcagaccggactcatgacccgctggaacaagcagcttgtcgaactggctccgcagaacttcgtcgagatgagcaaagagctggctgccctcaagggaataaagaacggcgaaatggtcacaatcaagtcggcgcgcggccagatcgacgtcgtcgcgatggtcacatcgagattcaaacctttcacaatcaaaggccagaccgttcatcaggtaggaaccacatggcacttcggctggtgcgcgcctgaaaacggcggagacaccgcgaacctgctcacgcccaccgtgggcgacgctaacaccatgatccctgaatccaaggcgttcatggtgaatatagaaaggaaggggtgatcgggaatggcatacgcaaaactttttgactcttcgaaatgcatcgcctgccgcggttgccagaaagcctgcaagaactggaatcaggacgccgcggaaaagacgaacaaccgaggaacccaccagaacccgcccgacctttctcaccagacccgcaccgtggtcagattcaaggaacaggaaggcggagacctcggaatcatctggacgttcttcaaggactcctgccgccactgcatagagccggcctgcaagatgatcgccgacggcacggatgacaaagccgtcgtcatcaccgacacgggcgccgtcatatacaatgagcggacagctaaggtcgaagggatgaattgcggctacaacatcccgaaacaggaaaaagacggagcgccgtacgttaagtgcacgctctgtttcgaccggatcacgaacggcctgcagccggcgtgcgtcaccacttgcccgaccggagcgctcgaattcggcaagcgcgaggacattgttaaactcgccctccagcgcgtcgaagaggccaagaaacgctacccggacgctcatatttcgagcgattacaaggaagtcaactacattcaggtcttccactacaaggaagagatgttcgaaatgtacgcggacagggagaaacagcagaagatcaaaatggcttcccgccgcgatcttctcaatccgaagaaagcagccggaatgatctcgaagctgctgggctgacattttaagaagcacaagcgaaacgcaaggggcggctttcgggccgccccttttttattatatcaaaagcatccgaggcgaatggcggcaataaatgctgattgtcacaaatgcgtttgcgcgtatatacgaagaattgaatgaaggttcccattaactattttggtaaaaagcataatgcgcaaagaaaaaagtttgcgcatggcgcgcttggtagcgggtggaatcatttaataacatgtatagcctaatgacaaacgttgccaattgcggttttagctgtaggggcaattcatgaattgcccgctgattgggctgtcgcctttttcctttatcgcacatccgggcaacccggcgggtcgccacctacgggcggatgtcgggtatattattggcaacatcagaagaggcgcgcttcacattttgccgaaggggtcgtcccgccagtcggacatgaacgacaacagcttgtccatgtcgggagtctcgcctgtcatcacgtaatagcctgagcagcacacgcccatgaggagggccgtttggggatcggttccgagagcgagggcgagggagaaagccgcgttgaaatggtctccggctccggttgtgattacggggcgttttgtgtgtgggccgtcctgatggtaggttttgccgtcgacgacggtgacggcgaattcgacgggatgcaccacgacggagtagatgtcgagcgcgcgggagatttcctcgcaggcgcgggcggcggcgtccggcccggaagcgtcggcggagacgccgagcgcggacgctatctgcccagcctcgcgtccgttcagcccaagtatgactttatagcaacttgaaaacttcggaactatgctcaacatccttttaatgtcggacaactcccgtttctgggggtcggcaaggtcgatgaagaaaaagcggtcgccggctttggaaagtttcgggcagacttccgcgatgatattttcccagatgtcggacatgaacgggagcatgctccagttgacgagagcgagcaagtgggcctcttgcagcaatctgacaaaacgctcttttccgacatcctccagaatcctgtcccaagtgacgtctgatacgggggccatctttcccaccatgatttttccgtcgaggaactccaccgcgtccgtatggcaaggctctgcgatggatattacgtttgcggcgtctttcagggggcgaaagacaggatggatatccggcctgccgagcgttccgatataagtcgtcgagacaccgagagaggcgatggcgttcgccataatcgggccgttgccgccgatcttcactcgctgcggcacgtactctatgttgccgctcttgcccgcgtagctttttatcctttcggcgtagttggacatcagttcgagccgctcgtattcggagttgttcttgcgggtgtccaccacgtggactatctcgtctatgaatccgtccaagccgacgacgcagcgtctgtttccgggggatttcttttttgtggatatgttcttattgagccgcgaaacaagctctctttcggtttgttgtgacattttatctctccgcgcgcagtgtcgataaaatcggatatagtatataacggcgtagcggcgaagtgaaggaaacgccgtccgaaatagcgggggattagcgcatggaaggaaagatatacatcaaaggcggaacagtttttgacggggtcggcgggccgggcgtcaggagcgacgtctacatagaaggcgatacgataaaggctgtgggcgacgaggcgagcgccatggcccgcgcggatgatcccgcgctttcatccatcgacgccacaggcaagatggtgtgtccgggcttcattgatatgcacgcgcattcggatttcaagatagccgtgaacggctcaatggaggcgaagctgaggcagggggttacgacagcggttgtgggctcgtgcggtttttccggagcgccgatgaacgacaggctgaggagggatttcaggggatacctctccggcatgtttggaacagagtgtcagtttgaatgggattccaccgccgggtatatcgaacatatcaaaaggatcggaatcggagcgaatgtgtttctgcagaccgggttcggcaatttgaggcagatgacgatggggcgttcgccgttaaaagcgaacgcggggcagatagaagcaatgaagtcgttgctggataagtcgcttgacgaaggcgcgagagggttttccgccgggctggcgtatccgatgcagatgttttcgtcgagagaagaagtgaaggctctctgcgggacggcggcgaaacgcggcgcgctgttcagcgttcatgtgagaaacgagatagacaagcttgaggaagcgaaccgggaggcaatcgggatagcgatggaaacaggagtgtctctgcagatatcgcatcacaaggcaatcctgagccgaaactggggcaagccgcgcaaaacgatgaagatgatggaggaggcgcgcgcgcgcggcgtggacgtcgaggcggatgtctatccgttcacggcgttttccaacatactcgccacgacgatgctgctgaacgagccggggatggaggaaaaggtgattttcctcgaactgaaaaaattgaagcagtacgaggggcgcacgctggcggatgttatgaaggacacgggcaagggcgctaaagccgccgcgctccatgtgcttctaaaagaaggtttcagcaacgccccggtcgcgggcgaattcatatccgaagacgacctgcggttcatcatgtcgcatcctcttagcagcataggatcggacggggtggagacggacgagggggcgaaggcgcatccccggctgttctccacgacggtcaggttcctgaagcattatgtcattggagagaagctgatgccgatgggagaggccgtaagaaaaatgacgtctatgcccgcaaggaaaatcggggctgcccgcaggggattgataaaggaaggttatcttgcggacatagtggtgttcgaccctgacgcgcttcgggataattccacgtatgaggaccccgtcagatatccgtgcgggttcgacgcggtgattgtaaacggcgaaattgccgttatgaaggatgagattacaagcgcgcgcgcaggaaccgtgctttgactggcagagtcagaaaaataatagttcttttatatactagataaaatatataaatatgttatattatacggattcgcgcggatgtccgacgggcagacgcgcttgtcaagtccgggtttttcttgcgaaaaatccgggttaggcgcgcaaccgaccggagagagttttgagggtaatcggcggcgatttgaagagatccaagctgttcggcccggaggatggagacgacagcataagagtcacatacgaccgagtcagggagagcatattcaacctgaccgggccgatggacggagcaaggtttctggacctgttcgccggagcggggagtgtgggaatagaggcgttaagccggggagcggagagagtggtgtttgtggatcactcgtcgaaagcgatacgactggtagagcgcaacgtcagtaaattcgggcttgagggcaaggttgaaattataaggatggacgcaagggaatacgtcgccggaggggcggcgaggggaattttcgatctgattttcctcgacccgccgtatgacggggggatgttcgaggcgacgatggaatcgccggggctggcggacatgctggcggacggcggcaggattgtcggacagcacggagcgaaaccggtttgcggggagttcggaagtctttcaatgcgggactccagaaggtacggctcaagctgggtgacggtctggaaaaacattaaggacatcgaaaaatgaacatggcggcgtatccgggaagtttcgacccgatgaccaacggtcacatggatatagtgcagcgatcggcctcggtgttcgacgagcttatcgtcgcgatttccaacaacccgtccaaaaaacatcttttctcgattcaggagaggatggaaatagcgaaggaactgacgaaggacatcgccaatgtgaaggtggagagtttcgacacgttgcttgtggattatgtgaaggcgtgcggagcgaaagcggttgtgcgcgggctgcgcgcggtcacggacttcgagatggagttccagatggcgctggtgaacaaaagactggctccgaacgttgagacggtgtttctggtgacgagcacggagcattctttcataagctcctcgataataaaggaagtggcgtctttcggcggggacgtgagttctcttgtgtcgccgatggtggacgcgaagctgaaggaaagatattcaaagaagtgagagcgggataaggcgactagggaaggcgggccgggattgaagaaagaaaaactggcaaggtttcagaagttgctggacacgctggaatcgcatctggacagcggttttttcctttcatttataggaaaaatcgttgtggacgaaaagaagatatacgcgacgctcaatgaaatgaggtcgatgaggatagagatggaggccgaggcggaagaggactcggcaagggcgacggcggagaaaatgtcttcgcctgagggggccggcaaaggggacgtcggggccggcgcggaaatgtatgccctccagacgcttgacaatctggagcaaacattgcacaaagttatgagcacggtgaaagaaggaagaaagtttttagagagaaaaatggagcgggaggtgaaagaagatggcgcttccgaaatataagaaatcgcgttcgagcacacgaagccagaaggcgcagtggaaaagaggcttgaagacgccgacgctgacggaatgtccgcagtgccacgaagtgaagatgacgcatcgcgcatgcgcgaaatgcggctactacaagggcaagactgttcttgtgaccaaagtcgagggataacggaggcaggacgataaatgtcagacatgatagatcgcctgaagaaagtgatcatggcggagcttggcgtgtcggaggacaggatagtgatggaggcgtcgttcagggacgacctcggagccgactcgcgcaagatattcgacttgataatggccgtcgaggacgagttcggcatagaagtgccggacgaggacgcggtaatgatagtcacggtgggagacgccgccgattatctgaaaaaacggcaggtgtgacccgttgaacctttcccccctcgaagttcgggacagagaaggattcccgaggccgctcgaggacttgctgggaatcatcggcgtggatttcaacgaccagtcgggtttgagggcggcgcttacgcatccgtcgtactggggttcgtgtgtgctgccggaacgcgagcggcttgaacgcagctacgagcggctcgaattccttggcgactccgttctagctctttccatctgcgaacgcctgttcaaatcttttccggaagacgatcagggcgcgatgagcaaggccaaggcgcacattgtcagcaaaggcgttttgctgaaagccgcgcgaagaatcgagcttggagatttcatccgggtcggcaagggcgtcgaggagtctgccggcagagaccacacggcgttcgtggtcgattgtttcgaggcgctgataggggccgtcttcatcgaccaaggattcgagagggcgcgcgatttcgtcatcgagcggatgtctgagttccttgaggaggcgggcggcgaggccgcgcgcgacttcaagacggaacttcaggaatacgctcagaaacgccacaagactctccctcgatatgttatgatatccgagaacggcccggaccaccgcaagatgttcaaagtggaggtcttcatcaacggggcctcgcacggaaccggcgaggggcgaagcaaaaaggaagcggagacggaggcggcgcgcgcggcgatactcggcatgagcgccgacggctcctgagacgataaaaaacaacaaggcccgcaatgtatctgaaatcggtgtcaatgttcggattcaagacgttcgcccgccgaacggtctttgagttccgcgagggcgtcactgcggtggtcggcccgaacggcagcggaaaaagcaatctggtggacgcgataacttgggcgctcggcgaacagagcatgcgctcgatccggggccgcaagctcgaagaagtcgtctatcacggcagcgccagccgcaagcccctcggcttcgccgaagtcgtcctcactttcgacaacgacgacggctattttccgctaccccaaagcgaaatctcgataacccgaaggtactttaaatccggcgagagcgagttcgccatcaacaacgagtcttgcaggctcaaggacattcaggagttgctgatcgacaccggactgtccaccacgaactattcgataatcaatcagggcgacgtcgagtacgtcatcgacttgtccccctcgcagcggcgggagatattcgacgaggctgccgggataaataaatacaaaatcgaaaaaaccaaaacgctgtcgaaaatcaaagacacgaacatcaacatctcccggctgaaagacattctgaccgagatctccgaatcgctggggcctttgaaagagcaggcggaaaaggcgaagcggtacgacgagatagtcgaggagatggaaaggctgaagctgggcgttttcgcgtccgagataaggcgtttgaagagccgcttggaacagctttccgtcgagggagagggccttaaggcaaagagggcggaagggctgaagaaagtcggcgagctgagacagtccagagagaatgtgggtgcgggcatagacgcggcgcgggcggaaatcgactcggctctgcgcgagttggcggacatcggctcgaaactggggcgcgcggaggaatccgcgaggctgctggcccgcgcggtggaagacgcggacagaagggccgccgccgctgacatcgaaaaagccgatatcgtaaagcaggagaaaaatctcgaaaaagacatattagaccttcgcgcgaaggccgagcagaaaaaacgcaggctcgatgaagccgccgccgaacttgaaaacgccacaaaacaatcctccgacgatctgaagctgaacaggaaagacctgacagagaagcgcgacgggcttctgccggaagccgaggatttgaagaagctggaggcgagccttgcgggcgagctggcggtggcgaaagacaggcttgcggggatggccgcgcgagtgaagtctctgacctccgcccgcgattccgcgcgggacaggctgtcggcggcgcgggaacgcggcaagtccgagagcgaaaaagtttcgcaatttgaaaaacaaatccgcgaaaaagaatcgcaggcggaaaagcttcgcgcgggcatcgaggaaacttccgccgcgcgggataaagcgcggtcggcgcttgatgcggtcgtcgcggagcgcaacgctttgtcggcgcgggtcgaagctatcgaacgcgtagcgggcctgatggccgtgagcgaaaaagggaaacaaaccgcccggctcgccgacgagattgagatcaaaaccgggttcgagcctgccgcgcgccgcgctttgaacgagcttttcaacgcttctatttcgacgtccgcggacatagggaaggcgctcgaagaggccgccgacggcggggccgcgaggctgattcttgactggttctcaggagccggggcggcggctgcggcggctctcaaaaagaaaaaatgggcgaaacggctcctgtcggacgcggtttcggtcaaatccgcagcgccgaacgagttgctgaatgtattatcaatgttcgcgattgtcgacaccgacgcggagatgaaagaggcgatttcggaactgccttcgggagccggggttgtgagggcggacggagcggcgtgttttatcaacgggacgctgttcacgggcgaagctctgccgaccagcgaggccgcaagagagcgcgtggccgagctaaagtccgaactcgaaaagaagaacgcggaagtcaaggcggcccgcgccgcgcgcgaagaggctgaaaagaaatacgcgtcgctgaggtcgtcgtccgaagcgtctggaaaagaatttaacaaactgaatatcgaactggccgcggcgcgcgagcgcgcggcggcggctgtggagcgcgtcgaaattctgacgaaagacctagaatcggcggaaaaagcgctggccgaatgcgcgtcaaccggaggcggctcagagtcggatgtcgccaagctcgaatcgaagttcaaggaagtttcagaaaagagaaagagcctcgaagccgagttgaagacggcgcagtcggggctggacgagatagcggacgcgttcaggaaacgggagatgcgcgaggttgatctgcgcgtcgagatgggggaactgaggcgggagatagaggcggcgggcgacgccgagaagtacaggcaggcggagttggagcgggtgcgaaggagaagcggggatatcgacgcggagaagtcgaagctgtcggcggacaggctccggacttccgaagagatgaaagcgggcgaggcgctggcgaaggagcttggggccgcgcgcgccgccgcggaatccgcgctcgcgcagaaacggaccgctctcaaaggcatggaagacgaaagcctgcggctgcgcggcgagatacacgctgttgaaacccgactggaagaactcaaagaagcgatgctggacagcgagatgaagtgcgcgcgcgctgaaacgcaactcgaagagatcagaaggcagttctcggaggagttcgacgatgtctccgaggagcgggcgcttgaggaaaccgcagacggcggcccggccggaaaaggacgctacctcgcgctgaaaaaagagctcgagacgcttcagccggtgaacatgctggctatcggcgaatacgaggagaagtccaacagattcgacctgctcagcgagcagataggggatcttgaagacgcgcgcgcgaccctgatggacatagtgaacgagtatgacgaccgcagccgagcgcagttcatggagacgttcgagcgggtgagggagaagtttcaggagacgttcgtcgagatgttcggcggcggcgaggcggagctgatgcttgtcggcgacggcgaccctctcgaatccggcgtggacgtttcagtgcagattcccggaaaaaggatgagggcgataacccttctgtccggcggcgaaaaagccctttgcgcgctggttctgattttctccatactcaaagtgaaacccagcccgttctacgtgctggacgaggttgacgccgggcttgacgaaagcaatattgtgcggttccgcgaaatgctgaaaaaacattcgaccaacagccagtttctggtcgtcacccacaacaaaggaacgctggtgggagccgatcaattgttcggcataacaatggacaaacaggaaggatactcgaagctccttacggtatccatggaataacaaccatgttcgacagattgaagaagggtctcaagaagaccagcgacagcttacggcataaaatatcagccgccatagggcgggccgtgaagatagacgacgagttctgcgagaggctggaggaagcgctgctgttgtcggacgttggcgcgtccaccgccgcgctgatcgtagatgaaatcaaaagcaaagcggtcgaaaaacgcccgccggacgcggaagcgctaaacgcgctcatcgtggacatactctccgagatactcgaatcgggcgctgcggcggagcctttggcccccgggctgaacgtcgtcatgatgatgggcgtgaacggctccgggaaaacgacgacgataggcaagctggcgatgcgctataaagccgaagggcgcaaggtgatgctggcggcctgcgacacgttccgggcggcggcttccgagcagcttgagatatgggccaagcggtcggacgtgccgataataaggcagagagagggcgcggatccctcggcggtcatgtacgacgcgatacaggccgcgcgcgcgcgcggcgccgacctgcttatagccgacaccgccggacgccttcacactcaatccaacctgatgcgcgaactccagaaaatccaccgcgtggcggtggaaaaagccggggtcgagaacttcagagcgtggctcgtcctcgattccaccatcggaagaaactcatacaatcaggttcagcagttcggacaggccgtcccgatagacgccctcgtgctgacgaagatggacggaacggcgcgcggcggggtcgtattctccatactcaaggaatggcgcatgccgattatgttcgtcggcgtcggggaaaagatggaagacctgctgccgttcaacgcctccgaattttcccgcgcgctgctcggcgacgcggttgacccggtctaaacctgaaaaactgtataaatccgaaaaactgtataatcctgataaaccgacacaagagactgtcgcttttggcgattggggaaaaaccctttgaaaagggttctttccccaacccccttttcccaaacttctcaattttgttttatgataactgatgcgcaataaaaaatataaccatcggatgtttctatcaaagaacagacgtctattattatcaacccaaagagcgacagaggaacctccccccattggttggacagaaaatgggggtttataaggtggggtttggtgtaggttttagtcttttgcctttgactttgcctgttcctgacgcacgcatcatgcgtgcgcgcgcgcgtgtacgtgtgctcacacgcgaggagttttcccaagtccccgcattcgattgttttgctttgccacctcctgtcgccgggcggtttttctctctgtaaaacgcccctccattcctctgtggcgcgttttcttttacgccgccacaatatcactcgccgcgctgtttcgcaagccctgcgggccaatttcgacgctccggtcaaagtacacctgggcgggcgtcgcgtagcccagcgcctggtgagggcgcacttcgttgtaccagcgcaaatatctcgaaatctcacgctccgcttcccatacgtcggcgtaatccttcaggtaaacctcctcgtatttcaccgaccgccacagccgctccacgaagatgttgtccatgtaccgcccgcgcccatccatgctgatggcgacgctcctgtccagcagtggctttgtgaacgcttcgctggtgaactgcgcgccctggtcgctgttgaatatctccggccatccgcgcgaaagcgcctcttccagcgcttccacgcaaaacgccgcgtctatgaaaatgctcagccgccacgagagcacgtaccggctgtaccagtccatgatcgccgccagatacgcaaccctgtgcgcatgcggatgtacgtgatgtccgtggcccacacctggtcgggacgctctattgccagccccgccagcaggtacggatacttgcgggccgcggcgtcgggaatgctggtgcgcggcttcggatacaccgccgcaagccccatcaccctcatcagccgctctatgcgcttgtgattcacctcgtgccccatgtttcgcagcagcttcgtgaccttcggcgaccccagactcggatgctccgtgtacagctcgtcaatcagcttcatcaggctcctgttgtactcgctttccccgcatggctcgtagtagtaactcgaccgcgccagtcccatcagtttgcattgccgccacaccggcagcgcctctctcgaagggtcgatcagccgccgtttctgctcagtcggcaagtccagatttttttttaagccagtccaattcgaccttctgctgcccgatctgccggtaaagctcccccacatgctcctcccggcctttgtcctctctggcccgcttgccgttgaatacacccggcaattcttccagcaccttcttcttccactgcccgatctggttcggatgcacctcgtaaatcttcgccagctcggcaaccgttttctgccccttcagcgcctcaagcgccaccttggccttgaacgctggggtgaatttcttcctcatcgctcatccctccaaaactggattctacaccaccacggtttccaccttaaacctctgtccagtttttggggggaagctcaagacgattgacaacaagaccgcccgatatggtatagtaacaccatgcgagaacagcaaaaataaaggaggcgtaaataggcggctgtaccgggatattctagcaattttagttgtttagcattgtggtggttcccggttttgctctgattcatctcggggtgactgatggaaatattgaaatgcaggaatagctttatcactacagacaccacatcaaggcaaaatgacaggctcatttattgacattttagatgtttgcgaataatgttaggtgaaatccttatttgtgaaggtgaaaaatggaagcatggtggggtgcattaagctcttttgaaaaggtattttgggctgttgctgttgtattctcggtgtttttcttgctccagctcatattcactttcgcagggggcgacgatatcgactccggagatgtagatccgggcagcgacacgcatagcgatttatttcttggtttttttaccatcagaaacatggtggcgtttttcctcggtttctcttggtttggtttggcctgcttggagaaaggcttgtcgaagtcgatcacggtaatcatcgccggtgtttgcggagttgtaaccgtagcgttggtgatgctgcttatgaaagggctttcttccatgaaaagcagcggaactctgtcgctgaaaaacgccgtcggaaaagaaggctctgtaacgatagcagtgcccgaaaacatgaatggcagaggaaaggtcaatattgttcttcagggaagactggtagagcttgatgcggcaacaaagggagataggctaaataaaggagaacagataaaagtaatagagacggtcggggatcaaaccttggtgattgaaaaaatcaaataatgtttcttgcggaggattattaaatgtacatgcttatcggtcttgttgtagtagcaattgtgcttttcgcgactttgctcgccgcgatgactaggtaccggcggtgtccgtcggaccagatcatggtcgtttatggcaaagtggcgaagggtcaaacgtcgaagtgcatacacggtggcgcagcgttcgtctggccgctttttcaggcttgcgaatatcttgacctcacgccgatgacaatcgacatcggtctgaaaaacgcgttgtcgaatcagaatatcagggtggatgtcccatcccgattcacaataggcatttccaccaacccatcggttatgacggtagccgcagaacgccttctcagcatgagcaaggagcaaattgaggaaaatgccaaagacattattttcgggcaacttcgcgctaccatagcaacgatgagtattgaagagatcaatgcgaaacgtgaaaagttcgaagaagaagtaatgaagaatgttgaatctgaacttgagaagctcggtctcaagctaatcaatgtaaacatcaccgacatctccgacgaatcgggatacatagaggcgttagggaaaaaagcggctgccgaggctataaacaaagccaaggtggaagtggcccagcaggaaagagacggcaaaaccggcgaagcgaacgcgcaacagcagatgcgcgttaatattgcaaacgccgaaaaagacggcctgaccggagaggcgaacgcgcaacagcagatgcgcgttaatattgcaaatgccgaaagggacggcaaaaccggcgaagcgaacgcgcaacagcagatgcgcgttaatattgcaaatgctgaaagggacggcaaaaccggcgaagcgaacgcgcaacagcagatgcgcgttaacgttgccactgccaatgccgaagccattaaaggcgagaacactgctaaagtagtcgaggccaactcgaacgctgacagacgagaagcggaagccgaagcagagagaaaggccgtcgccgcggaaaaaaccaaagccgccgaggccgccaccctagcctacatagccgagaaaaaagcggaggaagctagggctgatagagaaaaatccacccgcaaagccgatgtggttgtgccggctgagatagaaaaagaaaaattaatcatagaatcggaagcgataaaggaacaacaaacacttaaaggacagggtgaaggcgcggaaataagagagcggctgagcggagaagcggcaggcatccaagaaatcctaaagaagaaggccgagggcttcgcggagatggtaaaagccgcgaacggcgacgcggaaaaagccgccatgttgctcatagtggagcagttgccggaaatcgtaaaagcgcaggcagaagcgataagcaacattaaattcgacaagatcgtagtgtgggactgcggcggcggcggcaatggcggcggctcgacagcgtccaactggttaggcagtttcacgaaaatgctgcctgcgatgcacgatgtctgcgagatggctggagtcagccttcccgaatttcttggaaagatcaaagatcaggaaaagaaggaaggcgaaagcagcccggaaaaccaaccgaatcgaccgtaaagcatgaccaagactcgctcagaaatgggtgaatgaccattttgggtttttgccaatccatcgcgcatccattatgggcagaacgaaaagaactggtggctaataatggcgactggtcgtgttattacagaagtcatcgacgaagtagaaacgtattttagaatcaaaagagaaaatcgagcagattataattgtgaaggcgcatattagcaatgttgttcttattgttattattaacagcggttattatcgaagtggcatacaatgtaataaagaaaagacatcgcgcgtttaaaaatttagcatttgtaaatgttattgtggcatggttcgttatgatgctcacaagagatgtgtctgatgaagatctatcatttaagctttgcataaatccaattgctttgattgttttaattataaatctttttgtctttattaaatactatttagcgttggcgatcaagacaagaagaaaaaacattgcgtttaagcaaacatatcttgatgaacaagatgtaaacattgccataaaggttgttgcgtctataagctttattttattatgtttagccattgtctacatgatattaacaggaaacaatgggcggtgactttgagaaaaacggacacccgtcgcgaaatgcagcgctgcaagtccccgtttttcgctatgcgttcacaatatggttgggagcggcgctcggcgcaatgggtaaaatcaaatggcgcttcggctattgctcctatttttgtgattattgaacagtattgcgcaaatccggcttagtaatttgatgtgaagtcgatcatgaaatcgttggtgtcggcgaaccagcgggtgttgatgcgcgtgccgtagaggtcgtagtcgacgttgaagttcttggtggagaaatggttgtttttcagattgtaaatgaagtccgtgcggagtctgcattttttgttgacggtgtaatcgaggccggaagacaggctgctgatggttgcttcgcggatgtcataagtcgccgacagggcggaattccacttaagccctttggacttcgacacgtacaacataagctggcgtttgacggtggaggagccggtgtatctgctgtcagtgaaattatagcgggcctgaatcaacattccctgccggggtctgtggccgatgcgggcggaggcggacaggcgggcgctgggcctgccttcggtgtcgccgccaagcccggtggctgtgttccaatcaatgctggtcttttttgacagggcgattgaagggctgacggcggtgagggtggtgtaggccgccgtcacggcgtcggtataatcgaagttgtccatttttatgtgagagcttacggaatagccgacgccccgcgtgttgccattgacgaactttctgttgccgtcgaagctgacgagggcgttcatggatgattggccgtagtcgccgtctccagttctgcggcctgagaggtagccgtttattctggttttcttaatgccgcccgcggctccgagccggaatcctttcgccccggaaaggtcgtagtccatctgaagggtttgcgatctcatgccggcggcgtagcgcgacatggacatggtgtagcccctgtctccgccgaacaggttgcgcatgttgaactggccgcttgtctgggtgttcatgcggaacgactgtcgcaggtccgcggaatatgtgttcgagctgtccccgtggtagttcaaatcgacgaagcctttgaagtcgcgggcttccttgtagcgcacgttggcgccgactttccagtccgcgtttgagccgtagctgacgttccggatgcgccatttgccggtggtgtattttttgctggtgttggtccagaaagggagggacattactttgttgccttttacccacatggtggcgcgccacgcttcgtactggtcgccgggatagatgcgcatgcgggcggcggtcacggcgtttgcggtgagataaggctcttcgtagatgtagaacgcctgtcccatcagaggctcttgggccgtctcgttgagttcttcgccgaccagataaaaagtcctgacgccgctttgggtttgagtgaggatgcccgccgcgcgatccaagtcgaacttaagttggtcgcctgaaaatgaagcgccgtccatgcctgtgatctgagcttcgacgcgctggtcgagcaggtcgccggtttcttcaatgtccgtcaatatagggttggtggacggcgaagccgtgtcgcccggcagcgcggaagcggatttcttcatagtggaagcgacgatgccgccttctgcgtagaagatgtgcgatttcacgtccacccgtatcgagtcggcttgaaagcgaaggttgccgtgaagaagctcgacctgtccgtcgcagtaaatcacttttcggtctatgtcgaacattatgtagtttgcggtgattgtgtagtggaggttgagagcgcgcgcgggcacagcggcggacagagtcgcgagaacggccaatgccgttgccgccgcaataacaatttttcttttcagcaaatcagacactataagacaacctgccgcagttaaacatgcccgaaaacattccgggtacgccaatatagcgcgcggattcctccgcaaccgtattgtatcattattgaaaagcaatgtcagcgagggaaaaaataatatatggataatagatttttagtaatttgcggtgaaaccatttttttgcaaaaaacaggtttccccgcgccccttccgaaaaaaactcttggtcgccgattttgctgaacttcgttctttgcaaaatcggcttttttcttagatcgatgaaaaccagatgtatggcgatgttgatacaaacttaacataacagagattccagttttgagacgatgcgggaggcggcatggccgtcccagagttcggggactcggccctgtttccagtcgccgcgcagggcggcggcggcggcgcgggagattttttcggcgtcggagccgacgaggatgttcgttccgacgtcaacggtgacgggccgctcggtgttttcgcggattgtggcgcacgggacgcccagccaagtggtttcctcctgaatgccgccggaatcggtgaggacgatcttggcgttcatggtaagggagaggaattccagatatccgagaggttccatgatgaagatttttccggcgggaattgaagcgccgtcccacgctgcgaaatggtcgtccagcccgaatctgcggatgttgttgacagttcgtggatgcgccggaaaaaagaccggagctatggaggcggtggcctcaagggcggatatgatgcgggagaatgtcgccgggtcgtccacgttggagggtctgtgaagggtgagggcggcgtaatcgccggagaaatcgccgagagggcggaccgcctcgccgttcttcactcgccgcgcgttttccgccagagtgtctatcataacgttgccgacgaagaaaatgttgtcttccgcgacgccttcccgcaggaggttgtcgcgtccgctcggttcggtgacgaagaggtaagatgaaatcgagtcggtgaggacgcggttgatttcttcgggcattgagcggtcgaagctgcggagaccggcttccacatgggcgaccggtatcatgagttttgcggacacgagcgagcaggcgagggtcgagttgacgtcgccgaccactagaacgaggtcgggttttaattcgagcacggctttttcgaaggctaccatgacggcggcggtctgggccgcgtggctgccggagccgacctctaggaaaacgtcgggccgggggatgttcaactcgtcgaaaaaactctgagacatattgtggtcgtagtgctggccggtgtggacgaggatggggcgcagggaggggctttctgccattgcgcgcataatcggagccactttcacgaagttcggtctcgcccccgcgacgatgaagattttcttttttgtcgactgagtcatgatttcatccatgccggcctccgatttcaacgaggaaggctccgcttctgagcgttttcggcggctgccagtatttcatcggtaaacttcttgaaattaggacattttttccgcacggttttaggcgagagttttttaaacagattgacgccgtcaacggtctttttatagctgtaattttttttatatttcctaaaaagttccttgagaagttttgccggggggttatcgaagtcgactgtctccggatttccgcattcaactggcagtttgatcccgcgagggaatatatcgggatcgctgagcaaccatgcttccagctcatgaacggcgaaatgctggcggaatctaggtctgcattcttccggcaaagattctatgattctttttctcgcaaaatcgattttttcatcgacagtgtttccgcctttgcacttttcgggcaatccataaaggtcgagcaagccgaagatggcgattacttcgctattatcaagatgtaattgagattttttgccggcgcgttttaaataatcgccgcaacccgaaaaaacaataggttcgacgctgatcctgttgtccagcttggaatccagccattttttaagaaaatcaggaagtgttttgttttcggtatcgccttcgacgaaaagaagtattttcatggatcatccgccgatttctctatcgagccataatctgccgagggtgtattcctccagccatttggaaagggaatcgcggtcgagtcttttcgcagtggtcgcgccgtcttttttttccacgaccacgactgattccggcatgtcggagaaggcgcttaaaagttcgggagaatgagtggaaacaataagttgagttctgtttgacgcgtctttgataagctccgcgatgatgccgagcatagaagggtgcattccaagttcaggttcgtcgatacagattatcggcgggggttccggggagagaagaatcgcggaaagcatcaggaaaagaatcgttccgtcagacaggtcggcgggtgaaagctcgcgtttaagcgttttcgagcgccatttcatatagattctgccgttttcgagaggcgggaatgtcagttcttcaaagtcgtcgccgaaagccgcttcgagagtgttgttaaactgttctttgaactctttattgccggtgtaaagagtgtgaaggacggcaatgaggttatcgccgttcgattccaacaccttttccgacctcgcgacagtcgaatgtctagccgctgcttccgggccatgattcagatttcggtaaaatgaacagtcattaaaaaaattgatgaacctatatatttgtaattcagtataatttttccatccacttttgattgaatccatattaaaaaacatggattcgctatctttaaaaatatcgaacacagccgctggaatatcgctattaatttctttcgtgaaatattcttttccatctctgttaataatcgtgcctgtgtaattggataaatcatcatcattggcaatattctcgacatggagtttttctaattcaatgccatattcgcttgaggctctcaattgttcaagttttaaactataaacatatcgtcttttcactaaatcggatgcgttttcttccgggttttcgttgaaaccaaaacgatgagagcgtattgttgcctcaaaaccgatttcctttgcggttccattccaaagaatggggatcatgccgccgtgttttttcataatggcgtcgcggagtttgccggagacggcgtcggaaagaagttcaagggcgctgattatgttgcttttgccgctggagttggggccgatgaggatgtttataggcataaggtctaggttgagttttttcaaggacctgaaaccttcgactttgaaattattgataatcatgaacaaatctcccggagccggctaaaagcctgacaacttatatggaattttacatatttccggcggatagcgccatcggagcgaaaaaagagggcgcggggagaggcggacgggggttttaatttgatttgataatgagatataatatcagacttaaccgcgcgacgggaactgcgcgcgaggtattgatgttgagattgttgccgcgtcgccacgcggatttttaataggcgcgcggtcgcggcggaacataatgatgaaatcaaaagcaaggataattctcggagcgctggcggtttttgtgacggtcgtttccggggcgatgacgcgcgtcgccggggcggctccggctgtttcgtatatgtccgcgtcagaggtcaagcccggaatggaaggatacgggctgacggtgttcgaggggctggagatatcgaaattcccggtgaaagttaaaggagttatgccgggggccggggtcagcggggggccgctgatactgatagagttgaccgggccggagcgcgagaaatacggcggagtgtcaatggggatgagcggttccccgatatatatcggcgacaggcttgtcggcgcgctttcaatgacgtttccgatgacggaccaccatctgggaggagttacggatatcgcgtccatgctgaaggcggcggagtatgacgcgccgagggccgggacggtcgagttcgacgcgcctttcgagcatggcggaaaggtttttacgagaataagttatgaatccggcagggacgagatagaggggacattatttgcgagcgcggcggcggctccggcgatggttcgcggggtgacggcgcgaacgatgccttttgcaaagagaatattcgagggaacgggaatagaagtgacggacgcgggcggcgcatgggctggggcgaaaacgggacgcaccgtaatcggacccggctcggagataaaacccggcagttcggtggccgtgctgcttctgacgggagatatggaagtgtcagcggcgggaacggtgacgcacgtggacggcaagcaagccctgatgttcgggcatccgctgttcaggaagggcgatgtaaggtatctgctggcggacgcgccggtgctcgcggtggcgcgaggcactgacatgtcgttcaaagccgccgcgaccggggcgctgcgaggagagataactcaggaccgcggccccgctcttgtgggacggctggacagttttcctctgctgataccattcgacataaccgtcactgacggagatatcggcaagacggagaagtattcgttcaaggtggcgcgggacgaggatttgttgagcaatctggcggcgatggccgcgctgcaaagtctcgacaacaccatcgacaggctcggcaaaggaacctccagagtgtcgttttccataggatgctcggcctgcgaaaaaccggtcgaaagggaaaacatgttttacgacggggacgacatcgcggcgttgtctctggtggagttcgtgacggcgcttcaattgcttaaggacaacaaatacgcggacgcggaagcgcgcaagttgaacctgaacgtcgagatagattcgaggaactcttacgcgcttatagaaaaagtggagatagacggcggggacgaagagaagccggaagcggaagaaacgaagacgggcgaaaaagagcccgccgccgagccggaagctaaagccgaagaaaaagagccgaacgcggctggagaaaaggcaaacaaagaaaaggcaagtccgcccgtggtgaagcgcggacagaagctggggctgaaagtgggggtgcggccgtttaggagcgagacggtcgaggaaaaaatatggttgaaagtgccagccgacatagcgcccggacgcgcggtgataagcgttttctccggagccagagagcttccgtcggcggctccggaaatgttgctgataaaaatccaagtcgaggggcaggaaagacaagacgaaaaagaccctcatttccttcgcgaaagaaagaaggagaaaagtctggatgaagtgttgaaggagttttcgagtcgtccgatgaacaacgagcttgtggcgaacatcgagtcattagggttctccgggccggacgacgaagacgacgaagagtatgaagacgaagaccggaacaggggcggaagagcgggcaagctgacgggctgggctttggacggcgtggcgtcgataagagtggaggtggaggacgagctgccgaaggtttctccgaaaagaaacatcagaaaatccagaataaatactctcaagggagaaaaatgataaatggaaaagaagaaaaaggccgccgctaggcagaagagggcgcaggccccggatgtggcggttgttatggggagcgattccgaccttaaaagcatgacggcgtgttttgaaacgctggacagtttcggcgtgtcgtacgaggcgcatatcgcgtcggcgcaccgcacgcacgactatgtcaaaagaatagtgacgacgtttgacaacaatggcggaaaagtgatgatagcggcggcgggggcggcggcgcacctgccgggagtggtcgcggcgctcacgaacctgccggtgatcggggtgccgatggagtcgaagatgctggggctggactcgctgttgtcgatagctcagatgcccgccgggatgccggtggcgacggtggccgtgggcggatgcaagaacgcggctctgctggctgttcagatactggctctgggcaagccggagcttgcctcgcgctacagcaggttcagggcgcagcaggctgaggctgtaattaagaaatccgaacgcctgaggactttgggctacaggaactacttttcggagggcggttcgacgagatgatagacaggtacacatacgagccgatgcgctcgatctggtcggaagagaacaagttcaggaagtggctggacgtggagatagccgcgtgcgaggcgtggcacgcgaagggaaaaattcccgcgcgagcgctgtcgacgatcaaaaagaaggcggcgttcacaattcagcgcatagacgagatagagaaagagaccgatcacgacgtgatagcgtttctgacgaacgtggcggagaatgtcgggccggactcgagatttatacacgtggggatgacgtcgtcggacgtgctggacacggcgcaggcgctccgcatgcgcgagtctgcggacgctctcatctcggaggtcaaggaaatccgcgtcattttagagcgccgcgcgatagagcacaaattcaccgtcatggtgggccgcacgcacggcatacacgccgagccgatgactttcggaatgaagatgctgctgtggctggccgagatggggcgcaaccttgaaaggctcgaaagggcgcgcgagacgatatctgtcggcaagatttcaggcgcggtgggcacttactcgaacctgccccccgatgtcgaagaagacacctgccgaaggcttgggcttaaggccgcgcctatcgccacgcaggtgattcagagggacaggcacgccgagttcatgtcgactctggcggtggtcggcggcactatcgagaagattgccaccgaagttcgcgggcttcagcgaacggacattcgagaggcggaggagttcttcgcgaagggccagaaaggctcgtcggcgatgcctcacaagaggaacccgatcacagccgagcgtctggccgggcttgcccgcgtgttgcgcgccaacgcccacgccgccatggaaaacatggctctctggcacgagcgcgacatcacccattcgtctgtggaaagggtgataattccggatagttgcatactgcttcactatatgctggtcaggctgaaacgccttctggacaagctgttggtgtatccggacgcgatgcttgaaaacctcaacaagacgaggggattgatattctcgcagcgggtgatgctggcgctggtgggcaagggagcgacgagggagcaggcgtaccacatcgtgcagcgcaacgcgatgagggtgtgggcggagaaggcggagtttaagtcgctgttgtcggctgacgccgaagtggcggcgctgttgaaacccgccgagttggaggagtgttttgaagtggagtatttcataaggcacgtggacgaaatatacgagagatttttcccgaagaagaaagcgcgggcgcggaaggcgaaggaatagcccgcgcggggtaaagacatggggaaaggcgctttgataagagagacgccggggatgcgggtatatcagtctgacgcgtcccccgaccggttcgcggtcgagttcacgaacgacgcggtggaatgctgggcggaaaggtcgcccatgtttccgggcaaaggcgcgttgaacatgaagatcgccgccgcgctcttcaagaggcttgaagattgcggagtggcgacacatttcgcgcgcgagacgggcgagtccgagatggagaccgtcgcggcgcggataatcccggcccgcgtggcggtgcgcaacatggtttcagatgagttcgccgcccgcacgcgtctcgccgcaggctcgatactccctgtgaccataatcgaattcaacgtgaagatggacgcggtcaaggagtttcagccggggatgcgcgcgcgcgtctacacggaagtgacggacggcgacgtgaagacgatgagaacgagggcggctcaagtcaacaaggctctgcagccgtttctttacaagcgcgggatcgctctggcggattactatctcgaattcgggaaggactcgaacgactttttccgcgtgtgcggggcgctcacgccggatacttgctcgttctggagcagggacacgctggagaagctggacaaggacagatatctgcggccgctgagaggctctgagacggcggccggcagcgtgttgaaggcgctgacagcgtaagactgtcggccggacgatttttgaaataaccgccgaaggcggcgcgagacgcgcccggcggaagcgcagaatttgaggccatagaaaaatgtcgatgcaaagaccgcaaccgcaacagcagaaaccgcagccggtactgccttcgctcgaagagaacatagcgccgaaagaaaggctgaacgcgtacctgaggtatctggccgagcacaacgggtcggacgtccatttcaaagggaacagcccggtgttcttccgtctggacggaaggctccgccctgccgacccgcgctccgtccttcccccgcagattgtggacgtgatggcgaaatccatcatgaacgagaggcagttgcgcgagttcgtggagacgaacgagtgcgacatgtcatacagtctgccgggagtgtcgagattccgcgtaaacgtgttcaagcagagcgggcttaccggggcggtgctgagaacaatccctctaaaaatactgaccatcaaagaactggcgctgccggacactctggaagagctttcagaccgcccgaaggggctgatacttgtaaccggcccgacgggcagcggcaagtccacaactcttgcggcgatgatagaccacataaatcagactcggcgagagcacatcctgactatcgaggaccccattgaatttctgcacagggacaagaactgcagcgtctgccagagggaggtcgggcaggacaccaagtcgttcgaccgcgcgctgcgctcggcgctgcgcgaagacccggacgtgatactcgtcggcgagcttcgcactctggagacgatctcgatggctataacagcggcggaaaccgggcacctcgtgttcgccacactgcacacgacaggcgcggttcagaccataaacagggtcatcgacgtgttcccgccgcaccagcagcagcagataagaatgcagctttcggtgactctgcaaagcgtggtgtctcagacgcttgtgcccgcggcgacggggaaaggccgcgtcgtcgcgcatgaaataatggtcatcaactcggccatatcgagtcttattcgagagaacaaggtcttcatgattcatcaggcgattcaggccggcaaggagcaggggatgcacacgctggaccagcacttggccgaactgatgaaacgacggctcgtcaagttcgaagacgcggtggcgaaatgccagaacgtccctgaattctccaaactagtgggcagaggataacagcagatgcatataagagagcttctggacgtaatgctccagttcgacgcgtccgaccttcacatgaaagtcggcaaccatccgatgttgaggatagacgggaaaatcgcgcttcagacgaatctggcgaaactcacgccccagacgatggacgagctgataaacagcatgctcgacgaggagcacgcgaaggaatacagggagacgtgggagtccgacttcgcgtacgactatccgggcaaggcgaggttccgcgtcaacgtgttccatcagagagggacgaaggccgccgtgctgcgagtcatccctacaaaagttcggtcgatagaggacttgagcctgccgccggtggtgaagaagttctgcgagcgcccgcgcgggcttatcctagtgacaggacccacagggagcggcaagtccaccactctagcggcaatgatagaccacataaacgcgacccgcgaagaacatataataacgatcgaggatccgatagagttcgtccaccagaacaagaagagcctcgtcaatcagcgcgaagtcggacgggacacagggtcgttctcggcggcgttgaagagcgcgctcagacaggacccggacgtggtgcttatcggcgaaatgagagatcttgagaccatttccaccgcgatcaccaccgctgagacggggcaccttgtgctcggcacgctacacacgacgggcgcggcccagacggtcgaccgcatcatcgacgtttttcctcccgaacagcagtcgcagataaggatgcaggtgtcgcagaacatcgaggggataatctcgcagactctggtccgcagggcggcagggcgcgggcgcgtcgcagcattcgagataatggttcccacaggggcgctgcgcaacctcatccgcgacggaaaaacctaccaactccccgcttccattcaaacgggaaagaacatcggcatgctctctctcgaacaagccctttatgagttgatgaagaaaaacatcatcaccaaagaggacgcgatgaacaagtctatggacagggactatctgttggagctgatgacgggcatacagaaacagccgcagagaagaacaacctgaacacggcaggcaagggcggcggaacgcccgcgccgcgccggagcgcgaactcgatggacaacccgcaacgcgtcacagtcgtcatcccgaactggaacggagagaaatatatcggcgaatgtcttggcgcgctcgcgagccagactctgggcgggcagcgagttattgtgatagacaacgcgtcgcgggacggctcccgcgaaataataaaaaacaatcatcccgacgtggaattaatcgaatcgagcgccaatgagggatttgcccgcgcggtgaacaaaggcatccgcgcggcggacaccgagttcgtggcgctgctgaacaacgacgcggttccagacccggactggctcgaaaaagcggtcgcggcgctggattctaatcacggcttcgattcggtcgcgtgcaagatagttttttacgacgaccctaaaacaatcgactcggcgggggatgagtacgcgccgtggggagccgtctccaaccgggggcgcggacagagagacgggggggattacaaccttccggcgcgggtgttcgggccatgcgcggccgcggcgctctacaggaaatcgctgttcgacgagatagggctgttcgacgagaatttcttcgcgtattacgaggacacggatttgaaccttcgggcggctcttgcgggccgcaagtgtttctacgcgcccggcgcgaaagttagacatcgctattcggcaagcacgagcggcaaggcgcggaagctgggcgtcgaggaagtgtatatacatctgaccggcgtggccgtgaaggggttgccgcttggagctgccgcatttttgagggccgccatttttcacggagcgattcttttctttttcgttcttgctcgtctgcgcaaacgcaacaggctgccttcggttccgctcataaaattcatgtccgccatgttggcgcagcggagcgcgacggcgggagcggcgagggtgacagccgtagagttgaggcgtttattccgggcggagctgttgacggcggacacggtagcgcgcggagacggcgatgtttgacattgattttttgttattctaatatgacgctgggagaaaataatgactctggcgataattgttcttttcgcactgctgttggctagcgcgctcttttcggcgtccgagacggctctggtgacgatgagcaggcaccggctcaaggccctcaaagaggagcaccccgcgcgagcgggagcgatcgacaactggttgaccaaaccaaacaacatgctcacttcgattttaataggtcttaacggcgtaaacctgctggccgcgataatgaccgaaaacataaccgaagaactgctggggcacactgattggccttcatgggtcggtcccgccataagtttcggggtggcgtcgtttgtgataatcgctttctgcgaaatacttccgaagatggtcggatataacagttcggaccgcgtggtcataaaaatgatcaagccgatttcgacgtttcacgctattgtgtcgccgataggcaaagtgttcgtgatgatagccaatctgacgctcaggatatttaccgggaagtcaggcccggcggaaggcccgttcatcacccagtcggagattctgggaattgtggacgatgccggagagcagggcatcatagacaaaactgaaagagaaatgatacgcagcgtggtcgaattcggcgaaacgcaggtgagggaagtgatgacgccgaggccggacatgcggatggctccggcggacactacggtggaccgcatggcggttctgatggaagagcacaagcattcccgcattccgatttacgaaggcggggaggacaacgtcatcggcgtggtcaactcaaggactctgttgcgcgctctgaaagacggacgcgactcggacccagtgaaagattacgtccacaaggcttatttcgtgccggaatccaagatggtggatgatctccttcatgattttcagaagaagcggacgcatctggcgatagtcatcgacgaatacggatgcacggcgggactagtgacgattgaagacctccttgaggaaatcgtcggggagatatgggacgagtacgacaccgaagagcctctttacagatgggtggactcggacactttgcgcgtggacgctaggatcgacatcgcggaactgaacgaaattctcgacgcggagttcaacgacgacgaagagttcgaaacgctaggcggattgatttttcatacgatgggcaaagttcccaaacaggaagagacagtcgatatcgaaggttacgagatgaaagtggaacggatggtcgggcggaggatagcgtcggtgattatcaaaagatcgtcttatccggggccgcaatccgagaacggcgagaaatgagactcgccgctccgcgaagtcgcggaatagactaatcaacaaaggtgaacgcgaatggaaatggcggtagggcttgctctgttcggagtgtttctggctttcgcggcgctgatgtatctggggaaactgcccgcgctgatagcgttgccgctgatggccgcgacgctgtacatcgtgggcggagctttctaccacggcctttcattcagctatccgggatcgaacgccgtcgttctggcgcgggaatttttcagagttgtgatagaagagggaatgccgaggctgtggccggtggttattacagtcgtgctcggcgcggcgctcgccgaactgctcaagtcgagcggagcaaccacgacgatcatcagatgggcgtccgaactgggcggcgacaacaagatcgtgtcgtgcgtgctgctgaccggcgtgacggcgctgttattctcgtcattggtgggcctcggagcggtcattatggtggcgtctataatgctgccgatcctcatgagcatcggcgtgactcccgcagtcgcaggctctctgttcctgttcggaatgagcctcggcggagcgttgaacccggtcaactggaagttttacactgagataatgacggcaagctcgacagtgagcgcgatcgacgctcagaatcagttgataggttttattctgcctttcatgatcccgttcgcgctggtggtcctcggttttatcattttgcacggacgtcggggtcacacatccttctgggcggttccgccgggaggaggcgcggcggcggcaggggacgcggggcgggccgggattctggcggttctcacgccgcttattcctctctctctcgttctgggattcaacattgccagccggttgagaggcggcgcaggatacgcgttcccgataaacacggcgctgcttgcgggaatgctgtactgcctgatcgtgtccggccgcggcccgaacggcaggattcagaggttgacgaaagcggtgttcgacgggataacgggcgtcgctcccgtggtggcgctaatcatagggataggcatggtgatacgcgttgtgtgggacccggcggtcggcgcatacatggagcctgtgatgaggcggatagcgccgagcgcgccggttctctacgtgattgttttcaccgcgctcgcgccgttggctttgtaccgggggcctttgaacgtgtggggcatgggaatagggatagcggcgataatgatttccaccggcgcgctgccgccgatggcggtagtcgcggcgttctactcggtggggatgattcagggcgtgagcgacccgaccaacacgcacaatgtctggatcgcgggttttctgggagaggacgttcaggtcttcacccggaaaacgctggcatggacatgggggctggccgtggcgggccttgccatttcggcgtttatgttcctgagatagcgcgcgatattttaggccgcgcgcgggacggaagccggaaagaatataataagaatatgcctgaaaagaagcccacatacgaagagttggagaagcaggtcgcggagttgcgcgcgcggctggaatcgtcccccgataactcttcatatccgcctccgacaagtctgtcggggcgaatcgactcggcagctttcagagaaatcgctgaaaacatccccgttctgatgattgaaatagacatgcagggaaaagtcgcatacgcaaacaccgccgttctggagatgtacggttacacgagggccgatttggggaaacacgtgaccgagttcgtgccggttgcggatgtgaaaatggagattgacacgctcgccagagggatggcggggaaacaggacataatcgtttcaagaatcaagacggcctctggagaaatcaggcatgtgatcaacaattcgttcccgatatatgaaaacggagagcagtccggaatcaccgtgttcgggatagacattactagacaaaaagaggcggtggaggcgctcagggagagcgaggacagatacaaagcgctgttcgagcagtctctggacgctgtgtacgtatcgacgcgggaaggcattgtgctggaagccaatcaggcggcgctttcgctgctcggctatgagagagaagaaatagtaaatagaaatgtgttgaagacatacgtggacgaaagagatcgcgagccgcttcagactgcgcttgagacccgcggctccgtcaggaattacgacgtcaaactcaggcacaagagcggacgcgagatagactgcaaaataactgcgaccgcgcgccgtgggccggacggctcggtcgttggatatcagggcgtcataagagatatgacggaacagataaagatggaaaacgccctgagggagagagaggagtatttcaggctcatagtagaaaccatgtacgacggcataacggtgttagacgaaaagggagccatgacgtatgcgaacaaccgcgcgttggaaatgctcgggcgcgaacgcggcggagtcgttggaaagtcgataacaaatttcctcgacgcgaataatttggccctatttaaaaaacaattctcaaggagaaagctcggcgagggcggaaaatacgagttgacgttcacccggtctgacggctcgcctctgcattcgctcgtgtctgccaaccctcttttcgacgctgtgggagggttttcaggcagtttcgcggtcatcactgacataacggagagaaggaaggcagaggaacaactgctcagccatcaagaaaggcttgaggaaacagtgaaggaacgcacggcggagttcagcgaagttattgaagagttgaggaaggaaatctcgaaccggcggcgcatggaggaagatctgagggattcgagggatcgccttgagaccactctgaaggcgatgccggatatattattcgaagtgaatcttgaagggcgaatagtcggctaccatgcttcgagatcagacaggctctacgcgccgcccgaggcttttatcggaaaaaaaccaacagacgtgctgcctccggaagccgcggaagcgctaaacaaggcggtcaacaaaacattcgagacgggcgagaaatccgccgcgacgtattctctgccatatgcggacggggagatgtatttcgaggcaatacactcgctgaaaggcgatttgaattcgccgaacaggacggtcatatcggtcgtgcgcgatattacacagcgccgacgcgccgaacaatcgctcagggagtccgaactgaggtatagacttactatggactcgatggccgacgcgattcatgtcgtcgacagaaatttcaacatcgttcttttcaacaaaactatgaaggaatggaacgcgcaaagcggtttgccgacggacatcgcgggccggaacgttttcgatgttttttcttttctcgatgactccgtccgggaggaatacaaatcggttttcaccagcggcaacatgatgctttccgaagagatcaacgaaatcgacggggaaacgataataacggagacccgcaagataccgatattcgaaaaagacgccgtcgccagagttgtgacggtgatgagagacgtgacgacgcgaaggcgggcggaagaggcgttgcgctacaacttcgacttccagagcgtcgttatggatatatcggcgagtttcgtgggcgtcggggcggagaatatagattcggccgtgaatgacgcgctcacaaggctcggggaattcctgcaggtcgatcgcagctatctgttccgtcttaccgacgacggattgttcgtcgataacacgcatgaatggtgcgcggagggaatcagctccgagattgagaacagcaaaaatattccgttggaaacgctcaaatggctgatgcccaagttcatcaggggagaaaccatagctatagacgatgtgtccgcgattcctgaaaacgctgaagttgaaaaaagcattttcaacgcgcaaaacatcaagtcgctgattatgttccccctgtattccaacgaaaagctttccggattcatggggcttgattcggtgaagaccagaagaagatggaagagggaccacagcgcgttgctgtcggtggtggcggagatattcgccaacgcgcttatgaggcatcaagcggaaaccgcgctcaaacggagcgaacaaaggttggacgccatcataagcaacacgccgaacgtggcggtcgagggatacgatgtcgagggccgggttatttactggaacaacgcggcggaatcggttttcggatggtccgccgaggagatgatagggagaactctggaaggagcgactctcgactctgcggcaaccgaggcttttcacattctgcttaaggagatgaatgaaagcaaccttccttccggcccgtccgaatggatttgcaacaagaaagacggctccagcgtcgtagtgtattctatgatatttccgatagacgtaggggacggaaacaaagagttcatctgtatggatgtggacataaccgggatgaaagaggcggaagaggcgctcagggagagcgaggagagataccggactctggcggaagccgccgaagacttcattttcatagtcgatcgagacgacatcgtgagatacaccaatagtttcgccgcgcgtcaacttggcatgactccggaacagacgataggggttacaagagcggagttgttcggctcgccggacgccgacaggcagaaaaagagcctcgacagggtttttgaatccggagaatcgttctacatagaaaccgtcacgcagtttcccgaccgggagttctggctgggttcgaggcttgttcccatcaaatcccccgacggtcgggtgtcctccgtgctgggcatatcgcgcgatataaccgacaggaagaggatagagcaggaaaagattaacttcctcagttcaatatctcacgagctgaggacgccgctgtcgctgatactcggatatagcgagatgttgctcaaggaggatctgccgcacgccgccaaaaagaaaatcaaaaccatcaacgaaagaggccggcagcagctcaagctggtcgaagagcttatcacgctggacgcattcgagagcggaacgacgacctacgatatggccgagatcaacatatacaacttcctcgaggcgcggctgaacgaaacgcgccttatgatagagagcatcgtccggcgcaggttccgaacgtcggaatactccttcaagaaggaggtgtccgaatcgctgaaaggcgtcatcgtcaaatgcgacgatggcagaattcggcagacgctggacaacctaatagaaaacgcggtgaagtattcgacgccggagaggctgcagttcgccgtgtcggcgacccgcgaggacggtttcgtggagataagcgtttcggaccgagggatcggaatcgcgtccgctgacctgaagaacattttcaagcctttcttccaagtcaggaaaggctcgcatcctgtttcggacggagtgggaaagggtctaagcattgtcaaggagttcattgaggcgcacggaggacggataaaagtcgaatcggttcccggagaaggctcgacgttctcgttcactattccgattctaaagactgtggagcatgtggaatcgcgcagggtgaacaggattctggttgtggacgatgacggcgacctgttggacttggtgaagacgatgctgctttccgaaggattcgacgttgcggtggcgtcgaatgaaacagagttgttcgaggagatggcggcttttgatccgcaacttgtgatgttggacgtgcagttgccggggctaagcggcgcggaactgtgcggaaagattaagagcggcccggctccggctcccatggtgttcctgttcagcgcgatgccgcgcgcccggatcgaggctctcgctcgcgagatcggagcggacggcgcggtttcgaaacccatcaacatagactcattcattgaaaccctagaaaaactcaatcagtgacgcgccgcgcccggacgtcatcgtttgacacataaatatcgaactcctacactatttggcatgattgcgattgtggactacggaatgggcaatttgaggagtgtgcagaaggcgttcgagcgggtgggggcggacgcgcgcgtgaccacctccgcaaaggacgtccgggacgctgcgggagtggttcttccgggcgtcggcgcgttcgcggcggccatgaaaaacttggaatcgcaggggcttgcggggctaatcgtctctgaaatcaaatccggcaagccgttcttggggatatgcctcggactgcagatgcttttcgactacagcgaagaaggagagcgcatccccggcctcggcgtttttccgggcaaggcgactcgcttcagaggagacctcaaaatcccgcacatgggttggaaccagctcgagttcaggaacagagggccggtcgctgatggaatacccgacggctcgttcttctatttcgtgcactcgtttctcgtcgagccggaggacccggcgctggcgatgaccgtcacggattacggcggcgagttcgtttcgtcgataacgcgcgacaatgtgaccgcagtgcagttccaccctgagaaaagccagaggatggggatgaagctgcttgagaatttcgggaggatggcgaagggatgaatttatatccggcgatagatttgatggacggcaaatgcgtgcggctgacgcagggcaagagggagctttgcacggtgtattcggagaggccggagcaaatggctataaggtgggcgcgggaggggacgaagtggctgcatgtgattgatctcgacgccgcgctcgaccagaaatgtttttccaatttggacgccgcaaaggccatattcgaggcgtcgccgggaatcaggacgcaggtgggcggcggcgtccgttcggctgctgacgtccggcgctggctggacgagggcgcttcccgcgtcatagtcggcacgtccgttctcgaatcgcgggattttgccaaggggcttttctccgagttcggcgccgcggtcgcggtgtccatcgactcgaagggcggcaaagtcgctctccggggctggacggacgaatctgaaatagtaactatagaggcgtgcctcaggatgcgagacgacggcgctaaactaatcatacttacagatatcgtgcgggacgggatgctgacggagccgaatttcgacatgatgtcgcaggcggcggacgctctggaaatcccggtggtgtgcgccggcggggtgtcccgcgtggagcatgtcgagcggctcgccgctcttgaaaaaccgaaccttgacggagcggtgatcgggcgcgcgctgtacaccggcgacttcgatctcaaggccgccgtcgaaagatttccgcagtaggcggcgcggagggcgttttgcttgccaaaaggataataccctgcttggacgttgacagcgggcgcgtcgtcaaaggcgtcaacttcgtgaaccttgtggacgccggagaccctgtcgagcaggcaaaaaaatacgaggaagccgaagccgacgaactggtgtttctggacatcaccgcttcttcggacaagcgccacataatgctcgatgtggtcagacgggtggcggagacggtattcatcccgttcaccgtcgggggcggcattactaacgtcgccaccatccggcaactgctgagcgcgggcgcggacaaggtgtcgctcaacactgcggctgtcctgaatcccagtctgataaacgagtcatccgaaattttcggagcgcagtgcatagtggtcgcgatcgacgcgaagcgagtgggcgacggctgggtggtctacacgcacggaggcagaaaaccgaccgaaatagacgcggtgggctgggcggtcgaggcggaacggcgcggcgcgggcgaaatcctgctcacaagcatgaacagggacggcacgaaaatcggttatgacaacgagttgaatctcgccatctccaccgcggtgagaatccctgtgatagcgtcaggcggagcgggcgagctttctcacctctacgacgcgatacatgacggcaggacagacgcggtattggtcgcttctctgttccactacgggattttcaccataaggcaggcaaaggaatatctgcgggacaggggaatcgcgatgaggctgtgacctcattgcgccaagagagaaggtttcgacatggatttgaaattcgatgaaaaagggcttatcccggctatcgttcaggatgaaaaaagcggggacgtccttatgttggcgtacatgaacgaggagtccgtgcggcggacgatcgagacgggcacgacgtggttctggagccgctcgcgcagcgagttctggaacaagggggcgacctcgggcaattttcaaaaagtgaaaaaggtgatgtacgactgcgactccgacgcgcttctggtcattgtcgagcagagcggcgagggggcctgccacacaggagcatggtcctgctttttcagggagttgaaaggctgatcttcatggcggagacaggccctcccaaatttttcattaaaacattcggttgccagatgaacatggacgactcggcgtcgctcgcgcggatgctgcgctcgatgggcatggcggaggcggcgacgcccgaagatgcctcgctggttcacgtcaacacgtgcagcgtgcggcgcaaagccgaggagaaggctctgagcttcataggcgtgttgcgcaatcgcaaaaagactggcggcgcgcccgtcgtcgtcggcgtgggaggatgctccgccgaactggccgacatccgcgcggaaattcgcgacgtggactacgtcgtcggggcgggcaggccgcaggactacgcggacatcatccgggaggctgtggccgagaactttcccggcttggcggcgggagcggctctgtttgcccccggcccggcgtccgctttccagacggtggtgcgcggctgctcgaatttctgctcgtactgcgtggttccatacgcgcgcggcgcggaatccagcctgactccggctcaagttcgagcggaagccgcgataaaggcggaggaaggcgcgcgggaaatcattcttctaggccagaacgtgctcgcttacgggctggacttatcgccgaaaagatcccttctcgacgccatagccgccgtccacgatctgccgggggtaacaaggataaggtttgtaacgtcgcacccgaaatgggtgacggaggagtttctgcgcgggctgtcggcgctgccgaaagcgtgcggccatttccacgcgccgttccaaagcggcgacgacgagattctcaggaggatgaggcgcggatacgacgcggcgtattatctcgaaacaatagaaatgataagaaactactcgccgggctgcggcatatcggcggacgcgatagtagggtatcccggagagacggaagagcaattcgagcggacgcttgagctggcgtcgcgcgcgcgggtggatcagttgtacgcgttcaaatattcgccgcgtccggggaccgccgccgccgggcaggccgacgacgcgccgctcgacgccaagaagtcgcggcttgcgcggctgttggatttgcaggagaatatatcgagggaaatcaacgaaagccttgtaggcggaatcgcggaaacgatggtcttcgagtctctgggcggagagcggcggcgggggcggacgcgggagaacaggatagtggatttcactgtgcgcgaaggcgttaaggccgagccgggagatgagttgcttgcccgcatcacgggagcgtctccgcacgccctgaagggagaggccgtatgaacgccactcctatgtatcagcagtacgccgccatcaaggagcgccacagggacgccattttgatgtaccggctgggcgatttctacgagatgttcggcgaggacgcgaaaaccgccgccgccgaactggaaatagtgctgaccgcgcgcgagttcggcaagggcgtcaaactgcccatgtgcggcgtgccccatcacgccgccgacggttacgtggcaaaactcatccagcgcggacacaaggtcgccatcgcggaccagacagaggacgcggtcgccggtaaactcgtcaaccgggaagtcgtcagggttgtcacccccggaacgtatctcgatctggacaggctggactcatcgcgaaacaactacatactttcggtggcggacgccggcgacaggttcgggctggggatactcgacgtttcgaccggggagttcaaggcgggcgagatatcgaggtcggcggacgattcgtctctggtcagggagatcgagcggctgtcgcccggcgaatgcgtcgtggcgatgcgcgattccggggcggacgccgccggtagaatatcggcccgttttcccgacgtgaaagtcaccgagcttgacctgatgttcgacgcgccgtaccaccgggacaggctgtgcgcgcatttcggagtgaagacgctgctcggattcggcatagaggagttccccgctgcgataatggccgccgggcagcttctggactatgtcagggacaacctgcgcgccgaccccaagcacgtgatgtccgtttcgctctaccggccccgcgacgggatgtatctggacgcggcgacgcggcgcaacctcgaactgacggaaaccatgcgcgagaaggaaaagaaggggagccttctgtgggcgcttgacaggactctcacgccgatgggaaagaggctgatacgcaactggctcgaacagcctctcaacgacccggcggagataaacctgaggctggacgccgtcggcgagcttctggaaaacaggacggcgcgggagggcgcaagggaaagcctttccgaggtaagggatatcgagaggctttgcagccgggtcgccaccatgctaatcacgcccaaggagacgctggcagtgcgcgactcactagcggcgctgcccgcgctcgcggccctcgcctccgctttcaagtgcgacatgctggagtccctgcgcgccgacatggacacgctggaagacgcgcgagccgaccttgccgccgccgtttctgacgacgctccgaggtccgcccgcgagggcggcatcatccgcgacggcttcgatgcccgcgtggacgaactgcgcgcgctgaaaaaaggcggacggaaatggattgccgacctcgaagaaaaagaacgaagggaaacaggcgtcaaatccctcaaaatcggctacaacaaagtgttcggttattatatcgaagtgacgaaggccaatctggcaaacgtccctgatagatacatacgcaaacagaccacatccaacgcggagcggttctacacagaggaactgaaagaaaaagagttcgcgatactcggagcggaaagcaggctcgaagagcttgaatatcagttgttctgcgggataagggacaatctggcggggcacatcggaaggatgctgaagacgtcgcgggcggtggcggcgctggacgcgttgcagtcgctggcgcaggcggcggaggaaaacaggtactgccgcccgcaggtcagcgcgtcggaaacgataaagatagaagaaggccggcacccgtcgctggacctgacgatgcccgcgcgcacattcatccccaacgacaccctgctcaattgctcgaagagccagatacatatcatcaccgggccgaacatgtcgggaaaatcgacttacatgaggcaggtggcgctgataacgctgatggcgcagatgggcagcttcgtgccgtgccgcgcggcggagataggcgtggtggacaggatattcactagggtcggagctgtcgacgatatcacccttggcctcagcacgttcatggtggagatggtagagacggcgacgattctgactaacgcgacaaagaaaagcctcgtgctgctcgacgaggtcggcagaggcacgagcgccgcagacggcattagcatcgcatgggccgtctccgaatacatacacgagaggattggcgcgagaactctattcgcaacacatttcaaccatctgacgcgcatggccgacctgttcgagaggatagagaacttccacgtttccgcagttgagcggggcagggagattctgttcacgcacaaggtgcgccccggcggcacggataggagtttcggagtcgaggtggcaagactggcgggcatacccgcctcggtcatacgccgcgcgtcggaaattctggtttctcaggaagcggagtcggacatcgaagtccctgaagcccggacggcgcaactcgcgcttattcccgaccagcctccgagccgcatcgaggaaatgctccgcgcggcggaccccgaagagctgactccgcgcaaggcgctcgatctcgtgttcaggatgaaagatattatagaggaaaacgacaggtcgcggtgaaaacgcggcggctgccgggaggcgcgcgatgagcggaatacccgctgttttcatagacagggacggcactctgagcgaggagatcggctatgtgaaccatgtcagccggttcaagctgctcgaaaagtcggcttcggcgataaaaaagctgaacgaagcaggagcgcccgctgttctggtcaccaatcaggcgggcgtcgcgcgcggctatttccctgaaagactcatagcggatgtccacgcgcgcatgaacgagctgctggccgtgggcggcgcaaagctggacgggatttactattgtccccatcatccgaccgccggagagccgccttacaggatggactgcgactgcaggaaacctaagacgggactgattgacagggcggcggcggaaatgggactggacgttgcccgttcgtacatgattggcgacaagctcagcgatgtggcgctggcgaagcgcgcgggctgcgccgcaggcatactcgtcctgacgggatacggcagaggcgactgggagttcaacagggagcgcgaaggcgtcgaacccgacttcattgcagaagacctgtcagaggccgtcgactggctattgaaagacctcgcatcgcgagcttgaccctcgttttttttcgatagaggcaatttccacccacataataaggaaactgtataaagggcgctttgcggcgcggtgtgcgcgcgcgcccggaaaacaggaataagattttatgaaccttgcggacaatctaaaaaatagcgcggagcggtttcccgaccggcccgcggtcgttttttacgacagagtgataaggtacgagcagctttacgcggacgcgctgaggtttgcgggcgcgctcggcgagatgggcatgtcgcgcggggacaggatggcgatagcgattccgaacgttccggaataccctgtggctctttacggggccttcgcggccggggtggaggtcgtcactatcaacccgctgtattccgcccgcgagattgaatatatgctgaaagatagcgcggcgaaactggcgataatgcatccgatgttcgagccgcccgtcagggaggccgccgcgaacgccggaacgaagttgctttacagcgattctatgggcgacccggccaagcgcgacatgaagaaggcgatatcagaggcggtccccgcgccggcgcccgcggacctagatccgaaccacacggctgctatcatctacaccaacgcatggaggggatatcccctcggagcctgcctaactcatctaggactgatgaccaacgcccgttcgagcgtcgcgacggcggcggcgcatgaagacgacgcttttctcaccgtcattcccctgttccacgcgttcgcctgcaccacatgtctgcatctgccttttctcgcgggcgccaagaccgttctgcatgagatgttttcagaggatcgcgtgatggcggaccttaaaaaagagaagataagcgtttttccgaacgtgccgacgataaacaaaaggctgcttgataaattcggctcggcggggagcgacctatcgttcgtgagggcgatagttcccggaggcgctcctctgacagacgatctatacgaagggcttgtggagagactcaacgcaaatgtatatcaggggtacgggataactgaatgcgggccggtgacttcggtgaacccgatgcggggcagggagtttgtgaaagccggctcagtaggcccgccgattgaaggcataactgtgaaagtcgtcgatgagaacggcgaggcgctcccgacgggcgatacgggcgagctttgcgtccggggcggcaacgtcatgcgcgaatatctcgaaaaacccgaagacacggcgatgtttcttaaggacggttggttgttctccggcgacctagcccgcatagacgaagacggatatatatacataaccggccataagaaaaggcttgtgcttgtcggcgggttcaacgtctatccgcaggaggtggaagcgctgctcggcgcgcatccggcggtggaaagctgccgcgtcttcggcgtcccggacgattccctcggagagagagttatggcggaagcgaaacttcgctccggagcctcagctgaaccggctgaactgaggaaatttctccgctctgcgcttgctccctataaagtcccccgccgggttgatatcatagaatagttccagcgcggattggtgataaatgcggtccagcagcgtgaaagcggattgcgcggattctcaatctttagcctttagttctgttttcatttgctctttgaactcgaaaccgctgaaatgaactgtgtttgacagtgttttgggcgcgggtgtatacttttattgatatagatacattatgaggcaaattcgcacgcgttctcggacgggcaaattgtttgactccagtcgaaatggggaataccatagttagccgaagcgcttttttattgcgcgcctgaaacagaataatattcagggagaaaaaatgcgaaacaagcgacgccgggaaaaaggattcaccttggcggaaattcttgttgttttgtgcataatgctgatattgatgggcgccatgacgccttcgtattaccagtatcaggcgtcaacgagagtgagaaacgccataagagcgactcttgttcttaagacggctatcaacgatgccgccaactcgtgcaagggatttcccgtgagatccttgatcggcacggacaacgcttccctgatggaattccttcccatcgtcgatttgactgagtgcggaaggacggacgacatcaacgaaacggcaatgaaggtttttccgacggacgcggattgttcgcacacggccgtcgcccagacggtgatgccgtcgcatccgtactcggcggatttcacgccttccgggctttgcgcttcggtgtgcgacaggtccgacagcgaatgtctgggccaaaaaggattcagttttcaggggacatttattcgggacgacaacgctgcggaacagaggttcgagctttgttcccccgaatattcaggagtttccggacctgattactccggcaactacaaacccggctggaactacgctttgctctccaatctgaatcctcttgataaacccgtcggcgtcgtatgctccgtcgctctcggatacaaaagatccgtactcataatcgtcaacaccagcggatataatacggccacaagtatgcaagttgcggaaggctcgggcatttttgatatcgaaggcgatgatcttgacgagccgtgcccgtgcggtccgtactgcgaggaactgtttgaggctgctggggacgggcagagcgggtgctgttcgccttgcattgccgcggacggaacaaagtatgacggcatagggtacaagttctaatcccccatttttttttcacggacacgactgaagatgcgaggaacgtcttagcgcgacgatttatcccggattcggcgataagaaatacggcttcataaatttcgctgataccatgtaccggggggtctgaaaaaacgtaaggttctgtcataacttcggttccgaatactttcatttgggggttgtggactttcggaagtcggggaatttggttgcgcgggtgaaagtattcgatgggtttggaagaaaatattttttttgtgttgtggcggcgggggccgtccttttttttgtggagcgtcaggccgggcgcgggagccttctggcggcgcgggccggatcggggccgttaggtttcggaaacgaaagtaaaaagggcgggcgcttcgcggcccgatggatgagatcgcggcgcgggttgtcaccggggagcgggctggcggcggtggtcgggccggatcggggctgaaggtttcggggatgaaagcaaagcggggtgtcgccggggagcgggctggcggcgggagtccagaggctccgggagcatggcggtgtttcgatggtgacggcgggtgaagcgggcgggcgcggcgcgcccgatggactatttaaagacaagagattgtatatatagagaggggtatgaggcgtaagagggtgagtttcggaaaacagtttttgcaacaattcgggatttgtttcaagttttgcaagggcattgcaaaaaacggacaatcgagagaggggcatgagggtgaggcggtatattttggagaaaagctttgcagcatttcaagatttgttgcaaattttgcaagggagctgcaagaaaacgggatgatcttgagggtgtgagttcgggttattttttcgtttttttacgtttatcgggattagctggggactcggaagcttccgggggcgagccatgagcggaacgagatagaagacatcttttattaatatagatagagagggaaccgactatcggaagaatcacttcttttttcgagggggacattttatcgtttcgccatcagttttatctaataaaaaccctgaaagtaaagcttctctttcagcctcatctaaaagatataatcttttttggtttttttctaaggtatcaaatatgtctgaattgtcattgccatgcaaaaagaaatcaaacaatactgggtttttcaattttaactcaaataatacagtaaccaaacgtacatttaaatctttgattttattggtagcgtatttaccataaaagattaggtctgatatattcatcaataaaaacactgaacggtaagcaatccgttgtggatggttttcatcctctggcagtagtttttcagtggaaataaaaacatcgcctaaaccatgaaaaatccaatataaattaatgttaaaaaaagcttgcattgcatataataattccgcgctaggcttatacttacctgtttcaacctgtgataaaaaaccataggaaacccctttagaactctgtaaaaactcagatagcaaatcggcaaacactttttgagtgaaacccaactcggttcttgcctgcttaattcgctgaccaatagcaaccttgtcaaaaggaggcattttgggttttgaaggagtttttttttcttccacgctctcttttacctcaaatcacacgtgtttggttacgcaaataatatttggcaaacatgttgacacccacagtataccgagctataatcacagtatgccaaatctgcataaagcaaaccatacaatcagccaaagcgattatatcacacttcaagccaatggacaacagctttcctcgtcaaagggagtatgtatgagcagtcaggcggaaacgatagcgtggcattccagtaagacattagagcgaaataggcgtagcaagctggctaccgcaggaatacttacacaacgagaggcggcaaaaaggctcggtgttacgacaggagcggtttcgcgtgtcatttgcaataagcgcaagtcgaattggatgcgcgtcgccctcgcccgaattgccggaattgactatgaagagttttggaatgtgaaacaaccaatgttgacagaatgcgacattataaaactcagaaacgtcgggatcgaggtcgaacgatgagcggcaaggaaaaaggaaaattcgcgaggctgggcggcgacgcggcgcggttttactttgataccggctccattccgaaagtttgccaaatgttgataaaaaagcatggagtggatggggaagtttccgagttcagcttgcataattggaaacgccggggacggtggcgtcaagtccgggctgaactgtccgcgctggaaactgaagacgcgctcttacaggctttcgagggtcggatcgagagcatggtcgcgacgctgtcggggtgtgttatgaggctccgggagcagatcagggcaatgaaggacggcaaaagtgataactaaatatagacgatttgttttctgtttctcctccaacgcgggcggggtcggcggtcgccgatctcgcctgtctttaacagagcctctatgttcatgttttcacaggatacaggcgggcggcgggtattacgcgggtcatggttcacctcctttcaagcggttttgccgctcgcctctttttttagcatttagttgatatacgacaatataacataggagaaacacacaatgaatggtgaaaacaacgtctcgctagaagcaatcgacaaagccgaaatcgtgaacaccgatgttgaacttctggatgtaaaaaagcttttgccgccgggaagcgggccggacgtgctggcggcggcggcggcgaaatgcagaatgatagacttgcaaagaaaaacgatcttccacgaggttgacaagctgacggctttgcaaggcgctttactgaacgaagtcaaaacgcgcttcggcagggaagcctttcaaggattttgcgaggcaataggaatatgtgagagaagcggatacaactatataaaatttttcaaaaaccgggaagtgttttttataggcaagatgtcggactcagttaaggcccttgagattatggggcttttgaatgatccgagtgtccgattcgagggcgacaagattattgttcaggagccgggggacacagaaaaactgactttgagcatagatgaagcaaacgcgctcccgcgcccggaatttgtggcctttataaaaaacataaagaaggcgcttagcacgcaaacaaagctcgtcgatctcagggatgagagccttagaaaactacaaacagacaaagataagttaataaaaaagctggaagaacttgaacttgagagcgcgaacgagccgttgtttaagtatattgttgtgctccgagagagggcgaagctgtttagcggctcgttgaaagaggttcttgaacaacgagaagtggttcagatgcagcctgagaatgcggaaacgagagaccgaatcagggacgcgatcagatgcgtaggcaatgagatgtcgagattcgatgatatgctgggctggcatccagaggagagcaaacttcctaagttagatacaaaaggagagagagattgagtccagacatggtacggcaactattggaagcggcggagcgtgttgagtccgcgccgcacggcgaacgaagcgcggcgatggcggcggaagctgcgaagttaaaaatgtcgcctagaaacctatcgcgaaacattgcgaaattgagaggccggaagcgcgctttgcgctcggattataaagccgacaagagagaaaacgagcttgttgaatatacgaagatagcttgcgagtaccagaaattgattgcgatggccggggaaaaaaagagggtgttgccacttgagagcgcaattaaagcggcagagcgcgacgggcgaatcccgcagggagctttgaaaccggcgaccgcgaaatacatcaggcgaaaactcaatattacaactagggaagagtatcgaagattaactgaaaaatacgctaatcacgcatggcaatttgacggcagcggcagcgaatatctatacccggtggatagggacgctgctggggaatggttgtttgccgtccgatccacaaaaagagaaagctggaaaaactcccgaatcaacgctgatggagttttagaagacgcgcgccgggagatgttttactactacggcgttacggacgggttttcgggagtccttttcatcgacgcggttgtcgcgcacggcgaagacttcgacggctccgcaaggtttatccagaaagcgtttcagaagaaggatgacaatccgcttttcgggttgccggaaaagctgataacggacagcggcccattgggaaaaaacagaggcgagttgttgtttagggagttaggggtggagcttgaaacaaacaagccatacaactcaaaagcgaaaggaaaaattgaacgtccgtggaggactttgtggcaaaggtttgaacttgagttgctacttgataaggaaagagtatttacgttcgcagaaataaaaaacatgctttcaaattatctgaaagattataacagtcgctctcatcctaacccgaaattcgcggggatgtcgagagagagaatttacggcttgagcctcgctgaaagagagcagagattttaccctgaaggcgcggacatattccagtatgcgccagtgacgttttacagagttatggacggcacaaaaagcgttcggataggcaacgagtattacgaagtccttgattgtccgaaagctttcataggcgagaagctgctatgtcggcagttcccggacagggttgaagtgaggaatccgcaaaatctgagttggatggcgacaaaggtttatgagc

SEQ ID NO: 527 - DNA, 77182 bp, Artificial Sequence
  Synthetic Oligonucleotide
atcggttcacccccacgcgcgtggggacaatacataaagagatatcctggacgggttttaacccggttcacccccacgcgcgtggggacaatgagacgaaggcgaacgtttccgccgcgccggccggttcacccccacgcgcgtggggacaatggatgccgccgcgtgttcctgtaacccgagtacggttcacccccacgcgcgtggggacaatccaagatgagccatcgtcatacctgaccaccgcggttcacccccacgcgcgtggggacaatgtcccatatcgacatggacattgccaagtggccggttcacccccacgcgcgtggggacaatactgaaaaagttgttgattctacggcactcgaaccagaaaaaggccctcgaagtcttcgatggagcgtgccgtccgaccccaagtccggacattatacccctgctcattgtccgaggaatggataataaggcaccctccatcgcgagcttgggaacacgctttttcccaaaggcgttcacggacggcggcggagacgcggccgacaaagactcccgcctgcggttccaggaaccatcttgttagctcgccgcgcaatcccggggggacgcgctcaagaatcaggaccaccatcgtcaggctccgaatcgtcaatttccaagggctgcacgcgccctccacgaacgtcaccctgcgcagggtcccagaggaagccgggggcggcggcatcctggtcaaagggggcagcggcgcccgccctcggcttgggcatcatcaagaccgtctggatatcggggataatcctctccagaaggcgcgtggagacgaattggtcgcgacaagtgaggcgcacgtgccgctccagcagccctttgggttgggcgacggcgcgaaaggcaatggggacggtgacctccgtcttatagaggtcggcaatgtcataaacgaaagacaacattttgccggtatggatgaatcccagcgcgggtgaaaagcccgccgagacaatggcggcatggcagatcccatacaggcaggagttggcggtggacaaggcccggttcaccggatcggccttgctccactcgtctcgttgataacttcggccggaccaggtgacgccggtctccttggcgatgcgcgcatagctatcgcgcacgcgtactccctccatgccgcggatttgctggaggctgagcgtggaatcgaacttctcggaaaaccgcaactggtacatgcgacggaccacctccatgcggtaaccggtgtgcgcccacacccgcgcctgatgcaggaaattggcggcgctgcgcgtttcgcccatgcccagggcgtagaagcgcactccctcttccccgcaccacgccaccagacagccatggtccgccagcacggagacggcggcgtgagtgatcgagacgccaggacccaacatcaggagagcgagattggcgcaggggaccggcaccctgccgcttttgtcatgcaccgcaatggcacggtcctcctgatcgacgccgcagtgctcgacgtacagataactccatccgtcgccgaacttgggtagtatgtggagatcttggattctcacgttgcctccacaggcgtgctgctcgtaacgccggcttccagccggcaccggtgccgccaggatggcggcgttacgctgcgtcgatccccgatcgacgggcgtaggggcggttcgcgaaccgcccctacgagattgctgcggctggcccggtatagggcgccaccgaaagcagcccaaagccaaaggctttgcctggcccgatgccgcgcagaagcgtattgcggaatttatcggcgtccgttacctccagaatgccgtcgtagcgaaccgagcgcagccgctgcccgccctcctcccgccccttattcacataaatgtagcctgcgtgaacggtggtggaatccttgtcgatgcagaaccccggcggttcatccgggcgaacccgccattccgccagccaaggcaggagttgatcggcgggcacgggcacccgctttccaacccacttctccgccaccggttttccgtcccgctcacgagaatgctgcgatagtttccgcgtgggatttgccgccaaccggaagcgaagcctctggcccgccgcaaaacccggttcgtacacttttacttcggcgggagcggccagcagaaacccggcattttgaaaggcataatcccagtcgggtttcaccgccgattgcaccagaatcacggctcgcccggcggggcccgggtcgatgcggaagagaaaaccggagtcatccgcacgcgctatgtgcacctgacccttgccgaaatcccctgggtcgaaaggtttgaggaaatccgcgtcatcggattttctggatgcagacggaaaagccatgcaaaggcgttggtgaacatgataaagattgcgcaaccacgtgcgcccgggacgggggcggtcaggattggtgccggtgtcaatcaggagacaggaaaggaacatggctattccacctcctcggcaacgagatgtctgcgccgggtttcgagagaacggaatttaataatctcctctcgcttttcgcggatcaaatcgcgccagcgcggctcctcgggattaatccggtcaagccccatgcccagaccgtattcgatcatggtcacggcgtcatggcagtaacggcagagggagcgcaactcctcgatgtgttcactaccccccgcgtggcgataggtgatgtgttggacagtcgtggcgggcgccttgcagaagacgcacaggtgataatcgccgtccagccgctccttgcgtcgatttctgtactcggtgttggtgtaatccgctctcggacggggaggcgctggcgtctcgttctgtgctggcggacctgtggttacctcaccgtcgggccatactcgcaggtgcttgcgaatgacaaatcggggctggtgcgacggcggatcgaaggtcagcggcacgtcgtaccagacgagcgcatcatcgggggcctccggctgttcttctgtcggctgccagtcgagcaagcattccaatctttggggcagatcgtctccctccaaccgtttgcgccagggaaccgacttgagggcggaaaggaggtcgtcgaattcacggggcgaatgcttcggatccagtagagggcgcgaaggagggcaggactttctgccgaggtagagcgtccacctgggcgctttgattgccccttccagttcagcaatcagacctagctcaccctgaagagcgacaagaaaggaagcatcacacagatactcgcgccgggtgagcatggcgccgggcttagttccgccttccgccgtccgcatcggcatcccggcgcctactgtgtgataatcccaccaccggactccaggaacatcaatgcgcacgcccatgcgtaacgccccgagagcgcggaggcggctctcggcggcctcaggccgcgaaactcccaatgccgcgcagagcatcccgatcacaccagacttcgtcggggcctcagccgtccgccgaatgacaaacttcgattgctgatcgccccatgcttgaaggggaccttcaagacggagaaacagggtgtttgcgctcatcatgccacctccgaattcaccaccaccttctgaacctcctcccagtcatagccagtttccttgacgaccgcccggattaacgcgttgagcgaccttatgttgttatccgtaagcgcgacctcctggactttttcctttccgttttccttttccttgaaggaggccgtcaaagggtagcggagattgggcgagaaccagaaccggctcttcggcccgccgtatccattgtcgatatcgtgaacgtactggccgagttgcgcgatgctctgggagatgatgtctcgttggtcgtcggtcactggtttggcaaaggcgttggcgtagctgagcggattgttcctgatttccaccaggattccatcgggaggattgtgggcggcgaagctgttctgcttgccggtgggatttgacagggccgcgccgcgaatgaatgcacccaccgtgtgcgcggcgagtacctggttgcccttgaggttcttcttcagggtctcgaaatcgatggaaaaatacttgtagaagcaggcggcgccaaacatagcttcacccaccaagcccgcacccgcatcatcaccgggcacgtcatcggccgccacgaagtaatccacctccggacgagcctcgtgggtggaaatcgcgtgggcaacctgaagcgccgcctcgaccgttgtgtctttcagcactccggtttccagcatccttccgctgagcgccatgtcgggcacgcaggtggattcactgatcagcttgccaaattcttccgccaactcctcatccttctttccctcaccatcctggagaagtttggccatcttcacaattgcttcctgcgtcgtataaacaagcatgtcacttttggcatcatcttcgctgcgcggcttgatgccgcacttttccagaatcttcgctgcccgctttttcgcggcgggtttcccggttactttttccgaaatcttttcggccaatttgcgggtgcggatacccccaagcaactctttgaacccttcgctcatgcggatgctgcgcttcagacactgactggaaatgcgggagcgcaggaccccgccgaaatagcaggttttgggcgcgcccaagtcgtcccggttcaggttggctgggctgtgattttgaatggcatgaatttcaatcagcataacgatcctccttcgaagtttttagaaactcctcggcccatttgatccgctttgattcgcgttcccatagcgagagatcatcggttaactctgcccagtcgaacttgaggctcttccgagacagaaggctaatggcccattgcaaggaaggctcaaggttctcaatgggtaaggtcaataatttgtcgaaccgttgcgtaaccggatcctttgcggggtcccgatctttccgacaacgcccaagctgataagcgatggctgggccgcgtgaatgttcgacgggctggaaggcgtaaagcttggcgaccagccatgccaccccgcggcgaggggcgcgctggttttgcgcgcgcaaaggccaccacagtccggcaaacaggtcaaacccctctaccgattgatcaagcctccgcccggcatgttggcgtaagagcccgagttcaccagatttcaggcgtgccaggacttggatgtattgctccgtcgctgtcacttgatcctcctttcctccggcgggtcttttccgccgcttcagtcttttcccgcatgtcaggcttcacgtatccaagctgtctccgccgcaaaagcgcagcggtcgtaacgccgggtgacagcgatttggcgacagccgccatcatcggactatattcgcgggctgcctcttcccatgcgcctccccaagcagagatcaactctcccgccttccccgaaacccgtgcttccacgtgcggacgaatagcatcgaaaatgggaggaatctcgacgtgctttcgagaagcctctctcggtgttgccttgcgagtgagcttccaacattctttctgccacctttcaatgttttcgaggctctcttggaccttccccccttccagcgtgtccggaaagggaatctcacattccatcgcttctatatatttgtcgttttgaactgtcgaaaaggcgacgacccacagacttcgtttgggatgtcctttcttggcattaagaatacccgcagcaatatttgtccattggccagccgccgcgtccgcgcgagcaagcgcactgctgggcttaacgatatcttcgccgtcactgatagtgtgcggatcggcccacactcggcccttgccatctccgtcggtctttgtgctcccaacgccagcaaacacgcagcggcgtatcagaagctctttacgcccgcaggatacgcagatggcctgaggttcttgcggattgtccaaccacacgcggcgcggcagccacgttagccccattagaagtggaacagtaccctgttttggtagggttgcatccggcctctcccatacgggcgtccccaggtccgcgcccgataactttcgccaggaaagtcgcagggtctcagcgagtgaggcgccaactggtatgacatacacgggcggtttttggttgatacccggcggtttgccgcgccctcccgatgtggcaaacaccggcaggcgcaacaaacccatggcgcagcaatccgcgcacaatccgtctttcatgtctgtcgaatgccggaagtgccaggagttggtaccagtgggcacctcttgcacaagatagtcggcggagagttttgcctctgttccactggcaatgtgttgatagaaccgcttcccgtcgcccagaaggttgaaacagtccctgttgtcgcctagcttcttgaaccaatctgcgggaaagaaggaagccgtgtcctggccatccggcgggctcccctggcaccaataaagcaatgcgaggagaaaacgcagaatcgccacgcggtccatgggattgctggcggcgatttgacgtattcggtgcgcttgagtcagcgcctcaattatgcccacgcggtcgcaacgcccatctttccacaaaacgggaatccacttttcatcgagcaggttatagtccacggcttcctccttgcctgggcaaaaggcgggtggcaggcccgtcgcgctgctggcgatccggccgtccgctggatactaacaaaggataaacgtgacgaaggtatacacccagcacaggggaaatgcaaggcccggaccggatactctggctttctggaagagggaaagttgtaacgggcggcgcaggcctgtttcgggggtctgcggtccgtcccccatcgacaacaaaactccgcggagctacagaacaggtccgcactacgcttgctttccgccttctgattccccttagccgccccgctgctcggcggtttgccgctacaactcgtggcggacccggcgtatactttcgctactatggcccaattcaatgagcaagaatcgaacgtggcgaggcattacgacgtggccttcgaggcggaactcgcgcggttgccgcaagactgccccgtggagctgggaataacgctccgctggctcgcgcgcgtggcgaagccaggggacgttgtcgcggagatcggcgtggggggcggccattacacggaatttctggcgcgcctggggtgccgcctgcaccttgtggacatctccgcgcgcttgctggacgcagtcgcagataagctgcagaaagccggcttgcatgaccgcattgccggccgccatcacctctccggcgcgcggctggaagggctgccctccgcgagcgtcgacctggcgctcctgatgggaccgctctatcacctgcaatccctcgctgaacgccagggcagcgtgcaggagtcagcccgaattcttaaaccgggtggcacgcttttcgccgcgggcatcaatcgcctgtcgtacctgcgcgatctgctgcgtatgaagtttggagccgcctccgagcgcgtgaccttccaccagcaatacctgcgcgacgggaatctggaccctgagcacgcgccgcccatcggctacgcgcacttgaccaccgccgcggaattccgggcgctcttccagggccaattcgagaaggtggcgttcctgggcgttgagtcctttaccacggcgtggcagaacatcttcggcgaccttcccgcggcagagcaggaactgtggctggaccttgtggaagcaaccgcacagacgccggagggcatcggccagtcggaccattttcttttcgtgggaaggaagtaggcctggcgctgaccttgaggtcggcacgtgctgacctgaaggtcagcgttacgacaacggtgtacaataggtcacatgcgaatctacacgctttgcctcttgccgctgcttcttgccggcggctttgctcaggattctacggtcgcgttgaaggttgacgccaccgacgcgccgcgccgcctttttcacgtgcaaatgaaaatgccggtcaaatccggtccgctcaccctgctttatccgaaatggattccgggcgagcatatgccggttggccccatcaccaacctggtgggcctgaagttcacggccgccggccagcccgttccctggcagcgcgacaacgtcaacatgttcgccttccacctggacgtgccgccgggcgcgagttcactcgacattgcctttgattacatctcggccgtggacgaagatctgttctcttccagcggcagttccgtgaccagcgaattggcggtgctcaattggaaccagacggtgctgtatccgcaaggctccaatccggaccgcatccagtatcaggcaacgctcagagttcccgccggctggcgctatggaacggcgctgcccgtggcacgggaatccggcaatgaggttgagtttcaacccgtctccctcaccacgctggtcgattcgccggtttccaccggcattcactaccgcacttttgacctggggaatgacggcggggtggcgcatttcattcacctcgccggcgatagcgagcgcgccctcgaggtgagcccggacaccgttgcgcattggaaaaatctggtggcggaaaccggcgcgctgttcggctcccggcactatcgcagctatcattttctactgaccctcagcgaccacatcatccgcattggcattgaacatcacgaatcgagcgacgatcgcgatcacgagcgcaccttgattgaccccgacttgctgaaagtggatggctcgctgctcccgcacgaaatgacccattcctggaacggcaaataccgccgtccggagggtctggccacgggtgggttcgatgcgcccatgaagggcgatctgctgtgggtatacgaggggctgaccaactatctcggcgaggtgctggccgcgcgcagtggattgtggagcccggaggactatcgggattcccttgccatgaccgccgcccaactcgaccgcgagtcgggccggacctggcgtcccctggaggacaccgccgtcgccgcgcaacttctttatgccgcgccggacgaatatacagactatcggcggtcggtggactactatcccgagggttcgctgatttggctggaagccgacgtcaccattcgccgcctcagccagggggcaaaatccctcaacgacttttgccgggcgttttacggtggcccgggtggcgcacccgcgctgaagccctataatttcgacgacttgatcgccgctctcaacgccgtgcagccttacgattgggccggattttttcagacgcgtctgcgctccaccgctcgccacgcgcctctgggcggcatcaatgacgggggctggaagcttgtttacaacggcacgcgatctgatttgtggaaggcttccgaggagtgggcagacgccatcgacctcagttactccatcggtttgagagtgaagggaaacggcgccatcaaggatgtgtccatgaacggaccctccgcccaggcaggcgttgcgccgggcatgaatttgatcgccgtaaacgggcgcgaattcaatcccacaaccctgcgggaagcggtgcagcagaccgccacgtccaccacgccgctggagctgctgctcaagacgggcgtgtattacaaaactttccgagtggattatcacggcggcgaacggtatccacatttggaacgcgatcaggccgcgcctgatttgctctcactcatttcagcgccactggcgaagaaatgatggtgacgccctagtgctcgatgcagaggtcatagtttgctttgacctctgcatcacacttcagaggtccctcattttcaatgaaggggatccccgcttcctgaaggcgaaagcggttggagcggagatcgccgaaggctatctgaaagggaacgtgggagcggagatcagccagacttgcggcggtctcgcgagtggcgctcaggttggcgcggaaattaaccacggcgatcccggccacattcacaccgaggatgagcaacaccagccaggaaagacgatgcaagttcggtctctcaacgggcccgccgagagccgccagcgccaccaggggcaccaaccacacctgcggggcatagcgggcccaccagcaaggctgaacgggtaataccgaagcaataattatcagaatgattgccgttgcgacccagggcacggcgccaccccgccataaacgaatcgccaggaacaccaaagacaaaaccagcgctgcggggaagagagggccgaaccctccggcgcgcacatcgggctcctgaaattccatccattcgccgcgggcaacctgccacggagctttgggcgtggactccggcggccagacgctcgatcgcgagaaaatcgacgacgcgaggttcgcaacccggttggcttggaagaaccgcggaggagtatcatttgccacgctgaaattcgcatgatctcctcttccgaaaaagggatagaacgggtggccattctccagggtattgaacacgtagggattcatcccgaaaacggccgtccccagccccagggccagcaaagccacatataaaggcttccgccagggccgcttctgccaggccaggagagcaaagaatccggcaaagagaatcgtggcatacaccggacccgtgaacttgacctgtatgatcaagacggcggccgcaaacagcaaccagttcacccagggattgccacgggaagcgatcagaaaacaaagagctgccaggcagacgaaaagcgacgccacttgcccatccacatagaaagtgcacagttgacagagcgccaccgggttcgccgccaccagcaaggccacggccaccggccaggcactcagcttttttcgcgagccggcgaaggccgccagcgccatgcaaaaagcggcgcaaataaggagcaggttggcgaacttgccggtttcgatacgtcccgttataagatacatcgacgctgctattatccaggaccctttggggtagtgattcaagatggcgttttggaagacagccaccgggctgatgtggcgcgtgaagagcggattccacccgtgggcaagctggtaagcgccttcctggtggtatgcctggccgtcaaaagaaacatcgtagaacgccccgctgatgcccgcggaggcagccaccagcaagaccagcagggcggccaacgccagggtcacgcggaaagggcggcggaagtagattcgtgctccccacccggtcaccccacatgaccccaccagggcggcgggcaacaccaacccatgaatgggcaatcccagtgcccagccgaattctgaaatggccacaatcagaaagagaaacgtcaggatcgccccgccgagcaggctggcgaacgccggaatcgaggattgcggttcttccgtaggcaagctcacgggcgggcctcgctagactttggagtgagtgacgcggacggagggcatgccatcgggctcatccacaagctcgatatcctggaaaatattgggcgattccttcttgaagacgcggaaaacctcaaccgccagcaagcggatttccgtgtcggcgtggatgctgccgcgcagctcgaggaaatgccgccaggcgcgggaatttcccgtcacgaaaatcttggtttcggtggcattgggaagaatggagcgggctgcctggcgcgcccacttgcgccggtcgcggggggccatttccggatgcttctgctgcacgtattgcgccgtggcttcggcgagttcatcatacgcctggcgcagcgattcgatggtctgctgccatttcgcccgcaactcgggattctcctgatagagcggcggcaccacgtagcgcgcgtcgctctcatccacgtagcgttgggaaagttgcgaatatccgaagccggcgcggtggcgcaccagttcatgggtgagggcgcggctgacgcccgtgaagagcaggcaccacacggcgtgctccagcacgctgccgtgtttggaaaccaggatgttctccaggtactcgcgattgctctttcttcccttgccaaacgacatgtagcaaacacgcccggcgatttccgccagggcctcggcggccgcgggggcgtcggtggagaacaccatcccctcatccgccaggaagcgcgccagttcgttgtcggcgacgtgctggcgtcccagcagataaactttgggcttgtcgatgtagggatcgaggggtggaggtgttgccatccggctcccgttaagccaatttgtttagtgccctgctgcgagtattgcgcctggaagacgcattggcctgtagcgctgaccttcaggtcggcacatattgagctcaagctcagcgccacaacagcccactaagccttcgtgccgaccgccgcaggcgtagctttcttaaagccggcatacttccgctggaagcgttccacgcgcccggcggcgtctacaagcttctgcttgcccgtaaagaaaggatggcacttggagcagatgtccaggtgcaggaggtcgctcttgaaagtcgagcgcgtcttgaaagcgttgccacacgcgcagaccacattgacctcatggtagttcgggtgaatcttgtccttcataagactccttatttgcctcaagagcaatcctatattgtaacggcatcaccggaaactttcaattcgtcttttgtggggagttgggtcagatgggcggctgggcgcttaattctgcggagagttgccgccgcccgcaagcgccaatgccgagtaatccatggtgattttaaggctaatctgctggtcatgggcgtcgacattcatggcggtgtaggggttcgcttgaccgggattctgcaattgccaggcaacctgttgcgccaccttgatgccatccaagacctgccgcagggtggccgcgtccgacgctgtggcgcagttgagtttcagatccatgttgaccttgtccgacaattcaatggaataggtcaaggaatccactttctggaaaacctgtccccaatccaacttcaggttgttttgatttgacaaccatgcgccaaaccaatcgccgacggctccccccaaggcgattccccaaatgggcgcgcccttgttaacgctgccgatcaggctggtgaaatgtgggtcggtattcaagctgggcgcctgtccggcgtgcgcgtccagcatcgccgtcacggacgagagcggcccgaacgctccgagggaatcctccagaatgacaacgcacgtagccgccaagccggctcgcaggcagtaggcctgctctccggcaaggggagtgggcgtgaggttctgcgccgccgcccggcccgccacccccgccttgtcaaagcgtccggaggcataaccgtaaagatccatttccttcgcgcccggtttccatcctgtcagcaagtcatcgatatcgtcctcgctcattccgatctggccgagcgccgactccaactgctgcaagcgcggccccaggaatctactcttaaggttctggtaatcagggatggcgcgcaacttggcagggctggaatactccacccgcagggtctccgcagggagcccggacatggccgtggtcacgaaatcctgcccggcgactttttggggaacccccgccaacacccacaccacccatagcgcgagaaggggtcgtctcatattcacctcataacggagaaagcgcggcgcacacccgaattgtagggcggaaagccgagtgcctagagctcgaagttaagcgcggtcgatactgccgccggctagatcccgccgcctgcaagcgtaaagctacaaccctcggtggaaccagcgataccagggctggttagaaaagcagcgctgttagcggtataccagttcactatggctgcggactgagacgaaagagttgaacccgtaacgctgtccatgctactaacggtccagctagtggggtacatgcccggattggtgatgggttgcgccgtcgtgactaagagggtacttaaaagaccgctcgagtcagcattagccgtccaggtcccggtggaggtgtggctagccccgttgggatcgatgaaattagccttgaatcctgcgtcgctgtaagtaagttcgaaggcaaattggttcataggcacaataccgccagctacttgacaattgtcgactaaaacccagtgagaacttgccgtcgcgagagtgagaccgttggtaataggcagaatcaggttgcttgcttgggccacgatcagcgtgaaggtctggaccgcggatgtgccgacgccattggaagccgtgaacgtcacggagaacgtaccgctggtggtgggcgtgccactcagcgtgcctgtcccgttggaattgtcatgccaggtaaatgtcgcgggtgccccggtctccgtgatggtcgggatgggagttcccgtggtggtcacggtgaatgagccccccgtccccacgctaaacacggcactgtcggcgctggttatggtcggagccggagaagtggggggcaatttggtgctgccacccgcgccgcaggccaccagaaaaagtcccatgatcaccaggaaggcaattataagaaggcaccgagcgttgctagcaagcctcttcataagaagttctccttatgttttcagattaactcactgtcagcataagtgcaacactatggctcaaggcagaagatcctgcgccggcagttcccgtcaccgtcagcgtggaggttccaacgggggttacggggttagacggggtcggcgtaacgttgctggtcccacctccgccacctccactgccacatcctgccagcgccagagccagcaacaatcccaaagcgagcgggagcatggcggaccgccatgggctcgagccgggttggttccggcgatgaatggcccatgccattatccctagaaccaaggcaagcatcaacagaaccctaaggcccggcggcaggggcggaacctggggaaggggcccggagcgcggcgcactcagcgaaggcgcggtggtggaaaccgtgacggtgatattggtcgcagagttcgccgctgttgccgtgaccggccaaaccgtgcaggttgctccggcgggagctcctgtgcaggcgaaggtcaccgccccggtgaatccccctataccactcatacttaaagtgtaagtcgcaggctggccgggcgcaacggtagccgaggtggaagaaccggatggtggccccagggcgaagtccgggaccgtgccgatcagtgccacggtctgagggctgttgtacgcattgtcgctgaactgcaggctgcccgacgacatgcctcgggccgtcggcgtaaacgtgatcgccaccgtgcaggtcgcggtggcggcgacgggggcggaggtcgagcaggtggtcccggagctgacgatggcaaaggggccggtgaccgcaatcgcgctgaaagtcaggctgctgttgcccgtgttagtgagtgtgacagtctgggaactggtcgtgacgcctatagatggagccgagaaaggtagcggggaggacaagctaacctcgggcccagtaccggttccgctcaagctgacggtctgcggactgctgttggcgttgtcgatgagcgtaaggctgccggagcgcgcgccgtcggccgtgggcgtgaacgtcacatcaagcacgcaactcccgccgccggcggcaaccggtgccgtggtgctgcaggtggtgccgctggccgccacggcaaagtctcctgtcaccacaatgttcgtgaaagtcaggggagccgtgccgttgtccgttaccgtcaccgcgccggctgggctcgtagtctccagcgcttgactgccaaagctgacacttgaagtgctcaggtcggcagtgggggcagtgccggtgccgctcaaatccaccacttgaggactgctgccggcgttgtcggtgagcgtgaggttgcccgagcggccgcccgtagccgagggcgtgaacgtcacattgatcacgcaattactatcgccggcaagcggcgcactggtgctgcaggtggtgccgcccgctgccgcaaagtcccccgtcaccgcaatgcccgtgaaggtcaaaggcgccgtgccggtgttgctcaccgtcactgggctggccccgctggtggtccctacgggttgattgcccagcgacaggctgggcggggtgacgctggccatgggaaactggattaatactgagacgttgttcgagcccccgttggcggtggccagaccgagcctgccatctccattgaagttccccgccgcaactcccatgggctgggctcccgtggccggggatgaggcggcgggcgtaaacgtgccatcgccattgcccagtaagagggtcaccgtgctgtcggtttgattcgtcaccgccaagtccaatttcccatccccgttgaagtcccccaccgcaattccaaaaggcaaagatccagtggccggagacgcagcgctgggcgtgaacgtgccatcaccatttcccaacaagatcgtcacggtgttgctgccggaattcaccaccgccaagtccaacttcccgtccccgttgaagtcccccaccgcaattccagaaggcgaagatcctgtggcgggagacgtagcggcgggcgtgaaggtgccatcgccattacccagtaagagggtcaccgtgctgtcggtttgattcgtcaccgccaagtccaatttcccatccccgttgaagtcccccaccgcaattccaaaaggcaaagatccagtggccggagacgcagcgctgggcgtgaacgtgccatcaccatttcccaacaagatcgtcacggtgttgctgccggaattcgccaccgccaggtccaacttcccatccccgttgaagtctcccaccgccagttcgtgaggcgtggttccagcggccggagatgcggaggggggtgtgaatgtgccgtcgccatttcccagtaagatggtcacgctgttgctgccaggattcgccaccgccaagtccaattttccatccccgttgaagtccccgaccacgagtccataaggcgtggcgcccgcggccggagatgcggaggtgggcgtgaaggtgctatcgccgtttcccagtaagatcttcaagttgttgctgcctttattcgccaccgccaaatccaatttcccatccccgttgaagtcccccaccgcaattgatacaggatccgttcccgccgctaggggcgagccgctcgccttggtgaaagctgccgtcggggtgggagccgtaaccaagaacggaatcatgttcgaagtcacgaccgaaccgggattgcccacggtaatccaagccgtaccgatcaaggcgatgtttgccgccggcacagtggccgtaagctgttgactactcacaaaagtcgtcgccagcgctgtgccattccaattaatcgtggcgccgttgacaaagcccgtgccgttgacggtgaaagtgaatccctgcccgccgggggtgacgctggtgggcacgaggggttggttgatgacgggcacggcacttgcgccaatgccggtcaaggcgaccgtttgcgggctgttcagggcattgtccgtaatcgtgagggtggcgcttctgcttcccggcgccccaggtgtgaagataacattgatggcgcagaggcttccggccggcacggatgatccgcagttgttggtctgggcaaagtcaccactgttggtccccgtgatggcaatgctgacgctcaaagggacgttgccgccgttggacagcgtcacgggttgcgcggggctgctggtgccaggaatttgctctgggaaggtgagggaagagggcgacaaacccacgccggcccccaatccggttccggtcaaaagcaccttctgcgggctgtgaggggcaatgtccgtgatattcagcgaggcgctaaagctcccctccgccgacggagtaaaggtcacgctgaccgtgcaggtgccgctggcagtgagcgtggctcccgtgcaggtgtcggcgctaatggcaaagtcgctggcgttcgtaccgctaatagcgtcgcttaagatgacgaggttggcggtcccggcattgctcaccgtcacgctcagcggggtgctgctttcatcgatcggcaggggtggaaatgagaggctgagcggggacaaggacgccgaggcggaagtagtgaagctggctaccaggttcgagacattgaccgtcccgatcccggtggtgaagtcccacccggtcgcagcgtcgaacgcgcgtagatagtaggtgctggtgttgtccgtcatggcagcgcacgttccgcccgttcccccacctccgctgagaacgcagtggggcaggctggtgtagccgctgccgggggcggtaagactggccgcgattcccgtgacttcggtggcggtgcaggttgcgcctgtcccgccgccgccgccgagcgtgcaggcggggttggaggtgtagccgctcccaaaattggtgacagccaattcgcaaacctcgtaattagcacatatcatcgccgcacaggtcgcacccgttcctcctccgcccgacagggtgcaggtgggctctgtcgtataaccgaacccgccgttggtgagatcaatcgtcgcaaccacgccggtaacgctggcgctgcaggctgcccctgatcccccgcccccgctcagggtgcaggtaggagcgctggtgtagccgctcccgaggttggttgccgacaccgaactcagggtctggggggcggtggaaagcgctccataggtgcccgagggcgcataacaatttatccctgagcaaggcacgtcgctatcgccccccgtgcccgttcctccgtggacaagcggaatctgggttacgtcgtagaagatacaattgctgcccaccgcgttgccgcgagcggatttacaggacgtgctgccaacggagccgtactcctccgccgccagctcgtaataggcaggattggggttgccccaccggctcccggaagcctgattgacgagcgcctgaatccccgccatgatcggtgcggcaaacgatgtcccgccacccccgttccacccgctgggagcgccgctgcaactcttgccattgttgttgggatcagaaaagcattccacgtagaagtgcccccagattccgttggcagcgaagagggaaacatcgggaatgtcgcgcacgccgtcgctgggattgcccatcaaccccgactgccacgagggcttggcatatcccgcacaggtgccacccaccacgccggggatatcgggcgcgccggtggcgcaagcgctgggcccgccgctacccgctgcggtgttgaggaggccgtaggcgttaagatcggaggtattattgcaaagtccgccggcgccaaaggtgggctcgactcccaggaaatcagcgaacagcacgctggcgcaagagctgttccagggaatctcaggaatatacgaaagggccgacccgtagttggtggcattgttggtagagttccaatagatgtcgttggcgccttgataagtatcggcaaagtcggtgccgcccaccgatacgtcgtagggtgtggaggtgtacccactgacattgattccgtattcggcataaggatcttggtcgtcggaactggccgcgcctgagtcgcccgagctcacgaagacggtgacgccctccgttaccgcctgctgatacagcgagctaacagactgattattggcagcgcccagcgctgattcggattcaccgtagctgatgctgatgatcgccggcggcgtgccgctggcgttaagaatgttctggagggcaataaaaccgccgaagttggtttctgtgtccgagcaggatgccagctcgatagccgcgctgggagcccccgcgctcgcccattccacatccaaggtcgcctcttcatcggcaccgttgacgccgggatcagcacagttattcaaggaaccactgggggggtggacctgcgtcatggtgccaagagggtacgctgaggcaatgcccagaacggagcggaaagtataccagtcatccgtggagtaaacatcggtatcctctatcactacaatcgtttggccctggcccgaatagcccgccgcaaagaccgggttgaagttgtagatcatccacaagtccgccggcacaatctcgtggtagacagtgccatcaaaagtgaaagtataattaggccgcggcacaaacgtcgggtgaggccggaagtcattcagggaaacgacgcccgccaccgtggaggccaggtcggccggaatctgcgggtcgctcatattggcgatgtgcggatggcccttcaccaacaagttatgaatctccgtgtggaaggcttggcgaatctggcctgccgagccagtgaaatcaacaaccatttgattgggatagaccaggttgaccttgaacccctgcgactcgagccaagccgtcagtctggcgacgtcagccggagccacaccgtacctctgcccgaattcctccgccgtgatccaatggtgaaaaagcggcgacgcgggatcgtggatatcacggatgaattgttgcagtgcttgctcccgctccggagtccgctgcaactgcagcatcatgtggttgagcgtcaggccatcggagactcgcccgcgatcgttagctgcattcgcttccggacgagtgttgccccgcagggtaaccagtgtgtcttgtcccccctccggcgcggaaagcgtgcttgcctgcgggccggcgctcaccgggccagccagtgcggccgccagcttgcgtccagcaagtttgggctgaagcctcgtgggcgcgaactgaaccccacgagtaggaagaagattctccgcggcttgtaccggctgaagaacaccaagtcctataatggcaagaaataaaacgccaacacatccgcagcaaagcacggtgcgcttatttgcagtatgcgattgcctggtaacactgacgggtagaagcatggagaaccctccactggggcaaaaatccgcattaatgcgtcaaatctatatcctacacgactgaatgtcaacttataaattctataattgactatatgtcagttttaataatggcgcacagagtgaccgtcgcttgatgaaaatgagcgagccacctcctcgcctggggtgcaaaaactaagaacccaaggcggcatttggaacgctcaatactgcttcacggccaccacttgatcgccgtcgaaggtgacgaaaagcacgtggggaggggttccgtatatccaattttcctgctctgcgccgttgcgaacctcgcgcacgcgccggtccggggtgcctttagccgaaagcactgcgtcgcggtccattcccacgatgacgttgtggttcttgatggcctccttgacctcgggggggagattcggcgagtacaacaccgtgggcgagtgacgctcgaaatcgagaacgcccgacagaattgttttcaactgagggacggtaaggtcgggaagggccttgccaaaatccactgtgatggaggacccgaaggcggtggccggcgtttcttgcgaaccaatgggggtggttgcccccccgacgccgatctcgatgtgctggtaccacttcttcccagaccttccgcccccgttgagctcgaaaacaatctggttcgacttgaattggatcttggtgatagccgcgggcgtgcccgctttcatggccataccgttgttgtgcatttccttttgcgcgtcttcctggtccagctttccctgcgcatcgatgcgcacgccccttttccccagaggcaggggaaccttggtcaccgccagctctcgcaggaggccgcggaggatctcaatgcgggttttggaatccatgccttccctggcgagtcccaacggaatgatgaggaaagcaagggccacccacaagctccgcccgagcctgcttcgggtggatttcttggagcgggcatgggtctcaaaaccgcaggcggacatgggaatcaatctcttttcgcctctccctcgggaggagctgagaggattgtgagcggcggctggggccagcttgacgtcaccggagcaaaaaccagggccttcatttccgcactcgtatagatgcttttcgcgtacgacacgtacatggttccgagcaagattactcccgtcaccagcaagccgccttccgggccatactcgccgccagtcagccaaatggaaccctgcacctgcgcgctaagaaggctggagggaacgttaatgccgctgacgggaaggcccaggaaaaagcccatgaggaaattccaaatgaaatgcatcccgatgggcatccacagggagcgcgtccgcaaataggcaatggcgaaggggatgcccaccagcccggtgttgagggtggagatccacgtccggtgcgggttgccaagatggacaagaccgaacaaagcggaagttacggcgatggcccccacgggagtaatggactccatcaagcgctgaaaggggtacccgcgaaaaagggcttcctccaagggcgccgccacggcaaacaacataaaggtgagggatcctgcccgcagcatggggtgtggcgcaaaggtgaaatgagcgaaaccgcaaacccactccagcacgaccgcgccgaatagcatggcggcgcccactgccaggccgcggcccagttccctccaccaccgcgggtgaaacgccaacccgatggaacccaggggacgccgctcaaatacctccgtcatcagcttggatgcgggaatgaccgccaacaggcccgcgaaggattgccagaagaacgtcgcaaagaaactcggatgaactttgccgatgagaaagatcgcttccagcatcgctcccgagagcacaagagcagcgtacagaagagcgacggaaagaaagaaccgccagatggggcgcaggcggccatcgtatatgaatattccggtcgagttcatggcgtttcccgagtccgctcaatttggtcggcgcgaacttccagcccggtgctggaaatggcgaagttgataatctgcccgcccatctggataagcgtgttctccaccgccgccttggcgcccgggcggaccataaagaccacgcatccgccgccccccgccccgcaaactttggcagccacggttccttgcttgcgggtttgttcgatcatgcggtcgattttgggagtggagatgcctttgaaattgcgtttgcggttttcccactccagcgccagcagctccgccacatcgttccaatcgcgggccagcagcgcttcccgcatctggccggcgatggtggtgatttgatcaaaattcttgaggacgcgctcgttgttatcgatatgggatttcatgacctcccagttgttgatggcggaactgcgcggttggcccgtgtagcaaagtacaaagcgcttttccacgtcgctgaagggcagaggcaggcgctcgggcttcacgccgtcgcgctccaaatggatggcattggcgccgccgtaaagcgccgggaagtagtcctgccagcccgtgggcacgcggatgacaatggcctctacgttcttggcaatctccaggatcgtcccgcgtgtgcagcgcttgccggtaactctcgccagggccccgcacagggcgatattcagcgccgaggagcctcccaagccggcgccggcgggcacctgcgaactggtcttgatgttcaatccgcgccgaggctcgaaaaacatcaccagttcccgcagcaagggcaactgcgatttgccgagagaaagcgcggtgaggttgtcccagctttccttcagtccctggtcctgcgagacgagtacaatgcgcgggtcggcgcgggtgtcgatcacgcatgaggcataacatcgtatggcaatgttaaccgtttgcgcaccaggatgaaaaaggtaaagcggccagatgtccacggttccgcccgccaaatcaactcgtgcgggcgctcgcgcttctattcgcatgggggctccatagtcattagtccttggccatttgtcctttgtccgtcgtccgttgtcagctctccgtcgtcagccttcaataatcattcgtcgccgatcagctcgtcttcctcccatgccgctttaccggtgactgacggctgaccacagacaaaggaccacggactaaggacgcttttcattgttgtgtcacctgcatcgtttcgtcgatatccagggtcggccaagcggctttggcggcgtccgtgggccgggccgtaatcttgaagtgttggccatcgtccacttccgcggtgaaattgtagccgcgccggttcgtgccggaaaagttaatcgcaccgtcctgctggagctcgtcaaccgaggcataggacccttggcttgccaggtgcatcctctcggcctgggcgatggccagcaggtcgcccttgacgcccaccacgtcaatcacctcccggggagactgcaagcccgtgcccgtggggtccttcggcatctgggacttcatcacgaaccagacaatcgccaacacgatcaccaaacccaaaaggcttccgaatgttctcatatttccacctcaataaaatggcagtatatcgttctccttcagcggtcctattctgacccgatgtgcacgcggatgcaacagggaggtgcggggtggcaacatgaaagtgaaaaaggggatgtagagcgtcccgcccgccctacgaagctgtgaaaagatcgacaatctcgcgcagagacgcagaggcgcagagatacagaatagataactgctttattctctttttcgcctctgcgcctccccgtctctgcgcgagatgcttttgctcgttccgggatttcttcacagcttccctaccaccgaggggccggctttcagttctatgtcatgcacccatttgttttggacctcaggcaagttaagatatccgccagcacaagcgattcgattctcacccatggaggcggcgcgtggcggaaacagccgatgtggtgattgtgggcggagggattgtgggcgcgagcatcgcctatcaccttgccgaggccggcggcgccaacgtcatggtgctcgagcgcgagcctcacctggggcgcggctccacaggcaaaagcatgggaggcgtgcgcgcgcagttctccaccgagatcaacattcgcctgtcgctctatgcgctcaatttctttgcccgcttcgaggaggccacgggctgccccggcggctatcgtccgcagggctacctgttcgtggcgacaagcgaaaagcacatggcttatttgcaaaccaatcaccaattgcaagtggcgtgtggagtgaagacggcggaattgctctcgcccgccgaagtccttcgccacatgccgcatttgcgcgcggacgacatccggggcgggagtttcagttccaccgatggatttgtggacccgcacagcgtcatgaccggcttcatgcagcgcgccaccgaaaagggcgtgcgtctgtggaagggcgcggaagtcacggcgattttgcaggacgcgcagggcatcgcgggcgtccgaaccacgcgtggcccggtgaccacgcgcacggtggtgaatgccgccggtccttgggcggcacaagttgcagccttggccggattgcaattgcccgtcgaacccctgcgccgcatgttggtccccaccgaaccttttccgctcatcgcgcgcgaggcccccatgaccatcgatatggctacgggttttcacttccgccccgagggtctgggaatcctgctcgcctggaatgatcccgaggaaacgccgggattcaaaacccaattcgatccggggttcgtcgagaagattcttctgcgtgcggttgagcgcgttccctgctttgaggcgctggaagtgaaccccaagcgcgcctgggccggcctctacgaaatgactcccgaccattaccccatcctgggacctgtccccgaggtccccggcttgtatctcgccaacggcttcagcggccacggcgtgatgcattcacccgccaccggcaaggttctggcggatttgattctgcacggccaatccgacctgattgacgcccgcgctcttaacctggcgcgctttgccgaaggccgcctgatccacgaaaccgcggtgctgtgagagggcaggctattagcaggctcagagtgattatcctccggcaaagccggaggctttatccgtcacctgacggacgggccccgcaaaggggcctgaccgccgccgtcgggaaaagacccctcacccccgcgacctgcagaacatgggatcccctcacccccacgacaagcagaacgtggggcccccttctcgcctcggctgatgaaaacgcctcgccgagccaccctctcccccccataagcgctaacttaagctgtttgggttgaagtggccttcaagtttccagaggtccatttcgggatagtttccgggtggccgacgattcgcccgggaccggcgtgcgccacatccgcgcataggcgacaaacataaagtacccgtaaagattttacggaatcaaaaatcgaaatcgccggggccagtattctaaaaggcgaattgggtgaccagggagattatttcttcgggctgggcctgaacgtcggaagaccctcgccgcaggtaaaccacattgtccagcgtgtacagcggcttttcgccgcgcgccacggagattctgcccaccgtcattcctcgaatttcctcgaagacgacttccaccggcggagcgggttttatgcgcgtgcgggcaagctggtggattcgccttgccaaagcatccttccccttgaagtcgaggtccaaacccttgacgtggcccgtatcgtcgagctcgatactgttccgcttgcaagcagaccgcttttgcccttagactccttcccatgggcgatcatctgatatccatttcgccagacatcatgggaggcgccccggtcttcgccggtacccgcgtgcccgtccaaaccctcttcgagtacctggaggccggggacacgattgatgatttccactttcccaccgtcacgcgccggcaggtggtggtgttgctggagatcgcgaaaggcaaagtcctcgccgaggtcaagtgaagatcctgctggatgaatgtgttgacgagcgcctggctcatgactttgccgggcacgacgtgctgacggtctggcagatgggttggaagtcagcgacgtttggcgggcttgcgcctgcgaataacgtttggtaaggtgaacctatgacgcaattacttgaggatgcgctgcggaaggtcggcaagctcactgaagacgagcagaacgccatcgcctcccagattcttgccacgctcgaggatgaagaagcgtggggcaggacgctgcgcaagaatcccgctaagttgcgcaagctggccgccgaggcgctggacgagcatcgctgcggcgccgcgcgcccgctggacgagcttctgtgatcccgtcgcgcaccacgcgcgccttccgccaagccttcacttcacttccaaacgacgtacgccggcaggcgcaacgtgcttaccggttgttccgccgcgatccacgccaccccagtctgcgcttcaagaaagtggatgaggaagccaacatttactcggtgcgaatcgggctgggctaccgcgcgctgggagtcatggaagggtcaaccgtagtgtggttctggattggctcgcacggcgaatgcgacctcttgctgggatgacccgccttgctggaaacgctacccctcgtgaaaaagggcgaagtgcgcgaaattggcgcataacaactcgcggccggcatctgcgcggggcgtcacccagggtgggaagttggtgtttgtcccctccgtccccttgccgttgcgcttggtgcaatgattggggggaggacccatacatgcggtgcgaaggctcgggtttggtggtgaaacgaagccaaagcggaatggagacgtagacaagcatgccagattctgagcagcgcgcaaatgagaaacggatttttcccgaccttctgaaatacgtcggcgacgattcggagaaattgaacgagccccttacgggcttcttgggtatgcagggccggttagctacgggcgaattagctgttattggcaggtctccaaatcaatggctgaacgaaggttggaccgccgaggaaatgtgcgacgagaagaatcatcaagcagttctggagaagaccttggtggagagtcttcttgaaaccgaccgcccctgcccattgctgtgggtcacagactgctgggcaggagggcgcggtaatatgggaaggactgcattctggcgggttgtgcgatctgtaatggataatatggggattgcagatgtgctaaaaagcgattggccctcgcatttaatgtggacgaacttgtacaaaattgctcccgctaagggctggaaccccagcgttcgtctatgcgatgtccaatttgaattctgcgtacagattcttcgggaggaattcctgtggtggaaacccaaacgcgctctgttcctgaccggctggggccgggcaaaacatttcctaacccggtttcagacggcccaatggaaagatgtggaggagaagaaattcgtggaatgggttggcacggccgatttcgaaccgagccatcgggtccaaatcgttgtggcaaagcatcccatgggaaagccagaaggtcgcctagtggcggaaatcgtgggggcattcaatttgattgaggagcgggtagcacagaggtagccgcagtttggcttcctcggcggttcgtaatatgataaagtcaacatactaattaatacgcaatgactacccgcttgtatttgacggcgtgaagcagagttccagcagagggtggcccccgctttccacccggttttgatgacgcaggagagtggcagacggggaaagcagcggcgtcaccccacggggctttgacattatagtaaatttcctatatattgttgaggtgaggtttggacaggctaaaaccaccggtcctacggcctcttgtctggctgggagactccctgagaaacgtgcgggattttccggatggtgcacaaaaactcctcggggacgagatccagctcatgcagtttggcggtatgccgaaggacgccaaacccttcaagggtgtcggcagcggcgttgttgagattgccctgcgatattcctctgatgctttccgtgtcgtgctggcgacacacatcgggagtcggatttatgttttgcatgcctttcagaagaagtccaagaaaggcatcgaaacgccgaagcgggacgttgacctcatcaagaagcgatacaccgaagcacaggagttggcaaatgagtacggaaaggcgaaaacccattgagttcgaagcgggttccgggaacgtgttcaaggatttgggccgcaaagatgccgaccagcttctggcccgagcgcagatcggattccatgtctacaaaatccttgaggacaagcagttgaaacagcgcgaaatcgcggatgtattgggcattgcccagcccgatgtatcgcacctgatgaacgggcacttcagccgcttcacaactgacaagctgctggactttctgaaacggcttgaccgcaaagtgacgatcgaggtcagccgacgtcacaagggcgaaccctaccagcaggttacttttgctccgtaggaagtactagggggcggaagaagggaacgcgtgcgtccaggcactggtcgcggattacccaaacccacgccgggtccatggtgcgggcgccggtgccggattcgccgcccacgatcacccaatcgacacgttcgaaggtagcgcagggcccgctctccggccctgcggcttttccagcagtgtgggtgcacaatgggaaaacggtctttcgtcaccccgcatggcgtccccccgaccacccaccgctgcaccggccacaccaccacgaagttgaagagccgcagggccggagagcgggccctgcgctaccgtcccctcgttccccattcaccctgtggaacaccgggtagggcaacccggcatctcgtgatggccttcacccgcaggcggaagagggaattggccagaccttcttcgtccaagcgcgttctccccggcaggagtttcaccgtaacgaacaggaagcgcgcgtagagaaacggccggcgccaacgccacagggcgataatctacgcgccctcgcgggcgtccgcaagacgaaaagccgcggacattggaaagcatgaccgcgctacttgctgcggcggaagtgacccctcacccccacgacaagcagaacgtggggcccccttctcgccccggctgatgaaaacgcctcgccgagccaccctctccgaagctgtgaaaaaatcgaccatctcgcgcagagacgcggaggcgcagagatacagaataagtaactgccttattctctttttcgcctctgcgcctccgcgtctctgcgcgagatggtttcgctcgttccggaatttcttcacagcttctcccccaagggggcgagggaccgggggcataggcgttagaataagcactttggtgctgtgggaatgatctttgcacctcctcccaggcccggagggccgtaagagggtagcccacggcgtaagccgtgggtggagccccgaggttgcgagcgcagccccagcggggcgacagaaaaggcccggaatccccgtggccacgggggattctttcgcccctccggggctcaccttcaaggttactccctccacccacggcttacgccgtgggctacgatctttcgccgctccgcggctgggagcgcaacgccagtcttaatttaacgcctatgggggccgggggtgagggggttctcgaataagcaacgaacttctaactcaggacacaagcacgtttcctagagccggttcgcggtcaaactggtggttgcggtcgagtgcttgaaaagctcctgttgggggggggagcagcgcacgccatcctatgctcatattcccgcggctttacgatagcgcgccatatgctcttgcagctcctcgttgttgggctcgagggccagagctttcttctgaatctccaccgcttgctgatagtccccattggcaaagtgcgcttccgccagcgtatcgatgaagttcccctctttccattcgctaagatccacggcgcgctgagcgtggtccagggcggccttggggtcgcgaaacttcgggtcatcgcacgtggcatagagccatgccaggttgttatgagcttccgccaagtccggctccaggctcaaggcttgctggtagcttttgatggcgttagcgtaaagcttctgtttggcataaaggtccgccagaagcgcatggttcccggcgagcgctcttcttcccttggcggtttggggttctttgtcgagcccatcaaagatctgctgcgccttctggagatcgccgttcaactggtaagccaatccaagttcaagcttttgctggtcatctccctcggtcaagcgaaccgcttcctgaaattcctgaatggccgggccgtatttcttttgtgtcaggtaatacccgcccaactcctcatgcggctgctcctcgcgaggcgccagccggaccgcttgctggaaactctggaattcgcggtcgtactggtgggcagcttcgtaccgttcaccctgtaccagaagccggtccatggcctgaagggtccggtaatggtttgccatcgcggccatggcaaggatcaccaccgcgagcggaagagcaacgatggcctgcgagggaggttcagcaatttcgccatactgtacgtcgtgccggggaggcgtaatgaggaaagccagcagcgcccccattgctaatccgcccaaatggccccagttatcgatgccgtgcatcgagaaacccaaggccaggttcaaggcgatgaaaggaatcattccccgcccgaaagcacggccccagcgccggggaattacgtcgcggtgaacgtagccggtgaccagcatcgcgccggcaattccgaaaatggctccggaagctcccaccgagacgtttctcgagacctccatggaaagtaaggcgccacccatgccggcggcgacgtaaatcgtggcgtagcggccatagccatacacgcgttccaggataggtcccaggatatagaggcaatagctgtttcccagaatgtgaagccagcccccgtggaggaatatcggcatgaccagacggaagtactcaccgcggcgcagatagggtccgtaagcagcgccaaggttgaggagaaccgggaggttatcccaccccccagcccatttttccaaagcgaaaaagaggaaattcacggcaagaaggatgaacgtgacgaaaggccagtagcggcgaggggcaacctcgtaatattgcgggcctgcaggtaagggtgtcggttggtcagccatgagatagatttaagtgcgagattgcgcccgcagaaccgctccttcatagattataccaccgaggccccttgatggacccacagtccgtccgccggtgctgtcctgatttgggcgtagcgccgccatcttggcggctccggtgccggctggaagccggcgttacgacccgtacccgtctgccgggatcattgacggctgatgctgggcgggtcgcagcaaaacaacgccgggccgctccactgcctcgaattccatttcgggctaaataggctgcggaagaactggatgggagttccctccttgggtggcaaagcaatatgaatgcctggcgtaggtcgcctgagggttaaatccgttccggaagaacccgctaagttcatgataatgctgggcttgattctccgccgggcggaaaaaattgcgagtaagccatttagattgaatgtgttacgtgccaatcgtgcgaccagatcctggaagtggtgggcatttgccatctaaccatagttagattggcggaaatgacaggatggaagcttttttctgcaacctgtttagccccagcttttccctgcggcgtttgggaatgatgatccgccccgttttgtccatcctaaattgtcaggcgttaagccatgccttctgccatcacttatggcagcagaattctgaggctcagtacgtgccgcagtcgcgcacggtctcgtacatcgccacgacgttcgcaatcggcacgcgtgcctgcacgttgtgaatggagttgaagacgtaacctccgccctttccgaaaaccttgatgcgtgaactcacctcatggcgaacatcattgaccgtgccgaacggcagcgttttctgggtatcgacgcccccgccccagaaagtcacacgatccccgaactcctgctttaattcttccggcgccatgcacgaggcggagcattgcaccgggttgagaatgtcaaagcccgcggcaatgaagtcagggagcaaggcgcggatcgatccgcaggagtgaatgaaggtcttccacgtcgtgttcttgtgcacccagtcattgacggccttattgaaaggctgatagaggtcgcgataagccttgggcgagataaacggaccgttctgctggccgaagtccgttcccgaaagcatgaccaccgtaacgcgctcgcccactgcggcgtgaatcttctcgagattcttgatgccgatttcgcactgacgctcgaaaatcttgtagatgaagtcgcgacgcgtcgccgtgctgacgtaccactcctcaacgtcgcggatgcccttgggatgcttcaaccaagggccggggacgagcgcaatatcgccgaaggccgtcccgccgaaattcgccagtacggctttatcggtttcagtccacagcctttccgcctcgcggcccaaatacgccaggtcctcgtcggaaaccgcagtgaactcctccaggttgtcttcgagcttcaggtggtcgtcatccaggggaatttgacgggaaatcgagtcaaaatagaacccgcctttgggcatgcggccgctgggaggcacggacttgtccccctcgggatacatcaggatgtcgccgttctcgtccgggtcggtgttgaagccttccggaacgagcaccggcgtgccgtcaaaggtggtccagggtttccatccttcgtttttgaagccgaacatggtggaaggctttgccagaccgattacgtcgatgccgagggcgtccataagatcgggttggatttcccccagcatctggtagggttccattactctcactggagcgccgggcgcatcaaggcccagcgcctggcgaagtttgtacaccgtgtcgacctgcatccccgtcaccgggctggcgccgaggtccaaaggcacgcggtccggttcctggtggtccagggcgaggcgaactcgctcccgtgagctcatcatgattgagtccccacctccacgctgcagctttcaagggctgtggcgcaccgtctagactgccacaagctgccgcgccaactccacggccgccggagcatctttgccgtagccatcggcgccgatggaatgggcccaggcatcggtgacgggcgctccgcccaccatgattttcaccttctcgcgcaggcccgcggccaccagtgcttccaccgcacccttcatgttcaccatggtggtggtgagcagcgccgacatcgccacaagattggcctggtgctggcgaaccgcattgacgattttctccgcgctgacatcgacgcccaggtcaacaattttgaagcccgcactttccagcatcatggccacgatgttcttgccgatatcatgcagatcgccttttatcgtgccgcacacgacggtgccggcagatttgatggcttcgtcgcccaccagcagcggccgcagaatgtcactggaggcacgcgccgcccgcgccgcgatcaaaacctcgggaatgaagaactcgcattcccgcatgcggcgtcccacctcgtccatggcggggatgatcgctttgacaaaaaactcgccaggccgagttccctccttcagcatcttctccgtcagttccttggccaccggagcttttccatcaatgatggcctgttgaagttcttcaaagagtgtcatacaaatctccctttctaggttctaggtgctgggttccgggagttccggggttttctcagtacccagtccccagacccgagcacccatgtttggaaatgccatttcctccacaaaggcttcttgaaaacctcgatcggcgttcagcgccacgtgctcggtttgccggcgcaggcgggcaaaggagccgtcttctcccttcgggcgaaagagcgccacttttgctcccattagggcggtgttcccggccgcctcgacggtttccgccgggaagctgatcaagccgatgcgctgagcgctggcgcgattaatataattgccaaaagcccccgcaagatagagttttttaaggtcgccggacgaggcgccgaaccgttcctgaagcaagcgaattccagcggcgatggcgcccttggcgagttgtagctcgcgaatgtcgttctgcgtcagcaccacgggcgccgccagttcccacgcgccggcgccgtccgagaaacgtccggagggctcaatccgccccagctccaagcccgccgccaccgcatccaccaatccgcttccacacaaaccctgaggcagaacattgcccaggacgcggcagtggatagcgtggccttccacccttacctcggagatcgctcccgttgaggcgcgcatgcccatggaaatccgcgccccctcgaaagccggtccggccgccgtcgaggcgcacagcaagcactggcgattgccgatcacgatctctccattggtgcccaaatccaccagcccgttcagcccctcgcgttcaaggaggttcgtggccagaatgccggccagaatatcgctgcccacgaatccacccaggcaaggaagaaaacgcacgcgcgcaccgccggagagcttccaccccaaatcttgaccgcagaaagtctggaggccgagctgccccgactcgaaagggtatcgcgaaagcggctcaacatccagcccgcagaataggtggtgcatcacggtgttacccaccacgatcacatccgcgatttcgccctccgcaacctgagcggaaaacaccaattgctcgatcatgctgccaatctgccggcgaatcaaaccgcggagctgttgcgcgccgccttgcgtcaaggcaaactgcacgcggctcatgacgtcggcgccaaagcgcgcctgggagttcagcgccgtgcgcaccgccaacacgcggccggtggtgaggtcaagcaactgcgcgaccagcgtggtggttcccaggtcaactgccacgcccaggcccggacgcggctcgaaagcaaagggcgtctcatccaccaggatggcggcgtcccattggcgcagctcgatcaccaaatcatcttcgagcgcgcactggcaggccagacgccacccgttggcaagttcctccgcgctcaggcgctcgcgttgcgcgtcgttgacggatgcccgcccttccagcacgcgcacccgacagccccggcaacggccctgtccgccgcacgggaactctacgccttgtgcgaacagcaagtcacgcaagagggatcccgcgggcgcggtcagctccacctgcacgggccttagaacgatgcggtatgtcggtatctcagtcaacagcacttcctgtcggggattgccgattttcgattgccgattgacaattggatgaaatcggcaatcgtccgtcggcaatcatcaattatccaccgcgtgttcccgcgcatagcgcagcatggcgcgaagattatccgggggagtatcgcgcaccacttcgcaaccggcgctcacgatgaatcggtcgccggtttggtggtggcattcggccacggcggcgtaaacctcctcgggcgttccattgcgcagcacgcgcacgggatcgatattccccagcagcacctggcccggccccatcgccgcgcgcccctcggccatgggagccagataatccagatcaatgatgtcacaacccaattgtcccattaagcccagaatgggccgggtattgccgcacacgtgcaagcgcgttcgtacccccagagcgcgcagaccgtccatcatgcgcttttcgtaaggccacacaaactcacgatagatcttgggaccgaccagcgaggctgccgcgtcgcccacgccgatcaactccgcaccgctcgccacctgcgccttggcaaaagtgagctcgagcctgaggacaaactcgaatagctcggtgacgaatcccgggtcgtcgaagaaatccatcatcaggttgttgatcccgcgcaggtcggcagcctcggcaatggggccttcgatccaaccttcaatcagcttttccttgcacacgccttgtcgaaagagccccagcgcccgtaagcggttgcccatgcgcgggctggtgtgggggtccggcacttccaggccgcgcatcttgcctttgtctgcgagcagagcgtccgcttcgtcgagggcgggcggctgattggggaagtacttgacgggcgcaccgcagtctgacgcttcgcacgccgggtcggatatggtgctgacgtaatcgaaatcgaattcagccgcggtccgggtctgcccttccaccagcatctggcagtcggtggcgtaatcccggtactgcgcgccaatgcgatcgcatgcgaacatcatggtgatgggcatgaagggcaagctgtccacgggcttgccatcgagcaatgcgagaatgcgttcgcggccggtcatggaattgccgattgtcgatcgccgattgccgattgggagtcgagatcgtctttcatcaatcgaatatcgcggcgagtttcgaatttcggtccttgctggctcatcactcgtcactcttcacttgccactgcttttatgatgccctcgtcgtagctcgccacaatgcggtggccgggtggaaccaccaggaattccttcgggtcccattcgccgttcaccaggcgttggatcaggttgatgtcgcccgggatcttctcgaaagtccagccgcgctgggccgcgtcgtcgcgcgagtgctgctcaaagctgccgtcgggctcgatgcccatctcgataaaggtgatttggccatagtgccgagcgaggtttctccccaactcttcccacaggtatcgggcgttgtcctccccgtacttcgccaccatttcttcgtaactttgttgcagtcccagctttttgcccagagccagttggcccagctcgccgtccgcctcaccgcgctcaatccagccggtggttttgaaatacacgccgggatgactttggaaatagtccatgtagcgtgccgcgctgcccaggaaaagcgtgatgcaatcgtgcccgcgcgggaccaccatgggaatggacttggtggcgaggcccacgatgccgttgttgcaaagcccgtaacccagcagcaaggcgtcgtactggcgctcctctacgcggtcgataacggcctgcaagcgcgaccgcatctccttggatccgatgtcgtgcaggcccttggggagaaactcgacatccacaatgtgaggcgagcgcgccaggcaggcacaaaactcgcggaaaaagatttcgcaactgatgagcttgaaacgcataatattgccacggccagcccaaagcatcttgaggtccttctcatcgcagatgggcggaggcgcagagcaaaggaggtgttaggttccaggttccaggtaccagtaaaacctaacacctagcaccaattctgcatctcagcgcctgagcggtaaagacctgcggggattcaccaccgacgctgccttctgacctgtgactttctcgtttctacgggcatcagattgttgccggcacgaggtgataaccgagttctttggccctagccgtcaggcttctgatgcgctgctgccggtatcgttcttcgaaggcttgcgaatcttcatcgacgtacagatgtccccagcggaggcggcggtaaaataaggtcgccaatttcctggcggtggcgaagacggccacgtctgccccgacgcgacgcgccaggctccggtagaatgctcctaaagccgtggggctatggcgcagctccagggcggccatgcgcaagggcgcggccacgcgcgtgccggcgctgtatcgcttcttttttttcaccgccttgccgccgctcttggggacatgcggcgcgagcatggcgtgggagataaactgcttctcgctgggaaagcagctcaagtccggcccgtattcactgagtacgactgcgacggtttccacacccatcgcgtcgatttgggtgatgtccacaccgctcatcctgtaccaagcctgccgcctcggttcttctccgcgctcgcggatggagtttgccttgtggggattcttcaccgccgggcagcttgtccggcgcgttcctccggcgtcatttccctcaatttccgcacgatctcttgctcataggcggtgatccgctcctgcgtcgccgcatgcatcttcagaccctgccgaaagctgaacaagtgatcttcccgccagtgcccgctcaactgttcggcaatctcctcttcgctgcttactgcccactgcctactgccttctcgtactggcccgtccaagcccgccagcggagaaccaccaagtcgagagtcatgcgcagggaatcccgcagatagtgcaccttggtggcagggttgtgattccagcgcaccgggacctccaccactttgccccccaagcgctcgatcaggaagaggatttccgggtcgaatccgaagcgttccacgcgctggagttcaaaggcgcggcgcgtggattcgcgccggaagagtttgaagccgcactgggtgtcgtggattctgaggccggtgaaaatccggaccagcaggttgaagaatcggccgccccattcgcgaaacggtgactggtgagcgccgatcagcttgcgctcgagcgcccgcgaacccaccaccgcatcggcgtgggtggactccatcgccgccagcagtttgtccgcttcctcgatgggagcggagagatcagcgtcggtaaagaggatcagctcaccgcgcgctttcagaactccgtggcgaacggagaatcctttgccgcgattgccgccgttgcgcagcacgcgaattcccgcgtgggcagacgcgacttccaccgtgttgtccgtcgagccgtcgtccaccacaatggtctcgacggagaagttttttccccgcacgtaattctgaaccgcctccagcgagccgacgatgcggccggcctcgttgtaagcgggaaccacgatgctgagatatggttcgggcatgaagcggaactatatcaggagttaggagttaggggtgagaagttagaagctggaagttagaagctgggaggtgggagtcagaaaacggcggacattggagcgtttcaatttgccctcggcggattctttttaccgttggccactcacgctctgctggcttctcacttctaatttctagcccctggcttcttccttcgaccagccaccctttccaatcagaggcacaaactggcacggatcgaggtggtgggtgattatttctccgccctcgcggcaaagcaacaagagctcctgatattgcaaatttcccaccggaatcaccaagcgtccagcttccgccagttggccgagcaggaccggcgacacactgggcgcagccgcgctcacgatgatcacatcgtagggcgcgtgggcacccaggccctcacttccatcgcctgcgaacacctcgacattctcatatcccagccgctccaggcgttcgcgcgctttctccgcgagctggggattgatttccaccatgtaaaccattgcgcccacatgggcgagaattgccgcttggtagccgctgccgccgccgatctccaatgctttgtccccgggccggacgcgcgccgcctgcgtcatggccgccaccatgtaaggctgggaaatcgtctcgcgctcaccgatgggcaaagggcggtcgtcgtaagcagcgttcaataattccgccgaaacaaactcgtgacggggaaccagccgcatggcttcgagcacccgctcgtcgcggatgccgcgcgggcgaagctgggtttccaccatgttgccggccgggatttcgaattgatgggcggtcaccatgctcgtagctgcgggcaaccctgacccagtggaggaagggcagcggaggttaggatgcggcctgttgggaggccagctttcgcgcctcttggcgcgtgtaaacaatgcgatggatcaccgtgacgttggacagcacggcgatgagccaaagcaccggcgccatgcggtcaaacagcgcgccaataatgatcaacaccacgcgctccggcctctccataaaccccaccttgcaggtgggaatcaggttctcggcgcgggcgcgagtgtaactgatcatgaccgaaccaatcatggcgacggccaccaggcaaacgtaagaatagcgattgatgcgcccgtagtagatcagcaatccaatcagcaggcagaggtccgagtagcggtccatgaccgaatcgtaaaaaccgccaaaggcggtcacgcgcttggagaggcgcgccacgcggccgtcggtcatgtcgaagatgccggccaggaagatagtggcgccagcccaggcaaaaaatccgtaggcaaacaggtaagccgccaggcaattgatggcgaatccaatgaaggtgagaaaattggggttaatgccgctggcggcaaagccccggacaatggcgtcaaggacgtaccgaagggtctcgccgatttttcgcgtcaccatggaaggtctccgcgctccagggggaaagcaagtccgctggaggccgttacgcctgctcgtgaatggtcaggacggcgcggatctcgaattctcgggagccgttcggcgtagtcacgttgatggtgtcacccgatttcttgcccatcaagccccggccaatgggggaggtggtagagatcagccccttgctgacgtcggcttcctcgctggtcaccaaccggtactcaatctctacatcgcggtcgacgtcgtagagagtcactctcgagccgaaggcaatgcggtccttcggaatgttgttcatgttgatgagcgagaggtccgccagacggttcttgagatgcatcaggcgcgcgctaacgtaatcctgacgctgcttcgccatgtggtactcggcgttttcgctcaggtcacccagggcccgggcgcgcttcagctccttgggcagctcggagttcagttcgtgctccagcgctagaatctcttcctgaagcttttggacgatgggcgagggcatagcacaaatcctgatttattcggatccaaaggcattataagtgaaactggccacccggcgcaacggaagggcgaggatgtgaggatggggttatctggccatcgggtcatcgggtcattccaccaggcactgccgctggtcgctgcggggcaaatggtgaagccgcggatgcgatccgcgccagccactcaccacttactcctagccactgttcttcgcgtccgcaccgcgtagatcgccgcagcccccagaatgcctgccgtggtgataatgtcccaggcaaggtcataactatgggtggcttcgaagatcttccccgccagcacgggtccaaagaactgtcccagggaatcggccatgatgataaggctcaacagctttcccagcgccgccaggccaaagcactcggccgccactaacggaataagcagatagtccgctcccatggcaaatccaaagaccactgcgaaagtccaaagcgcggcaggctggcgcgccagaaatagcagggggatggctaatgccaggatcagatagaacaacgccatgacattctttttgttgtagcgatccaccaggtggcccaccgccacgcgtcccgccaatcccgccaagagcaatccactggaaacgcgcgaggcctgaaccgtggtgtaccccgtatcgcgaaggaacaagacgaattgttgaatcaccgtaccaatggcgccgatggtgagcgtgctgcccgcgaggatgagccagaaattggcggttcggaccgccgccatcaatgaaaatgagggtgtttggcctgctctttccggccccgttccccccagtaccggtgtgggctcaaccccgtccgcaaccagtcccaattcttccggagcggagcgcgtcagccattgagcaatggggaagagcacgacgccgatcatggcgccaataatgacgaaggcgcgccgccatcccagtccttccatcatgtgcaccgccaaaaccggcgccgccacgccgcctaatcccagtcctagataggcgtagcccatggcgcgtccacgtttcgcctggaaccaattggaaaccagaacctggttggagatggggccggccaggacataacccaccacatacacaatgcacaagacgtagtactgccccaggcgcgtcatcccgcccatcaggaccaatgacaaggtgaccagcagaatgccgacgcgcaggacccgtcgcgcgcctatgcggtcgaggatcgcccccatgaatccaaaagccggcgcaacgatgacgaagccgaggaacagtccttgcgctacttggctgcgagtgaaatgaagggaatcaaccatcgacgtgtaaaaaacaggaagtccgtagaagaccagtcctacggcgaaaaacaggttcataaacgccgccaggaccacccaccaaccgtaaaaaactcgtgttgaggcagcttgattcatgcggaggatttgccaatccctcatcgtatttctaccccgctcaggggcaatcgagcgaggggaaagtctacccgatttgtgggcgagtcagtaaaacgaagttaggctggacgctcttcacataaggggggtccttatttctgaactcgttccagggtgacccccggacccttttcatatctcgtggcgagccgaagggtcatgacatctgccctgaaaacaagccctcttctccggtccgcgcggcgttgtcaaaccctggtggctttgctttcgagctcccacgaatctcgggagtgttatagtttggatgttatccgtcacgaaggaaggcaggaatgggaattccggctatgttgtcttcgcgtagccccgcaggtcggcccagactgcgctcccccttgcggagggtcgtcatcttccttgccgcttgcactgcccttgtaccctgcatcctgagagcccaaaaggagagcgcaagggaggttcccaggcgcgaggtggggcctaccttcaagctccaggccgagcgcaacctggtggtggtccgggtagtggtgcgggatgccaagggcgcggcggtggacaaccttcgcaaggaggatttcgagctcctcgatcgcggcaaaccccaagccatcctgcaattctctgtggagaagcccgcccccaagcccggcttgaaaccgccggagaagtcgccctccgccgaattgggcgctactcaggaagctgtgattccagccaccgttcccctccgctatctggcgctgtacatcgacgacgtgcacacgtccttcgaaagtctggtgcgttcgagggacgctgcggaccactacctggcagtttcgctccaacccggggaccgcgtgggggtgtttacggcctccggccagaacccattggatttcaccgatgacttcgccaaggtgcatcaggcgctcgtccagcttcgtccccgtccgatggccggaaaggatgagtcttgcgcaacgattccgccctatgaagcgtatttgattgcggtacagcatgaccggaatgccctggaaattgccaccctcgaattctggcattgcgcctatggcgacaacccaggcttcctccgacaggctcaagacatggcgcagaccaccgcctcccaggtcaactccgaggcggaagcggagtcacgtgcggcggtggagggggtcgattccctcgtacgccgcatgtctctgcttcctggccagcgcgtcgtggtgatcgtctccagcggattcctgaccgaagccctgcactacgaactcgacgaaatcatcgatcgcgccctgcgcgccagcgtcgtcttgaacgcgctggatgcccgcggcttgtacacctccgccggggtggtggacgcctcgcaagcaaacgtggccaacaccaagcaggccgaggtggcaggacgaaagagccaattgttgaatgatagtgccaggctggagagctccggaatgcaggcactcgcccaggatacgggcggcatcttcttccagaacagcaatgacctggaggagggcttccggcgggcggcggcgcttcccgatgcgtattacgttctgactttctcgccgcaagacctgaaacacgacggcgccttccatcccctcaaggtcaagctggtttctcgtccaggcctgacgctccaggcgcgccagggctactacgctcccaggaaagcggaggatcccgcggcgcgggaaaaggaagagcttcaggaggccgtcttctcccaggacgagacgccggatgcgcccgtcaaggtcgacacccagtaccttatgaagaacccgtccgaggcacagctcaccgttgtggagcagctcgacttgcaccagtttcgttttcgcaagcaggaggatttcaacctcgacgacctgactttcgtcacggccctcttcgatggcgacggcaacatggtgaccgcccagcaaaacattctccccttgcgttggcgggacgcggacctggaaaaacacttgcacgccggccttaccacccgaacccacttcgacgtcaaagccggcacttatcgcgtgcgcgccgtggtccgggatacggaaagcggccaggtttacggcctgaattgcaccgtggatattgcctatcattccgaattcgaggcctatcaccggaccaataccatcatgaattggtccctgaaaagaacccttcacgagatcccggagctcaagggacttcagcccacccctgaccagtcgcggctgccggaagtcctgcgttgtgtgggcgaaaccttacagacgttcctcaagaacttcgtcagcaccacttcgctcgagaccgtcgaagcgactcgagagcataagttatgggcgacgcacgatcgcatcgtgcagcagtttcactatttgatgctggctcagcagaaggataacgctgacaatctggtcgagtaccgcaccgatctgcatgggcgggaagagcgctctgacaacctgattgagaacgtcatgaagaccacgggctttgcctcgatgcccttcttttttggcctgcaggagcagcccctgtctgactttcgttaccttggccagcagttgattgacggccgccgcaccgaggtggtggcgttcgccgaacacattgaccccgccgcggtaaggggccgcctgatgaccggcccaatatcgataccgctactcctccagggcgtcgcctggattgatgccaacggataccagattctccggatgcggacggatctgctcgcgccccagccgggggcggcactcaaccggatgacgacggtggtgtcttttgccggggtcaagtttcaggacctcccctcggctttctggcttccgcaagaggtggaggttaccctgctccagggggacttcatctatgtgaatcgtcaccggtacacggattatcagctcttcaaggtcgagacgcaggagaaattgcaggagccaaagcccacggcgccccctgcgccttgaatcccgacgccgccactggatccttctgccgaaactagggttttgttccggctagttctttgcgtattccatggccggtggcgcgttgacgcaggagccctgcggtgctacaaatgacgaaggcagagtggggaaggcgcgacagggcagatcatcccaatggcgtttatgcggaagccttcccaggcagggagtcggatttcggctttgctgacaattttgaaagtgagggatctgccctcacggggaggtaacccatgcgacgacgagattttcttcgaagcggaaccgtagcggcagccggattggcggcgtcaaagaagatccttgattccactgcacaggcgagcgagacctcgaatttacctcccattcccaaacgccgcctggggaagaccggcatagatctttccctcattgccttgggtggagtcgtggtgatggatacggagcagactttcgccaataacattgtggccgaagccttcgaccgcggcattaattactttgacgtggcgccacaatacggcaatgcgcagcagaaattgggaccggcattggcgccctaccggcagcgatccttcctcgcctgcaaaacgctcatgcgcgataaagacggcgcggccaacgagcttgaggattcgctgcgcaagctgcgcacggatcatgttgacctttaccaatttcacgccgtgaccacgaaggaggacgtcgagaaaatctttggccccagcggcgccatggaaacattccaggcggcgcggcaggcgggcaaaatccgcttcatcggcttctccgcgcactcggtggaaaatgcgctctccatgctcgatcgctatgaatttgacactatcctcttccccatcaatttcgtccttttctcgcaagccaacttcgggccgcaagtgctcgcaagggcgcgcgaaaaaggcatgggcctcctggccttgaaaggcatggcgaagacaacttggccggaagcgcagaggaaggatcaccccaatcccaagtgctggtatcagcccgccgccttgccggatgaggcttcactcggcttgcgctggaccctgtcgcaacccatcaccgccgccgtgcctcccggcgatgagagatacttccgcctcgccatggacttggcccagaagttcgagcccatcaagccggaggaagagaaaaccctgatggcgcgcgcccaaggcgtggagccgattttccatttggccaaggcgtgaaattgcagttgtcgttggtcaccgacgggagggaggggtgatatactcacaaaagagggacgtcttatgagcaaagtgaaagaccttgaaagccagatacaggaactctctcccgaggagcttacggcatttcgcgagtggttcacgaagtttgacgccgacccctgggaccaggagtttgaggctgacataatgagtgggaaactcgacgccatggcggagcgcgcgcttcgtgaccacgatgccgggcgctctacaaagctgtgaaccaccacgcctctcccgacttcttggcttgctatcgggcgctccccacctccgtccaagagaatgctgatagagcttttgtcctgctgaaaggaaaccctagacacgcatccctccatttcaagagggtcggaaagttctggtccgtgcgggttggccagcaccatcgagctgtgggtgtggatgcgtctgatggcgtgctctggttttggattggcactcacgctgattataaccatctcttcggctgagtaattgccccgtcgcgaaaaggatcccgaagatgaatccctcatccccagaaaaatccccgaagcttcgcagccgcgattggttgggcaagcgcgatcgctggggcttggcgcatcgcgcctggcttcggtccgaaggcttcagcgagcgcgtcttcgagggcaagccgcttatcggcatctgcaattcctggagcgaactcaacaactgcaacgcccatctgcgcaccgtggcggaagccgttaagcgtggcgtgtgggaagccggcggtttccctctggaattcaacaccatctcgctcggcgaaatgctgatgaagcccaccaccatgctttaccgcaacctgatggcgatggaagtagaggaatgcattcgcgcttatccgctggatggcgtggtgctattgtgcgggtgcgacaagaccacgcccgcgcagttgatgggcgccgccagcgtcgatgtgcccgccatcatggtgccgggcggacccatgctgagcggcatgtggcacgaccgcgagctcgccgccggcacggatgtccgcaaaatgtgggaagaggtgcgcgccggcagcctgggagaagaagcgtggtgtgaaattgagagttgcgtggcgcgcagctccggccactgctatgtgatgggtaccgcctcaaccatggccagcctcgccgagggcttgggcatgacccttcccggcgcggcggacattcccgccgttgactcgcgccgcatgatgattgccgagcagagcggaaagcgcatcgtcgatatggtccgggaaggtctgcggccctcccacatcatgaccgccgcggctctggagaacgccacccggctgctcatggcgctgggaggatcgacaaatgccattgtgcacctggtggccattgccgggcggctggggattaacctgccgctttcctccttcgatgagatcgccagtaccacacccttcatcgccaacgtgaagccttcgggaagattcctgatggaagaattcagttatgcgggcggtgtgcccgccgtgctgaaggaaatcagccccctgctgcatttgcaggcgctgaccgccagcggcaagaccatgggtgaaaacctgaagcgcgcggcgtgctttaatcgcgaggtcatcaggcctctggacgaacctctgtttccccaaggcggcgtcgtggtcctgaacgggaatctcgccccgtcgggtgcggtgatcaagcaatccgcggtttctccgcacctcatgaagcaccgcggacgcgccgtggttttccagaacaaccaggatttgctggcgcgcctcgatgatcccgatttgcccgtcgatgaaaactccgtgatggtgttgaaaaacgccgggcccaagggcgctccgggaatgccggaatggggccacctgcccatcccggcaaaactgctcaaagccggggtgaaagacatggtgcgcttgagcgacgcgcgcatcagcggcaccagcttcggcaccatcgtcgtccacattgctccggaagcggcggtgggcgggcccctggcgatcgttcacgatggcgatgaaattgagctggacgtgccggcgcggcgactcgagttgcgtgttgccgaggcggaaatcaagacgcggctttcacaatggaaaccgcccgccccgcactacacgcgcggttacggcagacttttcctcgaccacatcctgcaagccaacgaaggttgtgatttcgatttcctgcgcggcgcggaccgcgaagacgatgggtcgccgctcgcgcgctttccaaatcctgcactgtgagcgctcccggctcacgaggctgtgacagaaatggccgatatgacgtcacccaaccctgaatccgtcaagcatctcgcccatgccttcgcgaacgctataaatcaccagagcgccgaagagattgcggccctgatgacagaggatcatgtcttcatcgattcattgggaacgaaaatggagggcaagcagcggttgaaggcagcctgggaaagttacatccgcatggttcctgattacaacatcgtgatcgccgaaaccttcgtggatggcgcggtggtagtcatgctggggacggcgcaagggacctattcgaccgacggcgtgctgcggcctgagaacaagtggtcgacccccgccgcctggcgcgcggttactcgcggttcgctcgtcgccgagtggcgcgtctatgccgacaacgaacccatccgccagattatggcgcgcaagggaaagtgacaccgggcaaatgtagcgccgcgcttaagcccggcaccacatgattcacgtttcccccgccttctcaacgtcgattttcgtacacgtgtggtgccgcctgcaagtgccgttacctgctgcgcacgacacgaatgtagattgcacctttctgtacattagtgtacaatgttccttggttctttggaggcccgcaaaatgaagacccttacattcaccgagtttcggaagaacgcctccgcggtcttggatcgcgtggagggaggcgagagcatttgtgtagtgcgccacggtagggccatcgctaaaatcgttccggcggggcgagaccaacccgagcctgcttggaagcgcccgggtccgcgtatggtcataccgggggcatcactcagcagagctgtgctcgaggaaaggcggtcggcccgttgaacgtattcttggattcctctgccctcgccaagcgttacgtcaacgaagtggggagcgaccgagtgggagagatcttgtctgccgcatcgtcgctcggcctctcggtaatttgtctatctgaggttgtttctgggatgtgcaggctccgacgcgaaggaaagctctccccgtctcaatacgcccaaaacaagcgggcgctgatccaggatgtggaagcctcggtcgttattaatattacggaccaggttgtcgcgcgcgctgtcgatttgctggagcgatggcaactgcgctcctctgatgccttgcacatagcctgtgcggcagagtgggcagcggacttgttcgtctccgcagacgaacgacagtgcagagcggcgcgcggtcatggacttcgagtcgaaccggtgggccttgtttaagcgggcgcggtgcccagccgggatctcaccggatcatcgaaaagctcgcgggcgaaagaagcatattagtaatgttgcgcacaatatccccgccgcgccgcaccgattcgtcccggatcttgacccaatcaggatcgttgccgaacgccgcccaggccttctcgcggtgagtttcactttcaaacggaatcaggtaagccatattgggctggttgggcccaaagaccgtgtccgcatagaggatgggataaataccactcttgtggaagatatcgatctctccatccctgccgaagcggtcgtgcaggtatccgagctggcgattggtaggtgattcgtagatgcgcaattcgtagagcttgtggggcgggtcacctgccggcgtcgccacaaagggcgggcagaacggagtcgagcgcagcaacatcgcctcggtgcggtaaaaagccggctcatccttctccacttccgccaccacggcggcgtagtcagggtcggagttgagctttccccactgcgtctccatttccgtcaggctgggataagagaagatgatcaacgttgtaggaaggctcgggcccacagtgacattgaagaatcccatggggccaaagccgtgtttttggcaaatcggcatgagcccactttccagccactttgagatgcgcgccgtttggctgccgttctgcatgtgaatgtagaagaactcgaagtaggaagcgctcatgggtttgtctcctgttgcaatcgctgcgaaagaggatttccacgccgctgccaacccgatcgtcgccgcgggtatatcccttaccaggaatgttcgccggtccatcatctcaccacccgaaaacaaaggtcagaagtctgtgcatacgatggcctgccttgagcgcggtgtcaagcctcacgctggccccgacgggcgcagtaacctattgcgtactgcaaatcagagtgacaagaccccctcacccccaacccctctcccccaagggggcgaggggagagttgagtgatgtggttatgcaactaactcccctcgcccccttgggggagaggggttgggggtgagggggtttatcggttaccgtatgatgcagaagtcagtaatctcgaatcccgttttgaagcggggaacttgaaagctattcaggtgagatcagatgttcagaccactaactcgtggacttccatctctccccctcgaaacgcctgtaggaatccgtcaaccaccttggggtcaaattccgttcctgaacctttgaggataacgtccttggcatcgagttccgccagggccttccggtaagggcggtcgctggtaagggagtcgtacacatcggccacggaaatgattcgtgattccaagggaatactctcaccccgggtagggtggtagccggagccgtcgaatttgtcgtggtggcagagaacaatggggatgacccggcgaagcgagccgccgacggtgcccagaatctcgacgccttcctgcacgtgtcgttgtgcctctttgtattccgcctcgctcaaactcgctgccttgtaaagaatctggcggctaatgtcgagtttcccaatgtcatgaagaaacgcggcggcgcgcacgtcctcgatccgctcgggatcaagcccaagtcgggcggcgattgcggtcgcatataccgagactcgataacaatggttttgcgtgtacttgtccttggatatgaactggcgcaagatgagcaggatgccatggtaggtctcccgcagttcgcgcaatcgggcttctttgtgatcgtaaagcgcacccatagcgtaggcagtgatgatcaagatgccggcccaaagcgcgaggtcgtaccacttttcccccgggagaggagttctattggcttgggcgaacaaagacgaattggaatgcaccagcagaatgactaccagcacgctggcgacagccgtcagagttgcgtggcggcggccatagaaataggcggaaaacaaggtgggcagtgtatacaaacctaaaaggatgcggtgcggagcgacgaggaagtttaggatggcggcaatggccaccagggataggatgagccagagttctttgttaacttccgtcaaaagggccctcaacgaaacggctttcatcctcccgcccatgctcagaactcctttaagcagaattgaccggaaattccgttttgactttcccgccggctcataagatacgcttgaccgccggtgaatacaagtgaaccggattggtcctagcaatgttctttccgcgcgacctccacccgcctgcggcgcccttcatcgcgccgataatgacttgaatctacacagtgaccagactgaccaactgccttcgcctctggcggaagggtcaggttccgttgtcaacgtgatggtgcgatcgcgggcactgtcaatcggaacgcggaaggagaatcggccgcggtcttcggctcgcgacaagggttgaaggaggcggtcaagcgccaatcggctctggccggaccgatcccggacggcaattgcgatcctcacacccggtgtattaccattgccggtataggcttcctcagacatgccaaagtaacccgagaataacgacgtgtccgccgggatttccaccacgatctggctgggggcgcgcaccctcaaggcaggagacccgtggaaaatcaccaccggcgcgaggccggggctttccaccgattctggctccggccaaaaaacacgtccctgcacatcggcgagcatacggggaacagaaatcccccgagcagctcgaagaaaaccaggggcggaatagagccgcacggtgaggtgatcgcgaaattcaaaggacccctgcccagggcgctcgaaggtcacgctgtcaagttccttgccaggataggaagcataaagattcatgacatcgtagttgctattcagcaaaggattcaccaggaacggccgctccgccatggaaggaacaatgcggtattgttctgcgatctgacccctcgccatgcgcaggtagagcggatgctgctgataaaggagagttgcggcccttcccatcaaggtcggtgtgatctcgaccgacatgaacaagggtccttgcccccaggggcgcagatcaagtctctgaccgaagcgcagggtttcctcgtggacaagctggaatgccgggtcttccgcggtttgctgctgcaaaatcaggaagcgcccgtcccgcgccacggggacgtaattattgagcacgtaattcagcgcggcggaatcctccagcgtgggaaagcggccgtccgtggcttgctggcagagcatcacaaaatgcggccgcccggcgctgcgaagatagtcctcattgaggctctgaagggccggggtgtaagccacaaacccttgaatgacggggcgcggctggtaattcatctcattcgccacgggcgccagcagcaggtagttcataacgtccacggattcgttaccgatcacgtctttggcgcggtcgagaatgagcatgcgatcattccgggcggcgcggcaatcagcatagagatcatccgagcgcccccctaaaatggccacgatcatcctggcgttggtggtaacgtgatgctgccaatcggctacctgacgccaagcgagccccggaatttgcaagtgcgccgccaccaggcagagcgccatgctggcggcgagggtaccgttcaacccccagcggtgagcagcggtgagcgccgtcgacaggtccacgaggaaacaaaatgccacgcccagcggcagaaaccagagaaatataaaggtgtgccagtccccgggacgcgtgaagcctcccttccaggcaagaaaaacgtattgcgcaagtgtgatcagaatcccccaagtgggaacgccgcccttcgcccgcaccaaggtggcgatgaaggcccccacaaacaaagccagtgccgccagggcagcgcagaggacggcggttttgggagccaggttcatggccgcgctgtagcctgactgcaactccagggcatgccggaaccacggggcaagatgggaaggcgactgccccaaggccatccagcaagccacgaatccggccggagcggccagcgccagcaccaccgccttgcgggtttttcgctgccaggtccagcaaaaggcaacgagggcaaggctgccgattgctgcggtcaggaacgagcttttgatgagagacaggatgatgaaagtgaagacatagatgggcgcttgccaccgctgcttggggttatcggcgagcaggagtaatgcgccgcacgccatcacgaagaaagcggtttggtcgaacccggcggaaagtgtgcagaccaccagccaagcgagaaacgcgtagcggacccatcccgccaaacgttttgccagcgccgtcgccgccagggcaaccatcgcgctccagaagaaagcaaaggcaacgcgcgcggccaggagatgtcccaggctggtccgcgtggcaaggaatcccaacggtccgaaggtaaagacgatctgggtgccgaattgcagatgatgcgcggtggcgtattcaagcgccgcgtgccaggaggggtcaagctccatcggcggttgccgcgtcccgctgaggaaaaaggcagaaataaaaaccaaaatgaaacaggcggtccaggcgacccgtcgggcggattgaggagacatcctaaaactcatcgttaaggcttccgcgcaatcaccaggaactgctttccccacagccgctgcgccaggggaaacatcaagtacaggcggaccaggaacccgcggtgaggcactcggccgctcatggtaaaaggaaggaagcgcggtatgacccgttccctgcgaaatccggcaatttccaacgcttccagcatcgagcgatcgctgagaggcaaatggtgatccacaaaatcccagtaggcgtcgtagcaaaaccggatgttcggccccaccgccatcaacaacccttgtgggcgcagcacccggtacgcctccgcgagacagtgggcaagatcccgtttgctggtgaggtgctcaaaaaagttgctgctgaataccacgtcgatcgactccgagggcaggggccacgcctgggtggcctcctgagaaagcacggtaacgccgggggcggctttatccgcggtggcaaggtttgagtccagggcatacttgtgcgccgccacgatgctattgatgaactcgcagtatccggcgcccacatccaggacggtgttcgtgggcattacccaacggtcgaagtaatggcgggcgaggacgcgccacacctcggcccggcgctgttcgattccggcaaaccggcggctatacacggcgtgctgatgctcgcgggatgtcatgccctcatcattcgcggcccgcgcttccgggcctcttactttctgtacccagcgacatagtttttgcgcaatgccctataggggcggtcatagacccgcgggcactccgctgccagcggcaaatgtacagtatcgctcaatttaatgacttttgcccgccgggaacagccccccgctggaggactccgtccaccgcctatggtgattatgatatataaaaataataatttgttaatatccgaatgaaattatgatctttcaaaaccctcggcttccaacttgtgctagaatcctctggaaaatggtttctcaatcggtttgccctaactgcggatcatcccggattgtgtcgtcacccagtggctgtcacattgtttgctccgattgccaacgcgtgctggtacaggatcgtgttagaaagccgcggggaagaaaatcccgcaacaaacccgtgcggccagaagcatcgtccaatccgggaagtaagaaaggctgaagtcagggaccgcactctcgccagcggttgcaaccgtgggaaagtcaggtggtagtgtctacgattgacttcctccgcttgatatgccacgttgaatgcccatgcggcgcatctcggtggcgttccaactctgtaaattgggtggaagtctagccctcctttttgccgctttcgccaacgggccgggcctgcgcgcagcggaggctttgccaaccttcgtcagccagttgatgcaaggaaaggcgggtgcggtcatcgtctccaatccccgtaccgggcagattctcgccgtttggaactctcagagcgccttcaaagaagcttacactcccggatcgacggcgaaattggtggtgagcgccgccgcgctcgaggagggcgtcatttcacccgaggaagagatcatgtgccgccgcgtcccccggctgctgggagaggcgtatcattgctcccatccgcctgcggtcgcaccgttcgatctgtcgggggctctggccaactcttgtaattatttcttttccgagttgagcacgcggctctcctcttccgccctgacccactggtatggagtgtttggtttcggcgctgccggagaggaggcggcgcccggggaagttctcatcccggataaacctcggggaaaggccctcgccgcgctgggcgagcagggggtgacggcgacgccggcgcaagtgctattggcgtactccgccatcgccatgcaaggcagggttttccgcctcatcatgcccggccaacacaaagcgccgagccttgagcgcgtggtccctctgcgtatgagcaccctggcggtgctgacggaagggttgcgcgattgcgtggatcagggttcctgccgcgccgctgccgttcccggagtaagcgtcggtggcaaaaccggaaccgcccccgccctggatggaagccacgtgacgcacgcgtggttcgtgggctatgcccctgtggacgctccggaagtcgccgtggtgattttcttgcagcgcggcacgggcggcgctgatgctgcgccgctggcagcgcggatccttaaacgctacttcgcacaaaagccccacacgccatgagaaaactgctgttggcatccctggccttggcggcggcagcgcttccgacactccccgcgagcccggatttccgggtggaattgttttcccatcgggtggtcaaggcattgaccctggaagccaccggacaaagcctgaacatctgcggcgccaaaaccgatgggccctgttgggttctggcacccaccaaaaaggtctcctgctccgccgatcaccttgtgcactgccgcctcgatgcgacggaccgaaccttcacacttctcacggtggaatcctccgcgccgtttcgccttgcgcccacattcgccaaggtaaatgagccgccacagacgtttctgctgcggaatgcgcgcgtcaacctggccggcgaaggtttgcaggtcgtgacgcaagtggatttggaattgtacgtctccggcgtccttcggggggaagcttccgtgctccgaactcccgcggcgcgccaggccatggcgattctggcccgcacctgggcgcttcgatggcaggggcgccaccgcgggcagggatttgatttttgctcgctcacgcactgccaggttttccgccttccgccggaccgcgaggtggaggccgcgaaagtccttgatgcggcggctctcgccacacgcggccgggtgctgcaatatcatggggcgctagcggacccttacttcaccgcgtgctgcggggggatgacggaagccgcggggaacgtctggcccgaccgcgcccaaccctatctgatatcgattcacgacccttattgccttgcgagcacccatgcatcgtggagtcatgccctatccgccgaaaccttgcagcaggttctgcgggaagccttgcatctgccgattgccgccccgctcgcggaactctccgtcgagaagcgtgattcctcgggccgggcgctggtcctgcgtgccgtcgccggcgccacctggaacgttgatgccaatcagttccgctatgctctggaccgccgcctgggctgggggcagatccaaagcaacctctatacaatcgagcgccagggagactcttgggaattctcggggcacggattgggtcacggggtgggactttgccaggcgggggccgagcagatggcgcgcatgggatattcaaccgctcgaatcctcagcacctatttccccgggacggaaattgctttgccacccgcggatgatcccgaccccatggcggcaagcgaacacttcgagcttgtttacccggcctcccaggaaccgtgggtgaagcaaacgctcgatacgttggaacaatggcgcacggaactgggcgcgcacgcggagattctgccaccgcgcgtacacgtggaaacctggggctcggtggcagatttcatcagcgctacgggacaacccggatgggtggcggcttcgagcgatggccagtccattgccttgcaaccgctcgcgctgttggcgcggaaacaaatcctcaaccaaaccttgcggcatgagttgacgcatctcgtcgtgcaccggcttcgttccagtggcgtgccaagttggtttgaagaagggctggtgctctacgtgacgggggaaagaatcgaagcgccggccacgcccttcaagaccacacgggaattggaggcggccattaccaagccgcgctcggaagccgaaatgaaagctgcttacgcccaagccctggagcgcgtgcgccgcctggctcgccgcgatggtgatacagcgctctggcgaatcctcgagcatcctaccgccgacgacctgcactaacctcgggagaacgacgtgggtgagcgcccgccacctaccccgccggtcttgcctcgaccctgccggagctgcccttcgatgttgctcctgtgacgtcggcttggcaaggctcctctgaatgagcggcagcgcctggtccttaaccggtttctactcccctccttaggtgaggaggggtgcccgaagggcggggtggttgagggcttcgagggaaagctcaccacatccaaatgggcaaagctcgcgaactgttctcacgacaccgccctgcgcgacattaccgccctcgtccaaggcggcatccttgtccgcaaccctgcaggcggccgcagtacgagctatgcgctacagtcagtgtatactggcgacttgccaggacgtcctgacggaagcgtgggtggagttgtgccgtaaagtggcaggaatgatgctggcagcgccgatgcctgacttctttccagatcgagttgtccccgccgcggacggagatccggttgatttatgggtgtatgcagttctgccgaaggagggatgggtgccgcattcccccggcgacttgatccgtgcggaccaccccgggtcggccatcaagtaccgcgatcaagtgtacgagctgatgggcgtggaggagacgctcgaagggggttatgcgtttcgttatggcctgcggcggtgggatccgcaatacgccatccgccacctggtcaattacactctgcagtcgcagatggacgcggccgtcgcgcaccgggacatcaccagagcccaggggcttcgctacctgattctctggctgttccccatcgccggatttgcgccggatccgttgcagcgcgagtgggagaggaagacgggcctcagcatggcctgggtttctgtaggttcagccttattcggcatggccctggcctttgcgctgcgcggcgcttcggaggatccacgctttgttgccgtcgtcttctacctggccctggagtcctttgcccgcgtattctggatcagcatctcccacctgccgcacgggtcacccttgctgacgctgccgtactttttgtggcaaggctggaaacgcggcccctccccagccgccacgaaagaccttgccgcggcgctccttacgaaacaagatgaggtgaggcgaatcccgagccggaattccctgcatgtttactcctggtattttgacatcactttagcggaatcagccctggtagagttcgagggggcctgctacaagccgatccgttggcgtcaggagggcaagggcctggcccggcgctgggtctatgaactggaacgggccgagccgcaggccggcgttccgattcgcgagtacacccgtccgcgcaccccggatcggcaaagggcggtggaggattttacccatcggctcgacctggcacagagcttcgcgctgctctggggcgtctacccccgccgggaccagcttcgcctgcaactgctctatcaatacgagggaacaaggtccaccgcgataacggcgggcctctttctgatcattggggtattgcagctctgcctcacggcgccacttgcccgcatcaccatcctcgttttggcggctcccgcctatctgatcctcgaatcgctttatcgtctttatagggcaaaagcaatgggcgagccggcaggttcaatcatcgggtacgttttgcgcctggccgtccacccgccgaagtaagttaaggctactgcggcttcgcctaatacccacgagcccgctggctccgtaggctggcacaccgacgagtcgggacggtttccggttcgttcgccgcttccattgcgtcctcgaagtccgtgaggtcgtgatgatcccggaagctggccaattcttcgacagagttggtacccgccagccttcccctacttgtggttttttccatcaccaaacttatcattcacatctcaaagccaccatgggatctaccgaagtggcgcggcgaaccggaataaccgtggcgagggcggcgacgctcgacaacagtgcgatggagagcgcaagcggaaccatcggcaatgtcgcctcgccgtaaagcaagttggagagaacgcgcacggcggcgaaggagagcgggagcccgagcagcatacctccgcccaccagcgccagagtttcgcggacgatcatcccgcttacgtccccacgccccgctcccagcgccatgcggatggcgatttcgctccggcggctggtcaccaacaggttcagcaatccgaaaagaccgactcccgccagcgtcagcgccaggcccccgaacgccgcgctcagattcgccagcagcctctcttgcaggagcgcattatcgcgctgggcggcgatcgtgcgcaggtgaagtggatactcatgaccggcgttgcgcagttcgcgtcgcaccgccgcgctcaatgcctgggagtctccccggtagcgcaattgcagattaccccacatcatgtgatccggatgttgccaggagtccatgtagacaaagctgaaatcgcgggtgcggggatcgaagaggcgtgcatcggcggcgataccgataatttccaggtcgcgcgtatcgttctgggcgccgacgctgatatgccgccccagtgccgcgccgcccggaaagagccgtttggcgagggactcgctaatgatggctgtcttctgcgtttggggtgaatccgtccgctgaaagtcacggccttggagaagcggaatgcgcagggtggccaggaagccgtcactcacctcttcggtggcggcgtgaatccccggcgcgtcgggcgaaagcgtggaacgaatttcttcgtcgtaggagatggaaaacaccggagagaaatgggacagacttgcggcctcgacgcccggcaagctctgcatacggtccaggagctggcgatagtagggcacggggctgaatccctgcgcataaccgccgggcaacggcacgagttgcacgttcaacacctgttcggtttgaaagcccagtgattccccgcgcagacgccggaacgtttccagcaaaaaacccgccgccaccaccagaaccagagtcaaagccacttggccgcaaatcaggattctccgcatgcgcgtgtgcgcggggagggaggatcttgatccggccttgagcgcctcggtgagatgggcggctgtggtctggcgggcggggagcactccgaacaacaagagcgccgccagtccgcacgccgcggtgaaaagccagacgcgtgagtcagcacttgccgtcagcacaaagccggaatacgttcggcccagcacggtcagcagcacgcggttccccgctgccgcgagaagcagcccgccgccaatggccgcaaccaccaaaaccgcactctccgccacaagttcgcgcacaatctgccagcgtccggctcccagcgcccgccggacggcaatctcccgtcggcgttcgagtccccgggccagcagcaggttcgccacattaatgcaggacaacaatagcaccaaaacactaatggccagcagcgcccccagcgggcgccggaagcgattccgcatcgagtaatcgagccccgtagaaccggaagtaacaaccagtggcgcgttcagctcctccgttcgttcttggccctggatttgcggcggcagcgcggcgtcgagttgccggcgccagtccactcgtaactgcgtttgcgcctcttccgccgtcacccccgccttgagccgggcaaaagccgagccccagtagaaagtctggggagtcggcgggctggcgcgcaacgggctgacttgctgcgcaatcggaaaagagacgctcggcgggaatccgaggagaaaaccttggaaccggggctcggtaacgccgatgatggtgaaaggaacgccttccaggcggaggctttggccgaggaccttcgggtcgccgccatactgccgttgccaaaaatcgtagcccagcacgaccacagggggaccggtgggcacatcgtcggcgcgcgtgaaaaggcggccgagcgcgggacgaacgcctaacatttcgtagcagccacctgtcagagccagaccgctcatcggcaagggggcatcgttcacctccacggtggtcagcggagtgctcacgccgcagacgccctcgaagagcccgtcctggcgcagccaatcgaacatcggagcgggaacggcatggatcaacccgcggctgtcgagcgatcccaaccttaccagccgctggggatcacggacggggagcgggcgaaacatcaaggcgtctaataggctgaagacggcggtattggcgccgatgccgaggcccagcgaaaccacggttgcgagcacgaagcccgggctcttgcggagcctcctcaaggccgcacgaagatcacgccaccatgcttccatcgttgcctccatccacctatactgccgtccataggttaggattgcaagcaagcgtggagacccccgcctttgaggtccgcggtccctcccttacctcgggcacccaagcacgacggcaggcgcccgtctttgagatttccgcttttggcaaaggaagtccccggggggcaagggaaaagccgcggacctcgcaccgcagaggtgctacccttgctcgtccaaggcggcatcctcgtccgcaatccggcgggcggccgcagcaccagctatgcgttggcgaagactgcggaattctctcgcgatgagaaaagtcaacaagtgtgcataaaggaaaacgctgcacgttccaaaagagtatagtcgtgagtttccggcgcggttcggctaataaatggtatcccatgcccgaaggcgaagtgccgagaccggccggtcccggaacattccggttcaaaggagagcggcatgaaaattgatgggatcgtgaagttccttctgctggtcatcgcgattttcctgggcgtaatcgccctgcgtccctacgtgactccacctgtggtacaagcgcaatccagtgggggctacccggtctatttcgcgcccactgccgtcatgctgaccacccctaatggcggcgcgttgggcagagtcgcgattgacctgcgcaacggaaacgtatggggattcccggggttcacgcaagatgccgtcgtgggatttgataagaccctgcccatctcacatccggttttgctcggcaagctcgcattggcggatatggataaataaatggggcgcaagggcgggcgccctgacgagttggggcgatttcccggggagaaatgtgtgagctgtcgctccgcctcaacggttcgtcccctattgacgacagaaacccgcggaccgaccgggttcgcgctacacttgcgcggaccagacggcggcagcggcctgccccttccagaataacgacgtgcggttgccgctggggcgtcgggcatgcgaaaagcaatcggtcaggactggactaaccgcggctttgccggaagagagtccagatcgcaaacgttcaagagggatcgtcagcgccagcccgccaagtcctaaaagaaatctattgacacagactagttggcaacacatactagttggtatggaggtgagccatgttcgatcaagttgatgattacgcgcaccggcccatgcgctaccaatatatcgatgggatttgggagatgggcttcggatttcagtggttgggtatgatgctgttgttgcagctctgggaggggcgatggagaagcctgcctggaaactcggtttggctctggcgtggtggatttgtgctcagcttagtcgtgcttatgctggtgtccgtatacggccaaaaagcgctaaagaagcgcattacctatccccgcacggggttcgtgaagtatcgatcctcaaaagcaaagagttggattgcgggcgcgatcggtggtgctgttggagtctctgcggccatattcctactgcgccacttcgcgttttcagggacggtggcggtggcatcagccatgtgggggctcttctacgctttcgcaaccaggctggatgaggcctacagatgggttgtcctggtggtgatggtggcaggtccggtggcgatttccacgctaccgctggatcgccaatggctggagatgctccccatggaattcttggggttgattctatttgtatccggtgggattaccctttgtctttacctccggcgcactcggcccccggagcaggaggcggaatgaacgagcaggcaaagaacatctcggcgctcgatcgggttatccatgagcccgcacgcctgatgatcgtcgccttgctttcgggcatcgagcaagccgatttcctctatctgctgcatgagaccgcgctcaataagggcacgctttcaagtcatctggcgcgcttggaggaagcagggtacgtcgagatcaccaagacgtatcgcgggaaagtgccgcaaacgctcctgaggctcacctcggcaggccgcaaggcattccatcagtatcgcaagatgctccagggagcactcagcggatagaagagaagccgggacttgcttcccgcctggcaggcgcagacctttattctttggggtcggaaatgcccgaagggactttggcggccccgtttgctccggctcgattgtttcttacaactggcgacggctccgcgccggcgcctgcgacgccctgtcaggcggtccctggttgggggaaaactcgtgaagtctttccagaatccattgtcttagaacggtggtttcgctgacacccttggagcgtgcaattctcttgagatgctgagcctcggccggccgaagctcgatgctcgccgacgcccctttagcgcgcacaaacacaggttcgcttacctctcccagatcaggctggaagtccgtgaggtcatggtgatcccagaagccggccaattcttccaccgagtcggtatccggtagccttcgtccttttatggttttttccatcggttgtatcgccctttttttgcgcgtcatcggccgggccgtgaccggaaaacccttgccatgggggaactgaatcaccacgcagaagagatgccggccgctcggcgagttcctattgtaacgccgatgccattgggcgtgatttctttcgccttgaccgaggctcggcacggggcggccggcgattttcccacggattacgaagctgcgaaaggttccttgaacgagcaaaagcatatcgcgaagaggcgcaaagccgcggaggccgaaaagactacaaggcagttgctttttccgaatcccggcggctcggtgtccctgtgcgagattgtttgtttttcacatcttcttgcgccatgggctgcgatttttcgtccgccgccggacgggctggggggggcggttcgcgaaccgcccctacgcccgcgccggaaaaacctgacgttttgtcttaacccgctcatcggctgctcacggggttggttctaaatgaaccgatggtccgatggaccgatcataagacgctccgatgacccgatcaaaagatggcccgatgaacctattctgaggatgcgccgcgaaattatcccaaccataaagggatttaatttgacaatcgagggtcgcttacttatcctgatgggcttcggctcagcctctcaggaattttggcaatccttccaaagccagcctgggtttttccgaagctactaaccctacaaaaaggaaaacgaacatgcccggcatcatcaaagagagactcttcactcccggtcccactccgttgctgatggaagcgcaagcgcgcacgctggctgtggccaacattcaccatcgcacggaagcgtttcgcaagatcatgatggaaacgctggcgttgctgaagtactactacgacacccagaacgatgtgattattttcgccagttccggcacgggcgccatggaaggctcggtgtccaatctgctctcgcccggcgagcgcatgttggtgggcacggcggggaaattcggcgagcgctgggcaggcctggcgaagtcctacggcgtcgaggcggtgaccgtggagtctccctacggccagcccgtgaacattgaggcgatgaagcagaagctcgcgagcgacgggcccttccgcggggtgtacatccaagccacggaaacctccaccgcggtgatgaacgatgtgcgcgcgctgggcgaggccgtgaagaattatcccgaaaccgctttggtggttgacgccatcaccgggctcggcacctccgatttgcgcatcgacgagtgggggctcgacatcgtcatcggcggttcgcagaaagccgtgatgattccgcccggcctggcctttgccagcgtcagcgagaaggcttggggcttgattgccaagtccaagctgccacgctattactttgactacgccaaggaacgcaagaaccaggcgaagggtgagactgcttacactcccgccaccacgctggtgatcggcttgcatgaagcgctggaatacatcaagaagctcgggcgcgaaaacctgatcgccaatgccgcgctcctggcggaagcctcgcgcgccggggcccaggcgctggggctgaagcttttcgccgaatcttcacccgccaatgccgccaccgccatctgcgcgccggcgggcatggattccggcgccatcgtcaaggaattgcgcacccgcttcggcgcggtcatcgccaacggccagggcaccatgaagggccagatcttccgcctggcgcatctgggttatttcgatatcgtggatctgttcgcatttttcgccgccctggaaatcgccctgctgaagctgggccagaaagtggaactcggcgccggagtgcgcgccgtgcaggatgtttacctgaagcacgtggcgtgaggccaattgggattttggattttggattaaacaccccatagcaggtgattatgattggtgattgagccagcgcccaccattgttctggatgcgaggtttcttggcgctggggaggttttctctgtgtcctccgtggctcgaaaagatggaacccagaggccacagagatgctccgtgaactctgggttaaatcttttgagggaacggagagtgcaaaggtagttgcggccccgccgcgcaattctaaaacctgaggagcagaaagcgagtcgagaggtggtttggcaacggaccactgaccacggactactgacaactgacctatgaaaatccttattgctgacagcgtttcagaacatgccgtgaaagttttgcgcgagcaggaatcctgggatgtggttttcctgccgaagaaggcgggggccaacgtggcggaagaaatccgcgacgccgacgccctggtggtgcgcagcgccaccaaagcgacggcggcattgctcgccaacgcggcgaagctgcgcgtgatcggccgcgccggcacgggcgtcgacaatgtggaccttgatgccgctacgcagaagggcgtggtggtgatgaataccccgggaggcaacgcctggagcgtggccgaacataccatggcgctgatgctggcgctggcccggcgccttccccaggccgatgcttccatgaagcagggccggtgggagaagaaaaagctcgaggggatggagttgcgcgggaagactctgggcttgattgggctgggccaaatcggctcgagcgtggcgaacctggcaaaggccttcgagatggagatcgtagcctgcgacccctatgtttcttccctgctggccggggagttgggagtcaagctgggctcgctcgaagatgtgttgaagtcggcggactttgtcagtctgcacgcctccgccacgcccgagacgcgccacctgctcaatgcccggaccctggcgcttgccaagccgggtgtgcgtatcgtcaactgcgcgcgcggcgagctcatcaatgaagcggacctgctggcggccttggaaagcggtcaggtggccggagcggggctcgacgtcttcgaggctgagccgcccaaggattggaaactcgttaatcaccccaacgtgattgccacgccgcatattgccggctccacggaagaggcgcaggaaatcgtgggcattcgcatcgcggagcaggtgcgcgattacctgatctcgggcgtggcccgcaatgcggtcaatcttccggcgatttctcccgacgaattcaagaagctggaaccctacattcagctcggcgaaaaactgggggcgttcctggcccagattgcgggtgaaagaattcgcgaagtgcgcatcagctacgacgggggactcgcggagctgaacactcacctggtaaagaacgcggtgctcaagggagtcctgacgccggcgctttccgagcaagtgaacctgatcaacgccggggccctggcgaagcagcgcggcgtggaagttgccgaactgcgcagcgcccggcgcgcgacgttctccaactcactgggcatcggcctttacaccgagggcgaaaccgccacgggtgtgggcatggtgggggtgcggggtgcgctgcgcatcctgggactcaatgacatcgatattgaagcgcccctgcgtggcattatcctgtttatccgcaatcaggatgtgccgggggtcatcggcaaagtgggcaccattctcggcgaccgcaaaatcaacattgccacctttaccctggggcgcgatccgcaaacgcaacaggccatcggcttggtcaatgtcgacaatcacgtgcccgacgaggtgctccaggaaattcgtgccattcccgctgtgcgcaccgcgacggtggtgaaggtctgagcgctgggactatggcgcccaagcatcgcctccgccagtcaaggaaggtaggaacggctggcgcgccggggcaggtttgggttttcaagatcaatacgaggcgggggtgggaattcgaggcgtactttcgctcccgccagcgcggcgtcttcgcgatgggtgacgaagggtggattcgcagcgcctcgagcctgcgttaccttcgcgaagaagtgaaacgcggcgaccttttcctttgctacgaggtcgaccgcaagcaggtggtgggcgtggcgcgcgccgcctccgatggccgcgacgtgggcctgggttcgctcatcgatttctgcccgccgcgccaggccgtgcgcctggaaaatcctctcgcgcgcaagccggatctcgaccacattcttgccttcagccctcatcgcggccgcggcacggtgcaaagaatcgaccccgacgagttccgtcgtctgcgccgccttatgtggcggaaaaacctctcccagcgggataagttggcgaagctcctgggcgcatgaaaaccgccctttcccgatgtcgcctcacggtgcctattggcgcatgtgggcaacgctgacggggtcggtaaccccaccattgatgccgtcgaccggcagggtaccatcagagctatgacctccagagagtgccagtgcatgtaagggtaatactcctaacgaacatatataaaagagttgcaatcacatcaaaattgtgaaaaactaaggtgggttctctcgccggagggaatgccaccaaagaggtagccagctcccgcagttttgccgagaagggaagcgatttccttccctaatgaccgccatgcatgccactgctaacttacctttgttcttcgagggggtgcaccacgatttaaagtggcgaaacttcaccgccgacttggacttctggactcgccaggcgcgcaaatacgctgaacctgttctcgatctggcatgtggaacgggcagagtttctctccacctggcccgagtcggttttcgcgtgacggggattgacgcatcagaagccttgctgcgcgaggccaagcggaaatgcctgcgctcaaagctatcggtggaatgggtcaaccacgatatccgggggttcgagctgggaacgcggtttcctctggtgatcttccccttcaactccgtttcctctctcgtggaagccaaggatttggaagcatgcttcgcttgtgtgaaacgccatctggctccgcaggggaagttcatcattgactcggtcaacccgcgcctcgatattctttcgcgcgatcccgaggagcgctttccccattcacgctatccggcgcccaatggccgcggcatggtcgaagtgacggagagcaatagttacgacacttgccgtcagatcaatcacgttcgcctctaccacagaatgccccgcgaaggcggcgaattcgtggaagaaatggcggtccggattttcttcccgcaggagctcaattccctgctgaggtacaacggctttctggtggatgcaaggtacggcggttacgatgagtccacgtttgattcgcaatctcagaggcagttgattgtctgttctgttccggttgaacatgatcttccccctggcaaaatgcagtgaaacttcctgttgattcctctggcagttttcccctcaacgtgattagatttccggggcccggcggggggcgcgccgaagatctccgctcctgtgggaacagggagtgtgcccatccctccggagtcagggcgcgggtctgccgcgatggcaggcctggaacgcaagcagcgcgccggcaagcgtggacgagttcttacctatgccagggaggcaaggcgtgaagaagcagatcgcacaatttttccagctcgatgcaaatggcacaacctttcaacgcgaaatcctgggcggcatcaccactttcctcgccatgtcctacatcatcttcgtgcagccgggtgtgctatcggctgcgggaatggatttccatgcggtgctcacggccacttgtcttgcggccgccgcttccacgctgttgatggggcttctggccaattaccccgtagcactcgcgcccggcatgggtgagaatttcttcttcgcgtttacgctctgcggcgccatccccttgggattcggcctcacctggcagcaggccctggcggcggtgcttctggcggggattttcttcgtcgccatcaccctcaccggcttacgcgcgcaaattgtgaactcgattccccattcgctgaagtgcagcatcgccgcgggaatcggccttttcattacgttcatcgggctccaatacggcggactggtggtggcctcgtccggcacgctggtgcgcatgggcgatttacgccagccggcagtgctggccaccgtcgcgggccttctgcttatcgtcgtgctattgagcttccgcgtgcgcggcgccatcctgatggggattctctccaccaccgcgatttgcgtgcttctggggttggtccattaccagggactgttctcgctgcaacttcatctggcgcccacattctggaaattcgatttggccggcttgttcaaggtctcgccggcgcgcttgggggcggccattttcgtgctcttctacctggcgctcttcgacacggtgggaaccctggtgggcgtggggcaccaggcgggcttggtgcgcgacggcaaattgccgcgcgtggatcgcgccctgttctccgatgccgtgggcaccaccgtgggcgcggcgttgggaacttccaccatcacctgctacatcgaatccgccgccggcgtttccgacggcgcgcgcaccggcctggcgagtgtggtgacgggaatactgcttgccgcttcgctgtttttcagcccgctggcggcgatgattggcggcggggtgaaggtgggcgcctccctgctttatcccacgctggctccggcgctcatcgtagtgggctcgatgatgctcaagcccctgcgtgagctcaactgggatgatcccacggaatacctgccggccttcctggtgctggtggggattccgctcaccttcagcatcgccgatggcatcgccttcgggcttatttcctactcggtgctcaagctcgccaccggccgctggcgggagtgccctctgctcacttacatcttcgccgcactttttatcgtgcagtttatgattcattgaacggataattaccattaccgtaatgccgatagtgagatttggacgttctggcggatgggcgccggctggcacctgccccggcgcgtcgggaggtctgcacctcccgtttcaccttcaaccagccttcgcaaattcgattttcgaatacgagagatgcggacctaaaggtcagcgctacaaacctcgctacaaatttcacccggcaggtccagcaagtcgccgcctacccggctgcggtctcggcggctttctgtttgccgcgcatctccttccagagatcgaggtaaggcttgagctcctgcatcagggagcggaaccgcgggaagtcgagagactgggcgccgtcgctcttggccttttccgggcagggatgcacttctacaatcaatccatcggccccgatggccacggcggcgcggcacagggcgggcaccaggctctgccggccggcggcgtggctggggtccacgatgaccggcaggtgggtcagctcgttgagaaccggcacggcggaaatatcgcaggtgttgcgcgtagcggtctcgaaggtgcggattccgcgctcgcacaggatgacgttgggattgccgtgcgcggtgatgtactccgccgacatcaggagttccttgatggtcgagctcatgccgcgcttcagcagcaccgggcgcgggcaacggcccagcgctttcagcagcgcgaagttctgcatgttgcgcgcgcccacttgcacaatgtccgcgtattcggcgatcagcggcacgtcgtgctcactcatcacctcggtgacgatggcgagacccgtggcggcgcgcgcctgggcaagcaactttagcccttccacctccatgccctggaagtcgtagggggacgtgcgaggcttgaaggcgcctccgcgcagaatctttccgcccactgacgccacgagctcggccgaatccataatctgtttttcgctctccaccgagcacgggcctgccataaccacaaattggtcgccgccgatggaaacgccgttgatggggattcgcgtgcgctcctgcttgaattccctgctcacaaacttgtaaggcgacgagattcgcaccgcgctggcaacgccgggcgccacctcaatcgcttccaggcaggcggtcacgtcgcccaccccgatcacgccaatcaccacgcgctcttccccttgaatggagtggaccttgtacccaaactcccggatgcactcgcaaacatgatcgatttgcttctgcgtcgcatccggcgccatggaaataatcatcgctttcttcctcccctagaatgaaaaagcccactcgcggggagtgggctggccttgcaacatcgcctttttagttcagaccaacgccactctaccggattggagcgaagccccaaaaccggtagctaaagtaggtaaacgaattggcgtaggttccaaacatcgaaacgccagtatacagcaaccccaaaagtgccgcaagaattctctggggcttgaaacacgcgggttggggacacgggaggcgttataagagattccaggcacggcatcgaggactcctgataagggattcaaaactcggcgcgcgttttgagatcgggccattgggtgattgtcgattgccgattcccgattgaggatttgcgattgttgatttgtgattggcgattttcgagcacgtagcgcggacgtgtccgcctctccgcactcctccgcggccttccgtcgatttgccttcataaacccgtgcacgccgggcgtgtcaagagcggcgacaggggcgtgattataatccccggcccagggctcggcgaagcggaattcgcggtccggcccagagccgcggacgagcgctggaacgcgcgcacgtcctcgcttcccaacctccgggctacgcgctctttcatcctcgactgcatgccggttttgcccggcgcacttcctgacaccattcccgtcacggtcacggccttggcgagtcagtttgatcccgttcccgcaaatctaattcaataggttcagaaactagactatttaattgcagttcgccaaaatgtcgccacctcttctgaagttcatggccgaagaccacctttccagatgttggccgacgttcgacgttttgaggccacacgtcacactttagtcggagccagacgggggaggactctttcagaatctgccaagctacaggggggcggtccactctgtaacgttcgagcttaatcggagggcgtagtacgactaagctctcggtagcccaactttctccgggtttgattatctggacgaggcgggccggcggcttctgttggtcaagcgttgcgcggaataccccccagtcgggcgatgtgcttacggatggcccacgatactcatcgaacaagatgttatcgccgagtgccgccccggaactcctagtcagcgtcgctccaacgcagagaggggaacggtcggtcagcaggatgacggggcttcccccggcattgacgaactcgagtcttaacgtcgcggtcacggcgacaaatgacgcattagatagggtctcgtccttcacgcttagcaccctaccccgcaggaccaaagggcttgcccccgaaccggacgaccctgattggccgaaaacgagttgcatgtcggcaaacagtcccactaccagagctacctggaggaatgctcgcatgagttctcccttccgacagcctaatttggtcggtagtacacgctatcaccttcgctgaccccttgaatggttccgtagtccacgccggggcctacctgcccctcaaactgcttggctggccccattaggcacggtccagtttggccactcttactgaacactagccggtagcgccgaggtgcacgttttgggcgctcctcgggagtgccaggataagcctggctgatcttgtgaactgaaaggagttcaccttgtagattacccgttcaacaagtagcccggcaagcgcgcgtgggagcaatcgcacggg

SEQ ID NO: 528 - DNA, 71099 bp, Artificial Sequence
  Synthetic Oligonucleotide
cgtgtggcgggggttcacccccacgggcgtggggaaaaggcggacagtgcctgccggttgccgtggaaccgcggttcacccccacgggcgtggggaaaagtgtttcctcctattcgagaaaattttctcgatgggttcacccccacgggcgtggggaaaaggctaaagttattttcagtagaatcgcatccattatacctgattcttccggataaggtcatttttcgttgggctgtcgcgagaggacgataccgtcgaagtcgatgaaatcgcgcctggtgttaccgaaagaacggatggtataaccctgttcgttggcgtcgggataaatgaaaatcacgccgccgttacggatttttttacagcagcgttcccagagtttttcacggacgagggcggagatttcggcgacgaatacgccgggatggggttcgatggcccaccgggagacttcgccccgcaaggcgggtggcgcggagacgaggatgatgaccgtcatggtgtagtttctcccgggggagggggcggggttgacgacccggtatcagaggggggctgttgttccatgagttcgggatcatagttctgggcggcggggcattcgccctcgtcgggatcccacagggccaggggagcgtcggcaatgtcggcggcggggtctcctttccgggacatgccgagggcggcccggatgtcggggatgacccggctcagcagcctggtctgatagaaccattgccggcaggtcatgcggaccacgcgttcgagttccgagggattctgcgcgccgacctggaaggcgatgggaatagtatactctgtcttgtaaagatcggcgacgtcatagacgaaggagagcatgttgccgacgtggatgaaaccgagggcgggcgagaagccccccgcaagaatagcggcatgacagagtccatataaacacgagttggcgacagagagggcccggtttatcggatccgcatcattccagttgtcgaccttatagttacgccccgtccagttcacgccggtctgctgtgcccaggactcgtacacccgacggacgcggcgtccttccatggcgcgcaactgggccatggagatgcccggcggcacaggatcggggaaacgcacgccgtacaggcgcacggctacctcgaaacgggtctgtggattggcccacagggtcgcctggtgatacaggttccgcgcgtgacgggccttggagtgtccgaaggcgtagcagcgcacggcatcctctcccgtccacgcaaccaggacgccatgttcaatcagaaggctcatggcggcatgggttacgctgactcccggcccgaacaggagcaggttgatgccggcgcagggcacggcggttttcccactggcgtcgatcaggacgatggcgtgctcgtcccgttcgacgatgacgtgttccaggtaagcgtatgaccaggaatcggtgaagcggggcagggcccgcaggtcatcggaaggcgccattcgtacctgttcctttcccgatacgttacgtaccgtccacgtacgggccggacggccagttaccccaaggcatgcatcctgctcgaggcactaaccggatgagccggcgggggcgggacggatcccgcccccgccggggagaggtttcacggtttcgcgatggtgagtagtccacaaccgaaggcccgggctggcccgattcccgaggcgatggtggcgtaaaatgcccgcggatccgttacttccagcaggccttcatagcgcgcgcagaacaactggggaatacaggccctgcctggctgttccgatccgttggcattcgcgaaacccgcgcggttcacgtagtagtaatttacctggatattcagagcttccgggccgggcacgaccttgaagcctccggtctccccccgccggatcagccagtcgggcaactgttcccgtggtacaggcacgcgcgtgccattgcgggtgcgacggtcgcgtcgccaaggcccggagagatccccggggggctcgaggatcacgctgtccgggttttccctgcgttgcgccgccgtgagggtgccgacctttctcgtggcattggccatgagccggaagcggtagcgttgtccggactggaacaccgggttccaggatcgcacttcagggggggctgccagcaggtaatccgcgttatgaaaggcgtaatcccagtctggctcgatggcggactgcaccagaatgaccggattaccgccaggctggggatcgatccggaagagaaaacccgcctgccccgaccggggtatatgcaggtgttcgccgaagtcttccggccggaagggctggagaaactggggatcggtggttttgcgcgccggcgcggggaaagccatgctcagccgctgatgcacccggtacacgttacgcagccagtttcttcccgggcggatccggtccggatccttcccggcgtcgatcagcaaggtagacaggtacatgcccggatcctcctattccttgaccttttcgcccagcaggcgcgcgcgggtttcccgggatcggaaccggataatctctcttcggcgctgaatgaccaggtcgcgccagaagggatcttccggattaatccggtccatgcccatgttatggccgtactcgatcatcgtgcacgcgtcgtgacagagcctgcacagggagcgtaactcgtcgacccgttcgttaccccctgcgtggcggtaggtgatgtgctgtaccgtggtggccggggccttgcagaagacgcacaggccatggtcctgctcgaggcgccttgcccggatattccggtattcggcgttggtgtagtccgcccttggcctggggggtgatttaggaagttcatcttcggttttgttggtcagtcttacctgtccctcccctgttccacattccagaaacctgcgcgcgacgacccgcgacgtataggcgggcgcggggggaatgaagtgcacgggcacgtcgtgggcggtgtccaggtcacaaggctcaaacgccacgttacccaggggccagtccgtgtacacggtaagcacatccggttttttctcgaaagcgtaacgctgttcccacggcacggagagcagggcctcgatcgggttggctgtggttcgcaacgatccctggtctttcaggaagaggggtaccgaggggacgcaggactttcggccaaggtacaggggccacacaggctcgagcagggcgtcatgtaactgccggatgagcgagggctctccccacagggccaccaggaacgaggcatcgccaaggtactcgcgaagggtcagcatcgtttcgccatgacggagcccgccttccgcggatcgccgggagatgccgcccgcgccgaccgtgtgatagtcgagccagcggctaccggggcgatccacccggacggccatcttgagactggccatgggtttcatgacttccggggtggcctcggaccggggaatgccccgggcggcgcacagcaggccaatcacgccagacttggtgggcgcgggggccacgcgccgaatcgcgaagcgggactccgcgagcccccacgcctggaaaggtccctcgaggcggatcagcagggtgttgtgctcggccatggctcaggcctcccccaccggcgaatggttcactaccgccgcctgcgcctgggcccaggtcaggccgggatcaatggcgggaacgagggcgtttaccaggtcgttgaggctgctgaacgaggcattgtcgtcgaccaccggggtcccgttgtactggaggggataccgcaggttcggcgagaaccagaagcgtttctctggtgctccgtagcctgtatccaggtcttgcacgtgcatggccagccgggcaatggattcggcgacgaggtcttcgcggtcctccacgtcgacgggttgcacgaaggcgttggcatagttgacggggtacttgcgcaactccacgagaatgcccagcggcgggttgtgcgcggcgaaactgttctgcttgcccgtggggttcaccagcgcggcgccccgcagaaacgccccgaccgtgtgggcggccagttcgcggttgtcccggagattcttgagcagttgcggccaggagatagagaagtacttgtaataacaggcggaggcaaacaaggcctcgtccacgtatcccgcgccgcggtcctcggccccgggcacgtcatcggcagccacgtagtagtcgatctccttgcgcgcggtgtgcgtggagagggcgtgggcagcctgcagggcggcttcgaccgtgttgttcaggtctttccaggcccccgagtcagccttggcttcgagcatgcggccaaacaaggccatgtcgggcacggcggtgtttttactgatgatttcagccactttccgggccttctcatccttgctgcccgaagtttccgccaggaccttcgccatttcgcggatggcttccctcgtggtgtacacgagcatcttgccttcttcctgggattcggcgtcttcagcctcttccccggccttgttttttttgcctcccctggtcctctgctcgaggccgcaggcgttcagcacttcggagatgtccgcatcccttttccccaggcgctccagttcctgccggagcaactggctcaggcgccgggtgcggacgccgccgagcagggcgctgaactcgtcactcaagcggatggaccgcttgaggcactggctcgaaatccgcgaacgcagcacgccgccaaagtagcaggttttgggcgcgccgaggtcatcgcggttcaggttggccggggcgtggttctggatgaggtggatctggatcagcatggcttgttctcccttggttctggccggttgggctcggttcatgatccggtttcttcaactggcaaggtttcttcttcctccgggttggcgtcacgggcctccccgggcaaggtgttcgcgaattcctgggcccagaaaagccggacggaatggcgatgccagaccgacaggtgatcgatgagcttgttccagtcgataccgggattgtcgagggcatcggccacggtggcaagggcccattccaactcaggctcgattcgttccacgggggtgttcagcaagagatcgaaacgatccatgatcgattcgcggatttcgtttccccgtttcgcattctcgcgggcctgttgcacgaccgcgcgggcgagttgacggggcaggcggtttccgttttgctggggcaggggcgtccagccgtaaagtttgcacaccagccaggcgacatgccggcgaggcgtatccttgtggtgctgccgtatgggccaccagagtcccgtgaacaggtcaaaagcgatggcatcgcgatcgatgccggtgcccgcgctgctacgcaacagcgagatgatcccattcttgcgatctacgaggcgggaaacgaatttcttcacgcccgcggaggcttcgcgggtgtactccttcatgtccagaaaggggcgagactgcaggtcgcgctggctgatcacgtcacgaacggaaaccccagggaaaaagacaggcgccatggaccgctcgggaaccctgtacagcgcggcgggttgctgttccagcagttcgcgccagtcggcaatgcgccccacctccgatggataaccggcctgtaccagcgcgaattttgccaggcccgattttttgacctgaccggccctttttttcttggcctcttcatcccttgcctgggcctggacgattgcacactggaagtcatacaggtgttttttccgttcttggttccattttgtcaacaggatcttcagggttggggtggatgcctccggattcacgtcgtccggaattgtccctggtgctccaaggtcgatccggatggcccgcgcgtcctggaactttgcctggttggtgttgaaatcgaccaggagccatttccggtggtcgcgccacggcgcgatatgagagatggcatcgtgaattttgagcaggttgtcctgccattgccgggaaagagcgtccggatattttgacagattgaacaagtcgatggtctgcagatttccgatcgcatgcggatctgtccactgatacccctcgtttacatcgctcttttcacgcccctcaaaggccatctgctgaatgcccaccttgaccaggtcaccggtaaacacgcaccgggcaccgttctccgcgggtatgggaagcagccagacccggcgaggtaaccacgtcagaccagtcagtaatggcacttctccctgaagtgtttgaagggggatttcccaagccggagaacctgcttgccgatcacgtaaaaccgcccaggagagccgcaacgtcccggctagcgaaaaagcctcgggcagcaggtacacggggggcgtcttgttgataccataactttttccttgtccgcccacggtagtgaagacaggcaagcgaaccaggccaatggcacaagccgccggcgacagccagttttcaccgtctgccacgtggaaaaaatggggatagttgcgtccggacggtatctcatgaatgaggttcatcacgggatgatatttctttggcgaacgaagattttgatcctgaaagaatcggggggcgtcatccgcgagcagttcgaagaaccttgcgttgtcgcgcgctttatcaaaccagttgcccggaaagggcgcgtcgagggtggtgagcagatcatccggtgggttgccgcgacaccagtacaggacggccagcaacagtcgggtaatggcgaaagtgtccaggggattgcccgtatcgacccgccaggcaaggtgggcatccttcatggcttgcagtattccgacgcgctgacaggttccatcccgatacacgagcggaatccagggatcatcgagcaggttgaaacgaaatgtttcactcatggcgttttctccttctgccgatttcaggccgggactttacacgcaaggcgataccaagcgggtatgttaacaaacggaaggataaaatgaccgagagccatggccaataatccggcttgccgggaatgctgatcatacgtcgtgtcctgacctcccaaagaggtatgagtgcgtctttatgttgatcatacctccgtaaaattccggtgtacggaaacataaggcggattcaaaaaaattttttgtcctattgttcgacagatgtccctgaacagcaagcctggttccctgaaagcatctccgggttacctgaactggtatactctggcccatgggtgacacgccgcgggtacatgtactggtcatcaactggaacgggcgggagcacctcgaagcgtgctttgacagcctgctggcgtcggattacccggatttcgaggccgttctggtggataacgggagcacggacggttcggtgacgtttttccgggaacgatggggtggggatccgcggtgtgccttgctggcactggaccgaaaccgggggtggagcggcggtaacaacgcgggcctgcgtcgggccatggatgccggcgcgcggtacgccctgctgctgaataacgatacccgcattgcgccggacgcgttgtcgcgcgccgtggaccgggccgaatcggatccacgcatgggcgcggtagccctgaaaatggtactgttcgaccagccatgggtggtgaacagcctggggatcgccatgagccgggcgggggcgggctgggatatcggcgcgggacggctggacggcatggtgcttccacctgaagaggtggcaggcgcgtgcggaggggcctgcctgctgcggctggacgccctggaacgggtggggctgtttcccgaacggttcggcatttacctggacgacctggacctgtgcctgcgcctgtgggatgacggctggcgggtggtcacctgccccgaagccgtggtagaacataagttcagtgcgtcgatgggccatgggccaggcgcgcggcggaaatattttcttgcaacccggaatcggctcttgctgctggcgcgcaacacgccggtttcggcactgcccggtgcggcatgggcgacgctcgcggcggaactccgctcgttgggcgcggccgcgcgggatggggactggtggaaatggctggcccatggccgggcatggtacgacgtccttctcgcgacaagggagacgatcgcgcaccggcgagccatggatcgcctggggttggatcgcgcccggcatggacggttgacgcgccgggaacccctttttggccccgaggtggtcctaccagtccgggggttttatcccctgcgcccgccggtgacgggatcagcccgggcgatcagtcgcgccgcgtggctggaagatccaccggcagggctgcggatccggctggaagccccgttaaggggtgtttttccgggtcctgtgacgatctggcaggatgacacgccatccgcggtgctggccaggccgggcgagacgtacgctctccaggagtccgctaagcggatccgactcgaggcgtccggcatggcacgggccgaggaatccgggctgccatgggacacgggcgcgtgggtgacgctggagcctgacccggtggcgcgatttctcgaggcgtagtcatggacggagtgggaaagaccattcttccggcaaggagttgggatagatgacaaaggtgaaactcgcgctggcgggcctgctcctggcaggcatgctgggtgtcgcggtagtgctgggaattctggtcgcgcggtggtcggtgccggatgacctgccccaggctccgggtggcgtgccggttgcagagtcgggaacgaccccggccggcggcaaaccggtggtggaagcgaatccagacgcgcccctcttgtgcctgagcattcccgggttttcggcagagacctggcccatcgcggccgaagagatccggctggccgctgccgcgggagttcaccagtacctgttaccggtctccctgcgctgggaaggcgcgccggagccgcccgaccccgtggaacgggtcaaccaggtgatcgtactggatccggaagcgacctttctgctgacggtggacgtgaacccgccgccggagtggctgagcgcgaatcccgccgaggcgatggtgggtacggccgatcccctcgctttgccgtcggcggcgtctcaggcatggatcaacgcggccaaggacggcctgaccgccctgcttggcgcggtggaaggcagcgcggtcagttcccggatcctgggctacgcgctgtgtgggctgctggatcaccagtggcgcctgccagctggatttgaccggtcggaagtcaaccgccagggtttccgggactggctggtgcgccagtaccagaccgagacgcgcgtcgcccaggtgtggcacatgccggaattcgacgtgagcagcgttagcattcccgcccccccgggtcccgggccggacgaaggcgtgttcatggtgtttccccaggatcgcccgctgagcgatttcctgcgatacagttcagattcggtagcggacgccctggccgccctggtggcccatacccgcgcggtctcgttgatcgcgccgctgattctcgccccgtacgggtataccctcgaagcatcggacgccgcgtcgggacatttcgccctgggcgccctgctccacagcgacttgagcggcatcatcgcacccctggcccagggggatcgcggcctggggggcgcggggcacctcgcggccccggcccagagtctcaccgaccgcggcatgcgctacgtcgtggtggatgatatccgctcgggcatggaacggaacgccgaaaccggcgcgttcgagcgggataaggggatccggctggaagatgtgctggacgtgcggcgtcgaaacttcgcgcaggcccttgtttatggattcggcctgacctggtcggatccgctggcccgtggctggcttgtcgatcccgaccagtggcaggagctgggacggcttgccgggatctaccagcgggtacgcccccggacggaacctccgccagcggaacctcttcccggggtcacgctggtcgtcagcgaacgcgcggcgttcgtgacgcgcgccggtacctccctttacgcccggaccgtggcggcagcccgggatgccgtgtaccgcagtggcgcgcccgcccggaccgttctgctgcaggacttgtttgaggatgtcaacacgccgaccccagtatacctgttcgccaatgcttttcgtctcacccagtcggaacgccgggcgctgcgggcgcgcctagcccgggaaggtgcctgcgcgatctggctgtacgcgccgggatatttcgatgaacagggttctgctgtggcgggtatcacggagatcacgggtatccgggtcgtggacgcggggccggggggcacggccgcccgttatgtgcttgacggaacctatctcaagcgggacgcgacctggggcgacgcgacaccctgggctccccgcttcgcggtggaagacccggacgcggacgcgttggcccattacgtggatgggggaaaggtttgcgtggccgtcaagccccagccagacggatggacctccgtgctcatcgtcacgccggagattaccgtatccctgctggccgaactgctgagcatcctggaacagcccatgctcgttcaggcggaagacggaaccagtttcgataccgtgttcgccgcgggtgacctgctggctattcacgccggcgcgtcgggacggcggatcgtgaacctgggccgtttcgccgatacccgcgacctgctggatgacgcgttcagctggagccggaaggattcgtttcccttgcaggtgcgcctgggtgagacgcggctgcttcaatcgcgcgaggaagcggcggggcaaccatgaaagtgaccatcatcgactacggggccgggaacctgggatccgtcacccgggccttcgaatcgctcggaacggaggtgatcctcggcagggatcccgtttcgctggctggggcggacgcgctggttttacccggcgtgggggccttcgccgaggcgatgatgtttctggatcggggcggatggctggggccgttgcgtgaagccgtgctggagcgccgggttcccgtactgggcatctgcctgggcatgcaactcatggctacccggggagaagaaggaggaaacacgccgggcctgaactggctggacgggggcgtggtccgacggctgtgtcctccacccgaaagcggcgcgcgcctgccgcatatcggctggaacgaccttatcgatcgcggggaacacccgattttcgccgggattcctgccggagccacattttatttcgcccattcctatcacgtggacgccttgccggaagatcgcgtcctctgccggagttcacatggggtatctttcgcggcggccgtggcacgggaccatatcctgggggtccagtttcaccctgaaaagagttacgtcaacggcttgcgtctgctccggaactttctggaattcgccgggaggaggacgtatgcataagacgcgggtcattcccgtcctgctgctcggcgcgcgcggcctggaaaagggcgtgggattccgcaaccgggtatacgtgggctgtccccgaaacgcggcccgggtgttcaacgcgcaccgggtggatgaactggtgctggtggacatcgtggctacccccaactgccgccccacgcgggtggactatgtccaggaaatcgcccgtgaaaccacgatgccgttcgccgcgggcgggggcgtgcgatcgctggatgacatgcgtcgcctgctggaagcgggcgctgaccgggtggtgctcaacaccgccgccgtggagaatccctgcctcatagaatcgggcgcgtcccgcttcggcagccagtgcatgctggtctccattgacgcgctgcgtcatccagacgggcgttacgaggtattcacggcgtgcggaacccggcccgccggcattgatcccgtggaagcggcccggatcgccgaagccgcgggcgcgggggaactgctggttacagcgatccaccgcgacggcaccatgagcggttacgatgtagatctcgtgcgcagggtggttgacgcggtgaacattccggtgattgcgggtgggggcgcggggtctgtggagcatatcgcggaggtggtgctccggggaggcgcggctgcggcggcctgcggggcgtttgtcgtgttctacgggaagcgacgcaccgtgctgattacctatccatcggtcagggacttgcgcgcggtgctgccggaggaacgggtacggaaccgggatcttgtgccgccgccggatatgaccgcggcgcggttgtgatttgcgcggcaccgcgcaaaatctgcgcggcccggcaagccagggaccggaaatcacctgaaaagtcgctgttttcacgaagttgactccggcacggtaattgccccctgttctctggaagccatttcgggacgagatggcgcgaccagaaggagcgcgaccatgaagacacgtaaaacattgtggatccttggaatagggggtgccgtcttgttggcggccgggttgatggtgacggcgtgggcccagcaggcgccaagcccggccgattccggagcgccggctcctccccgggagaacgtggatcagggcactccaccgcccccacccccgccgccttggcatggcatgggtgccggtcggggtacccggggttgccccccgggatgcccggattacgcggacgcggatggagacggccgttgtgacaacttccgggacgagaacggcgacggctggtgtgacaaccgcccggctggtccgccagtccggggattccgaggccagggctggggttctgatggcacgcctccacccccgccgccttggcatggcacgggtgccggccgtggggtgcgaggatgcccgccgggatgtccgggttacgcggacgcggatggagacggccgttgtgataacttccgggacgagaacggcaacggctggtgtgacaaccgccctgctggtccgccggcccggggattccggggccagggctggggtcctgatggcacgccttcaccgccaccggcgtggcatggtaccggtgccggccgtggggcgcggggatgcccgccgggatgcccgggttacgcggacgcggatggagacggccgttgcgacaacttccgggacgagaacggcgacggctggagtgacaaccgcccggctggtccgccggcccgggggttccggggtccaggccggggctatggcggtccctggggacgtggccggttctgagtggcacgcggccgaacggcatcgggcgcgggcggtccatggaggccgtccgcgccggtctataggttcgaatggttccgggcgtggataatgggaagatgaggtacgggttggtatgaacacggcttggcgacgcgcgcttccgtggcttgtggtaacgttgctgctgcaggccatggtgctgttcatggcggccgggatcacccgctaccgcttgcggcaggccgcgtttatccagcaggcccgggtcgaaatcctgctggaccttgccgagcagggggtacgggcccacatgcggcctggcccatcgctgattgtgccgggcgtggagacggtattcgaggcgttgcatagcctgccggaagtggctggcttacggctggttgatgccgcggggactacgttattgtccacgggcgtgcctgagacgccagggcctcacccttcgcccgacctggagcggtttacccgcgacatcacagatttgcccgcggcgggcatgcctggacgtggcgcgccccggggaccggggcatggtccaagatggatggaatccagggggccggatactccctggcgtcctttaccaccgggaccgttgatcgttgaactctggctggaccggggcgaggataactacgtgtggcaggtacgtcgggatggctggctgatcgcccttgggggtatgctggcagccgccgtggccgtgttggctgttgccgcgtcgcgccgccagcgacggatgcgtcaggatctggtccaggcccaggaggaagtggcgcgtcaggcccgcctggcccggctgggcgcgggactcgcccacgagatcaagaatccccttggcgtggcccgtggactggcgcaatccattctggacagcgcgcccctgggatctcccctggcggagaaggccgcggccctgatggatgaaaccgatcgcgccgcccgccggatcaatcttttcctccgatatgcccgcccccccgagccccggcctgaacccgtgaacctcggggaactgggccagaccctggaacgcctgttacgggatgaagcggcgcggcaacaggtgcggttaaccgttcagttggaggggggcgtgctggcggatgccgacctgttgcgacgggcgttgatgaaccttcttttgaacgcgctgaaagcgtgtggaaagccgggagattcgattatcctgaaggtggagccggaaacccgggacacggtggcgctcgcggtggtggatactgggacgggcattgatcctgaagacctgccgagggtgacggagcccttttttggtaaatttgaacagggtaccggcctggggttaagtatcgtccaggaaatcgcccgcgcccatggttggcgcctctcgattcgatctgtgcccggacagggcaccgaggtccggttgtgcggcgtaaagcgggtttcgttacccatgaacgcgatggaacccccggagcgcggggaatcgtgatcggaaaaggtgaaatgaccataccccccgtgatcggggtcgtagacgacgaaccggcgcagcgtcggttactggaggaaaccctccagcgagccgggtggcgcgtgctgtgtggggaagacggcaggcaggccgtggaactcgctccccgatgtgatctcatgctgctggacgtgcgcatgcccggcatgagtggcctggaggcgctggacaagatccggcaactgccgcggccgccggtggtcgtcttgctgacggcctatatcgacgtgcgggatgccgtggccgccatcaaaatgggcgcggcggactacctggagaaacccgtcgacctggacgaactgctcacggtgatcgaggattgccttggccttggtcctcgcgaccaggatgccctcgaccttccccccgggatcgtggccgaaagcgagaccctgcgtaatctgtttcgccaggccttccgggtggcccccacgtctgccgccgtcctgctcaccggcgaaagcggcacgggcaaggaaatcttcgcccggctgatccatgcccgaagcaaccgggccagcggtcccatggtcacggtgaacatgggggcggtgcctgagcaactggccgaaagcgagttgttcggccacgagaaaggggcgtttaccggcgcggataccagccgcgcgggcaggttcgaagaggccgacggcggcacgctgttcctggatgaaattggggaactgcccctgtccctgcagccgaaactgttgcgcgtgctggagacgggtgaattccggcggattgggggcaccacggaccggcgggcgaatgtccgggtgatcgccgccaccaaccgggacctggagcgggaagttacggcgggccggtttcgggaagacctgttttaccggctcaacgtgttccctttgcggattccgcctttgcgcgaacggcgagaagacattattcccctcgcggaactgttcctggggccctggaaaaagaggttatcccccgcggcggcccgtctcctggcggcctggtcctggccgggcaacgcgcgcgaactgcgcaacgtggtggaacgggcggccattctggccgatggcgacatgatcttacccgaggacctgcccgatgccctgcggaacgcgccccgttcggacaggcccgatgccccggggcggccccttatggaagaagcccagcggcgcgcgatccgggaagccctggaaaaaaccgggggaaaccggacgaaggccgcccagctgctgggtatcagccgacgcagcctgatttacaagttgcgcgcctatggcctgtaggggggggcgggtgattctccccgccgcgcggccgccagcgcgatcgccgtggccaccgacacgttgaggctttcaacccccggccacaggggaatccgcgccaggaaatcgcagcgttcccgcaccagcctgcgcagtccgcgcccctctccccccgcgaccagcaggacccgtccggaaaggtccgcggaccagaggtcccgatccccggccatgtcgaggcctgtcgaccagaagcccgcgtcccgcaggcgacccagggcgtcaggaagattcttcaccgtcaccagcggaacgtattccaccccccccgcggcggctttgacggccgccggggacaacggcgcctgccgtcgttcggtgaacaacacccccgccgcgccgaatgccgcggccgagcggatgatcgccccgaaattccggggatcctcgataccgtccagggccaccgcgacctgccggggggcgcgcaggccgtccagccaggcttccagcgacacccggggaaccggggcggcttccagcaggacgccctggtgcgcgccgttggctgagagccggttcagcgcgtccttggatacccgctctaccggcaccccggtccggtctgccaggcggaggatgtcttccacgtcccggctgtccgcgagggcgcgcagccggtagatctgccgcttgccggccgccaggcaggcccggacggcctgctttccgtacaccgtttccgtgatcactgccgtggttctcctgagacgcgaacgcgcatcagaaacttatcataccttgccgccgcctctggtcgacgcgtcccgtcaccacccatcatggtgccataatgtggtggatggcgtggcgcgccggtaacccggcccgcctggcgtggtataatcccggagtctgccttgcggcagagggggtacgtaccatggatgaacacgcgggggatgtcctggtcatcgacgcgttgcctgcccgccctcccgcgggtagcgccagcgtcgccctgcgggcccggaggctggcctccatcgtcgtttccgtgaggcacccatcgaccgccgggaggaagcaacgcgcggcgatacgaccagccgacagggcgggtcaccggcaagttcaaggtagtccgcgccgggattggggccatcaccatgtcgcggcggggcacccgcgtcggcgagctggaggcgtaccttgccaccatgggcgtgacccgcgccgtcgaggagaggggggccgcgtttcaccaggcgtatccggaacgtggcctgtcctaggccgtggatgaactgctagactatccgcgaacccgcaagggcacgaagcgtgtcgttgccgggcgcctggcgcggcaggccggcgatgccccgccgccgggcaaggacacgacacggtggaaagaggccaatgacgaggaggcagcatgaacacggaccaaccgagcggcgccaacctgggctttgagaacaaactctgggagatggccgacaagttgcgcggccacatggacgcggccgagtacaagcacgtggtcttggggctcatcttcctcaagtacatctccgacgccttccaggcaaggtacgaggaactcaaggccaagcaagagacggagtacaccgaccccgaggaccgcgacgagtatctcgccgccaacgttttctgggtaccgcccgaagccagatgggagaagatccaggccgccgcgccccagcccacgataggacggataatcgacgaggccatggccgccatcgagcgggagaatcctaccctcaggggggtgctccccaaggactactcccgccccacgctggacaaggtgcggcttggcgaactcgtcaaactcgtgggcgacatcgacctcaaggccagggagtccggcgtcaaggaccccctcggccgggtgtacgagtatttcctcggacgctttgccgcggccgagggcaagggcggcggcgagttctacacgccccagtgcgtagttcagcttctggtcgagatgatcgagccttaccgcggccgtgtctacgacccctgctgcggctcgggcggcatgttcgtgcagtcggagaagttcgtggaggcccacggcggcacaataggtgacatcgccgtctacggccaggagtccaaccccaccacctggcggctgtgcaagatgaacctggccatccgccgtatcgacgccgacctcggcccccaccacgacgacagcttccacaacgacctgcacaaggacctcaaggtggactttctactggccaatccgcccttcaacatgagcgactggggcggcgagcggctcccggacgatccccggtggcaatacggcgtgccgcccactggaaacgccaactacgcctggatccagcacttcatctaccacctggcacccaacggcatcgccggcttcgtcatggccaacggctccctctccacctcgaccaacgccgaactggccatccgaaagggcatcatcgagggtgacctggtggactgcatcgtcgccctgccgggacaactcttctacaccacgcagatcccggtctgcctctggttcgtgacgaggaacaagaaggcagaccccaagcgaggcttccgcgaccgcgcgggcgagaccctcttcatcgatgcccgccgcatggggcgcctcgtggaccgtgtgcaccgggaactggcgcccgaggagatccgccggatcgccgatatctaccacgcctggaaatctgtaggggcgcatggcaaggcgccctaccaggacatacccggcttctgcaaatccgccacgattgacgacatccgcaagcacgactatgtgctcacccccggccgctatgtcggagcggcgcctcaggaagaggttgatgaaccatttgaagagaagatgacacggctagtggttcagtttagggaacagcaagccgaggcggcgcgactggatggggcgattgagaaaaacctgagggagttgggattctgggagaaatgaccatgacgccggaaaaaatccaacgtcttattgaagccggcgaaacgttggacatcgagttcaagggggaagagaaaagatccctttcggatgacgagttggttgagtccgtggtctgcttggcgaatcgttcatcgaattctcccgcctggctgctcatcggtgtggaagatgacgggcgcgtaacaggcgcgcgtcctcggcacgaatccggtcaaaccgatccggcgcgcgttgcagcccttatcgccaatcgcactaggccatccataacgcctcgcgtctccttggaatcaatccaagataaacagatcatcgttatcgaaatccaaccgatctcttctcctgttgccacaacggccggcaagtacctgcgccgcgcgatcggcggggacggcaaaccttgctgtctgccgatgttctttcacgaaatgcatgccaggcaagcggaccggggcgccgaggattactctgcactggttctgcctgatgccgactgggatgccctggaccctctggagttcgaacgttttcgtcgaagtatccgggaaaatcgtggcggcgatcaatccttgctccatcttcccgacatagaactggccaaggcgttgggagccgtcgaggcaaacggtaaggttcaaaacatccgagtcttgggactgcttctgttcggaaaagaagcgtcgctcaaaaggcttctgcccacgcacgaggtcgcttttcaagtcttggtaggtcaacgagtggaggtcaacgatttcttccgctggccgcttcttcgagtcatggaagaatgcgagcgacgctttgctggccgcaatcgcgaagaagaagtcatggtcggcctttttcgaatcggcgtaccggattactcgccggcagccttccgtgaggctctggccaacgccctgatccaccgagactatacccgtttgggtgccgtgcatgtgcaatggcgtaccgaccaacttgaaatctccaaccccggcggtttccccgaaggagtgcggctggacaacctgctcgttaccgcgccacggccccggaatccgcttctggccgatgcgttcaaacgggccggcattgtcgaacgcacggcgcgcggcattgacaccatcttttatgagcaactgcgcaacggccggccagtaccttcctatgagcggagcaacgaggccgctgttgttgtagtccttcctggcggacaggccaacctggagttcgtccgccttcttgcagaggaatcacgagcaggacgcgatttgggcttggacgacctccttatccttaatgccctctggcagaaccggcggctgagtacggaagaagcagcccgcctgacccagaagccggaaaacgataccaggaccacgctcaatcggctggtggagatgggtctcgtcgagccgcggggggaacgcaaaggccggacttggcacctgtcggctgccacttaccgtcgcctgggcaagcccgctgcctatgttcgtcaacacggccttgagcagttccagcatgaacagatggttctaaaatacctcgacacgtaccggaagattacgcgagcccaggcagccgaactttgtagcctttctgtaaaccaggcgtaccgtctgcttaaatcattagaaaaacggggaaaacttgttgctcacggcgacaagaaggggcgatattatgagcgccacacgtaatataaccacgcgcggttatcggataaccacgcgcgcaaataatatgagctggaagaagcatggcatggccgtaacacctttccaaataagaagttgcgataagccagcgtatctgcgccgttggcggttatctgaacgactgatgcgtgaacaaacccaaaccgcccgcctcgacaaactcttctgggccagcctggaggacatcgggtatggcagaaaaccgatgcttattaaacaatcgtggcattacgtttaatagcgagacttgctatttaacattcgttgaactgggaaaggtgctatgaaacggggtgtgaccggtgaatatcaggtgcgcgttgtcggtggcgaagaggttcgcgcctttatccccagccccctgccgccttcgcggcctgtagatcttacccgaacccaaagcccactgctggaacaggccacgatagctctcggccggctcgacagtatcacgctccttctgcccgatcccgatcttttcctttatgcctatgtgcggcgggaggcgctcctatcctcgcagatcgaggggacacaatcttcgctttccgacctcttgctcttcgaactggaggaagcgccaggggtgcccttcgacgatgtggtagaggtttccaattatgtggcagcgctcgagcatggaataaaacgcctggaggaaggctttcctctttccaatcggctcatccgcgagatgcacggcgtcctgctgtcgcggggacggggcagcgaaaaatcaccaggtgagtttcgacgcacccagaactggatcggcggtagccggcccgggaatgctgtttttgttccgcccccgcccgagcatgtggaagagtgtatggctgccctggagcgcttcctccatgatgaccgttcctacccggtgctggtgcgcacagcccttgcccatgtccagtttgagaccattcatcccttcctggatggcaatgggcgaatcggtcgtctgctgattgccttcatcctccaccatgaaggcatactgaaaaagccgctcctctacctgagtcttttcttcaagcaacaccggagcgaatactaccggctgctcgatctggtgcggacggagggggactgggagacctggatcgagttttttctggaaggagtcctccaaaccgcgcggaatgccgtggataccgcccaacggctggttgctctttttcaggaggatgcccggcggattcagacgactggtcgcatggcaaattcggcgttgcgggtgttccaggtttgctgccggcggccgctcctgaatctgaacgaaggcgtccgccagactgggctgaccttcccggcagttgccaaaagcatggaagccctggcacgccttggcattgtccgtgaaatcaccggcaaacagcgcaaccgcgtctttgcctacgaacgctatctgaacatcctcagcgaagggacgaaagcactatgaacatcgcaaataacctggaggtgctgggctatggggagtgagtggaaagaggtgtcatttgctgatgtgattgaaatcatcagtggcggcacgcccaagacaagcgtaacggaatactggggaggtaatattccatggctgtctgtaagtgatttcaattctggatttcgctgggtgagcacggcagagaaaacaatcacagagagaggtttagctgaaagtgctactacgattcttaatcggggggacatcatcatctcagcgcgtggaacagttggtgctatagctcaattagccaaaccgatggctttcaatcaatcctgctatggtgtcagaggcaaaaaaggcattgccgaaacgaatttcgtttactatgcactccggcatgcagtatcgcaaatgcaacaagttgctcatggaggtgtttttaatacaataacgagatatacattcaaaatcatcacaacaaaactccctcccctccccgagcagcgcgccatagcccacatcctcggcacgctggacgacaagatcgaattgaaccggcggatgcacgagacgctggaggccatggcccaggcgctgttcaagtcctggttcgtggacttcgacccggtggtggtgaatgccatcaaggcgggcaaccccatccccgaaaaattcgccgagtgtgccgcccactaccacgacaaccccgacgcccttggcctgccggaagacctcctccgcctcttccccgcccgcttcgtggattcggagttgggccccatcccggaggggtgggaggcaacaactattgggtctgagttcgatttaacaatgggacaatcccctcccggctcaacttataacgaagaaggcaaagggcttccttttttccagggtcgacgtgactttggttttcgctacccatcaagccgggtttattgtactgccccaacgcgaatagcacatactggtaacacgctggtaagcgttcgtgcccccgttggtgacatcaacatggcatatgaaacctgctgcattggtcgaggcgttgccgcgctccgtcataaatcaggaagcagatcatatacttattattatgcaatactagtacttgctgaacaactaaagatctacggagctgaaggtaccgtatttggtgcaatcaacaagaaacaatttcaaaatctttcaagtatttctcccagacctgacatcatatccttgtttgaaaaactagcttatccaatagatgagaatatcctctcttttgaggaagaatcccgcaccctcgccgccctgcgcgacacgctgctgcccagactcatttccggcgagttgcgcgtgccggatgtggagaagattctggaggatgcgctgtgaaatacgatcctgaccttcaccaccgccgcagcatccggttgcaaggatacgattacacccagcccggcgcgtatttcatcacaatctgcacggccaaccggaaatgcctgtttggtaaggtggtggattgccaaatgcggttaaatgaaacgggaagaatcgttcgtgatgaatggttgcaaaccgccgcgttgcgaccaggtgttgttctggacgcgtttgtggttatgcccaatcacgtgcatgggattattgtattgatcgatggtaggggcacgttgcaacgtgcccctacatccacgccatatgcccctacgtccacgtcatgtgcccctacatccacgccatgtgtccctacgtccacgccatgtgcccctaccgtggaacggttcggcaaacccatatcggattccattccaaccattgtgcgattgttcaaatccgtcaccaccaaacgcatcaacatcctgcggggtacccctggcatgcccgtctggcaacgtaattattacgaacacatcatccgtaacaacgaatccctgaaccgcgtccgccagtacatcgccgataacccggaacgctgggcctatgatcgggagaatccggacgcgaccaatccggagaaagagcgaccatggcgaccatgaccgaagacgacatcgaacaactcgccttggacgaactccgggacctcggctggcaaaccgccgtcgggtcggatatcgcgcccgatggtgaccgcccggagcgaaagcacttcgcggatgtggtgctccaggcacgcctgctcggggcgcttaggcgcatcaatccggacatgccaacggatgccatcgaagaagccctgcgcacggtgcttacacccgcaagcccggcgcttatcgagaacaaccgccgcttccaccagatgctcaccgacggcgtggacgtgtcctggatggggccggcaggggaacgccacggcaaggcgtggctgctggacgtcgaacacccggaacacaacgactggctggcggtcaaccagttcacggtgatcgagaacaggcaggagcgccggccggatctcgtgctcttcgtcaacggcctgccgctggtggtgatcgaactgaagaatcccggcacggcccgttcaacgatccgccatgccttcaaccagctccggacctaccagcaagaaatcccgtcgctcttcgtctacaacgaaatcctggcgatttccgacggcatgcaggcccgcttcggcaccctgactgccgagtgggaccgattcatgccctggcgcaccatcgatggtaccgatctctaccgggagcccggcaacgaaaagcagagcgaaggcgtgccgcagccggagatgaagaccctgatccgcggcatgttcgagccgcggcgcttcctcgactacgtgctcaacttcgtcaccttcgagcaggcggacgagggcacggagggaatggccaagaaggccgcgggttaccaccagtaccacgcggtcaatcaggccttggcttctacgctcatggcctgtgggatagaagccgacgcgggggcgctttacgcccgttttgcggaggccgaagcggccgatccgttcgcggtgcgggagccgggggcgggatacagcgcgacgctcggcaaccggcgcgccggcgtgatctggcacacgcaggggtcgggcaagagcctgaccatggttttttacgccggtaaggtgatccgccatccggcgatgcagaacccgaccatcgtcgtgatcaccgaccgcaacgacctggacaaccagcttttcggaacctttgccgccaacaagcaacttctgcgccagacgccggtgcaggcggaaaaccgcgcccaccttagggaacttctccaggttgcctcgggcggcgtgatctttaccaccatccagaaattcctccccgagaacaagggcgacgcgtatccgcgcttgtccgaccgcagtaacatcgtggtcatcgccgacgaggcccatcgcagccagtacgactttatcgacggcttcgcccgccacatgcgcgacgcgctgcccaacgcgtcgttcatcggcttcaccggcacgcccatcgaaaaggaggaccggaacacccgggcggtctttggcgactacatttccatctacgacattcaacgcgcggtggaagacggcgccacggtgcccatctactacgaaagccgactggtcaggatcgagctgaacgaggcggaaaaaccacgcctggacgaaacgttcgaggaaatcaccgaagccgaggaagatgaagtccggcgcgagcggatcaagaacaagtgggcatcactggaagccctggtgggcgccgagaagcgtatccggctcgttgcggaagacctggtgcgccactgggagcggcggcgcgaggcgatgctgggcaaggggttgatcgtctgcatgagccgccgcatttgcgtggagatgtacaaggccatcaccgcgcttcgcccagactggcacagcgacgacgacgccaaagggaagatcaaggtggtgatgaccggctcggcgtccgatccgcccgactggcaggcgcacgtgcgaaacaaggaacgaagtgcccgccgattcaaggatccgaacgacgagttggagctggttatcgtgcgcgacatgtggctcaccggcttcgacgcgccacccctgcacacgatgtacatcgacaagcccatgagcggacacaacctgatgcaagcgatcgcgcgagtgaaccgggtgttccgggacaagccgggcgggctggtggtggactacctgggcatcgccgattcgctcaagaaggcgctggcggtctacgcggacatcggcgggcgtggcaaggccgccatcgaccaggccgaggcggtggcggtgatgaaagagaagtacgaggtcgtctgcggtatcctgcacggattcgactaccggcggctcctcactgctgcttcacaggctcgcctgcagggcatcgcccaggcgatggacttcatcctggcgcaggaggacggcaagaagcgctatctgcaggccgtggcggcgctctccaaagcctttgccctggccgtgccacatgaggaggcgctggccatccgcgacgaagtgggcctgttccaggaaatccgcgtatccctgatcagggccacggtgagtgctgccgagcgcgcgccggaggagatcgaggcagcggttcgccagctcgtttctcaggcggtcgcgggccgcgaggtggtggacatcttcgctgcggcgggtctggataagccggatatctccatcctttctgatgagttcctcgccgaagtccgggcacttcctcagaagaatcttgctgttgagacactgaagaagctccttcaggacgaaatacaagtgcgcctgcgcaagaacgtcgtgcaatcgcggaccttctcggaattgctggaacaggcgctcaacaagtatcacaaccgcgccatcgaggcggcgcaagtgattgaagagctcatcgccatcgccaagcagatgcgggaggccgcgcggcgcggtgaaacgctcgggttgtccgacgacgaagccgctttctacgacgcgctggcttccaacgacagcgcggtgcaggtactgggcgatcaggtcctaaagcaaatcgctcaggtactggtggaaagggtgcgcaagagcgtttcggtggattggagccggcgcgagaacgcccgggcgcaactgcgggtgctggtcagacgtatcctgcgccagtacggttatccgccggataagcaggaacaggctaccgagcttgtgctggaacagaccgaggttctgtgcgaggactgggtggtagccagaccctgaatggccatacgcggtcgttcaacctgggcgatctcttcccgaatctcggttaccccgtggtttcggggcccaaccgggggggtgatcatgacgccctgcgcggcacggacaaaacacgcgcccgcggcaggcccggacggcctgctttccacgcgccgtttccgtgatccctgccgtggttctcccgggccgcgaatcagaaacttatcataccttgccgccgcctctggtcgacgcgtcccgtcaccacccatcatggtgccataatgtggtggatggcgtggcgcgccggtaacccggcccgcctggcgtggtataatcccggagtctgccttgcggcagagggggtacgtaccatgattgaacacgcgggggatgtcctggtcatcgacgcgtggcctgcccgccctcccgcgggtagcgccagcgccgccctgcgggcacggtccgaacggcaaggtcccgggcccggaggtggcgccacgggagcaacaggccggaaaacggttcccgggaattcctcattcatcgctagcaagccagtcctcgcgcgtcggcacgatggatccacgttgaaaccgctttcacgggaaagggacgcaaatgggtaatgctttgctcacgacactgagaggaaaacaaattgtgctgcaagggcatttcgaagtacccgtggtcctggaagacgcgcgaccactgggtccggatgatacggcaggttacgagtgtcgcgttcgtctgcctgatggttctctggaggaagcggtgatttccgccgacgaggcgacggcccttctcgcgcagggcgctgacgaagtgccgtcccacgcccccgtggacgctgaaaaacttcgcctccttatagagtcagcccgcattcgactggcctatgcccatgaccagcagttcgccgtaagcatttcggggattcgcaccctgccgcaccagattgaggcggtataccaggtgatgctgccgcaacccaggcttcggtttctgctggccgatgaccctggggcaggcaagaccatcatggcgggactcctgatcaaggaactcaagctgcgcggagcgattgaccgggtgctcattctgtgccccgcgcccctcaccatccagtggcaggacgagatgttgcgctggtttggagaacctttcgatattgtcttttccgcggtcgatcagcagcaactggtggatccatgggaacgttcttcccagatcattgcctcgattgattatgccaagcaggaagaagtgcgcgatcgcgtgtgcagacagcggtgggacctcgtaattatcgacgaagcccacaagtgttccgcgcggaccgccactggaggagtaaagcgcccggaaaaccgggccgtgacgacgaaacgttatgacctggcgttccggctcacttcgcaggcggatcacgtactcctgctgaccgccacgccccaccatggggatgaggacaagttcggccattttctccggctgattgatcctgacctgtttccggaaccgcaccacctggaaaaccaggccgccaaccttcgcaaggacgtgttccgactcggaaaggattcaccgtgggcgatccggagactaaaggaagacctcaaggacatacatgggagacgtcttttcccggatcggcatgcccgcaccgttaccttccagttaaaccaggaagaatacgccctctacaagagcgttgccgcttacatcaacgaattcatcccgcagcagacggggcagaagcggtcctcggcggcgctgacccggaccgtgctgcaacgtcgactggtgagttccacctgtgccattcacgagtcgctcaagcgacggctgcaaaagcaggaagacctgtggaaagaactggagtcgctcgatccggccgcgcgcgcccgtcggctaggcatgctgaatcggagtatgccggatgccgaagtggacgaggacgatctggacgacgcggaacgggataacctcgtggaggggtacacggaggcgcaagaacaggatacgttgcggagggaaatttccgccctcaaggaactcgtggagcaggcgcgcagggtacgcgaaaacgcgagcgattccaagttggccgcgttaagaaagtgcctcgaagacgcgcagttcgcggaactgcgggacggacggggcaagctcctgattttcacggagcaccgggacacgcttgtttacctgcgcgagcacctgcagcgctggggatataccacctgcgaaattcacggcggcatgaacccccatgaacgcaagcaggcccaggaagtattcaggaccggcgcgcaggtatgcgtggcgacagaggccgccggtgaagggatcaacctccagttctgtcacctgatgatcaactacgacttgccctggaatcccacgcgactggaacagcgcctgggtcgcattcaccggattggccaggagcgggacgtgtacgtgtttaacttcgtggccacggattccgtggacggcagtcccatcgtggaaggccggatactgcagcggctcctggaaaaacttaaccagatgcgggacgccctggaaggacgcgttttcgacgtgatcggcgaagtgctgtccctgaacgacgtaaacctgccggagatcctgcgcgaagcggcctgtgatccaaaacgcctggatgagtacctggaccagattgaccgcattgacccggaaaaattcaaggcgtacgaggaagccaccgggatcgcgcttgcgcgcagtcacgtggatttttcggcgttccagcagcgcaacctcgaggtcgaggaacgccggctgatgccgcggtatgtagaggctcagttcctggccgccgcccgcgaggtggggctccgggtggaagcgagagccgatgggctgtggcgcatcgagcatgtccgcgaggaactgcggtctgatcggctccaggccgttcagaaattcggaaaagccgaaccatcctaccgcaaggtaacctttcacaaggaacacctcgaacagaacgcgcacctggacgccgtgctgatggtgcccggacatcccctgtacgcggcggtggatgagaaactcaacacctgtctcgcgaatctggtgggaggcacggctttttacgttgatcccttatgtgacaagccctaccggatccattttttcgagatcctgatccgggggtacgactccaggggaaacagcataccaatctacggggaactcgtggccgtccaggaagtggacgggtgccacgaggtgatcccgaacgccacgctgctcaacctcgtggcgcatccgtctcctccgcgggagatcgatcccatttccacgcaggcggcggccgattttctcaaggcgacctatcagcgcaagtgccgtgaccggtgtcagcaggagcggcagcatttcgcccaggtttgccgggaatacctgcaaaggtcgttccaggcccggatccggcgcgcccaggagcgggccatgtatcttgccggcgaagcggcgaacaacccggattatacgttggccgccgaagaggccaaaaaatacgtggctgaactggagcgcgcgcaggaggaacgcttcgaggggttaaatcgcctggaggtggcgcggaccgggccggtcaagcacgtgggcacggccgttgtgttcccacccgatgccggggcgcgggagcagttcccggaccttgccgaagaactcgatccgaacgttcgccggcagagcgaaatggcggcggaggacctcgtgattcaagccctggtcgcggagggcttccccgaggaccgcatcgagcgggtcggccacctgaaactggggttcgatattcgcgcgcacaggatcgcggaccccgccacgggggaagtgatcgtcaagagaatcgaggtcaagggccgtcggcgcgggcagccgatacggttgaccaccaacgagtggttcaaggcggcgcaactggccgacacctactggctctacgtggtctgggatcccctgggcgagacgccagaactggtccggatccagaatcccttcgcgcggctcgaccacgccaagcaggaggtcgtgacggcacggtactacgagattccggcgggggcattagcgaccgtcgcgcgccaaggggaggccacaccgtgaaggctggttttgcccggccagttcggatcacaaggcgtcgccaacctggaaccaggggccgcgacgtttcatgtctccggccggcatggcggtcctgccacctgccaggacagggccgtctgttgactgcgcggaagtcaccccgttccgccgatcacgttttggcaggtatggatacaggggtagaatggaaatactccgtgccatcccagtctgaaaaggagatccaacgtgccagacgaacgcagcctcattgaagactttctgcccatccaggtcatcagcgccgaggcttcccgggagaagtccgtgcgcaaggggcacatttcgaccctgcacatctggtgggcgcgccggcccctggtggcgtgtcgcgccgcggtatatggcgcgctggtgccggtgtcgcggttcgtcccggaaaacgcccccgaccacaataagcagggccttggccgggccaacgcggccaggttcatcgagcaactctgcaagtatccgggtaaccctgccgtgatcgacaaggcgcggcggcacatgctcgaagcccacgcggagcggctgaccatcgagaccggcaggcaggtcacggcaacggacatcgaggcaggccgggccccgcgcccccgggtgctggacatgttcgcgggcggcggggccatcccgctggaggcgttgcggctcgggtgcgaagcctacgccctcgacctcaacccggtggcccacatcatcgagctctgcaccctggtgtacccgcagcagttcggcaagcctgaccccaacgcccgcggcatgaccggccccaggaatgcaaagggcgaaacgacctggggcggcctggccgaggaggtccgctactggggcgaatgggtgatcaagaaggtcaaggccgagatcggcgacctttacccgctcatccccgaccccgagtacaaggggaacagaccggcggtccagtccgaaatgtggctatctccagacaaggaaagtatccatcccggatacctcgtgcccgtcgcttacctctggactcggacggtacgctgcaagaaccccgcctgcggcgcgaccgtgccgctcgtgcgccagacgtggctttgcaagaagaaggaccactacgtggcgctcaggatgatcgcgccgaaaggcgaaaagaaggtccgattcgaggtggtggaaagccccacggaagcgggcctcggcttcgacccggcggcattttccaaggccggcaacgcctcctgcccattctgcgggaccgtggcggacagcgattacgtgaagcaggaaggacaggcgggccgcctgtcccaacagatgatggccattgtctgcacccggccgagcaggcaggggaagatctacctgtccgcggatgactacccgcaatacctgcccgatgacgaggccgtccaaaagcgtatcgaggcgctatgccaccggacggggctgacggtgccgaacgagccaatggatacgaatgatcctactactgttgccggcaggggttttggcattaaaacatttagtgaacttttcacccctcgccagatgctctgcctgctcaccttcgccgccgcggtaagggaggcctgtcaaaccatggtgggacaggccactggcctgcccgccacaggggagccgactgcgccacccatgagccaagagagggccaaggcggtggggacgtatttgggggtgctggtagatcggcaggcagactataactccgcgctgtgtcactggcacaatactagggaaatactcggaaacacttttggcagacaggcgctgccgatggtctgggatttcgttgagttgaacccaattggagaggggtctggaggcgccgcgggcgccctcgactggattgccagcgtagccgacgcccaagccggttccggcctccctgccaccgtcaaacgcggttcagccacggcgcttccgtggtccaatgccttctttgacgcggtcatcaccgacccaccctactacgacaacatacagtacgcgtctctttccgacttcttttttgtctggctgaaacggacgatcggagatctttacccggaacatttcggcacggaggttgccccgaagaagcaggaggcggttgcctcaccctggcggcacaaaagccagaccgaggcgaaacgcgcgtatgaggggatgatggcgcaggcctttgccgaggcaaatcgggtcttgaaacccggcggctcgatggtcgtggtctatgcccacaagaccacgctcggctggtccacgctggtggacgcgatccggcaggcgggcttcaccgtgaccgaggcctggccgctggataccgagatgaaagcgcggctcatcgcgatggagactgccgcgctcgcctccagcatcttcctcgtcgcccgcaaacgcgaaagtagcacgggcgactcgcctgtggaccagggcacaggccagcgaccggtgccaccaagggtgggttcctacgagaacgaggtccggcccgaactggatcgaatcgtgcgcgagcgggtcgattcgctctggaaaatgggcattaccggcgcggacctggtcatcgcggcggtgggcgcggggctgcgggcgtataccggcttctcccgggtggaatacgccaacggcgaggcggtcccggccgagaagttcctggccgaggtggaaggactcgtgctcgagacgctcctcgaaaaagtgttcgggctgaccggaagcggggtagccgcggtggacggcccgagccggttctacctgctctggcgctacacctacggcaccgccgcgatggacgcgggcgaggccatcgtcttcacctacggccagcgcgtggagctggagggcccgaacggcttatccagcggcaaccacgcccttgtcgcgaaacagaagggaacctaccggctgcgggatttcagcgaacgcggcagcgacccgcaactgggcaaggcaaagggtcccgaaggggccgttccgctgattgacaccttgcaccgcgtcctgtggctgctggaaaatgatccgcgcgggttgaacgcgttcctggacgaggagaagccagaccgggaccggttgcgcctgctggcccagaccctgtccgggaccgccctggaaggcaggacggaggaggcgccggaacgcgtcgtgtcgaccacgccggcggaggcgtccgcgctcaagaaactcctggccaactggcgggcgctgatcgaccagcggctgtcagaaatcgacgcgaagaccggccagatgaaactgggattttagagaaccaccggagaaccattcatgaatacgcgcgtgcttcgtccctggactgaactggtcaggctgcaccctgacgtggaatcgggcgcgctgaccgaggcagtgttcgccatcgaccttggcgccatcgccgcgggagacccccaggttcccgcggtgaaccgggacccggaagccttcttccgggccacctacctgaccacggacctccgaaggctgctggacgaggtgctggcctcgttgtccggcaagcccggatataaccgggttttgaaactcagggtgcccttcggcggcgggaaatcgcacacgctggcggcactgtatcacgccgcgcgaagccgcgaggccctggacggcattccggaagccaggaccttcgcgcgaccaggcgaggtggcggtggcggtgttcgatggcgagaagttcgacgcccgtaacggcaagacgctggaagacggccgcgcgatccagaccatgtggggatggattgcctggcagatcgaccccgaaaaggccttccctctcgtcgccgatcacgacagggaccgggtggcaccgggaggcgacgtcatccgtgacctgcttaccaggggggcgggcggccggcccgtgctgattctgcttgacgaagtactcaagtacatggagcgcgcggcggcggtcagtgtccttgactccaccctccagcgccaggcgaaggatttcttccagaacctgaccgtggaagtggccgggagcgacaaggccgccctggtctattccctcacctggagcgccagggaatccctgggcaacgaggggctgctggccgaaatcgacaagttggcctcccgggtggaccagctccgggaaccggttacgggagacgaggtgctggcggtcctgcaacgccggttgctggccagccatcccgatacctcggccatcaccgaggtggccacggcgtaccaggaagccctgcagagcacgtggcgcgcccatgccgcgtccgacgtcgaggcgcgccgtgccgaggaagaaagcctccagctgctggaccggatgcgcgcggcttacccgtttcatcccgcgctcatcgatatcatgcgggaacgctggaccgcggtggaagcctttcaacgcacccgcggcgccctgcggttcctcgcctcctgcatgcatgccctcaaaaagcggggaggcgcccgggccctcctcggccccggcgacatccccctgggtgacggggacgtgcgggtcaaaatgctcaaggaactgggggcgcaaaacgagtacgacccggtcatcacggcggacatcgaggggcccaacgcccgggccaggcgcatcgacgaacggctggcaaaggagcagcccacgctcgccagcgtgcgacccgccacccgtctcgccaccgccatcctcctgtattcgttcgggggactgcgacggcaaggcgaggaaggcacggaaaccttgccgcctggggtcacggaaaacgagttgctggcagcctgtgtcgatcccgacctggacaacatcaccgccacggccgtcctgtcgcaactgcgcaacacctgcctgtacctgcattacgatggcgtccggtactgcttcaagaaggatcccaacgtcaccaagctggtcgaggacgcggaacagtccatcagccgcgaggaaatccgcgcgggggtacaaggaccggtgcgcgacaagatcaagaccctgctggatacgcgcctcgcgggacaccactccgccatcgtgtggccggcccaaagccaggacatcccagacggcgaaccccggttcctggttgcctacctgcccctcgagttcgccaccgagccggcgaccgaacaggaacgcaaggccctggagtacctgaccagatacggggatcgtccgcggcgcttccgcaacggtctcggccttgccatcccggataagcgacagattgaggcattgcggcgggccgtgcggtacctgctggccatcgagcgcgtcgaaaaccagagaaaccagttccggcttaccagggatcaactggagcaactccgggaaagacgacagaccgaaaccgccacggtggaatcctgtttccgggaactgtactcggccgtctggctgccccaggttgtggagggtcaggtgagccttgaaaaggtggaacgaggaggcaaaccacttcaggcgatcggcgtccacgagcgcgtcttggagttgcttaccagcgtggggacccctcggctttatgggtcggtgacgccgcggaagatcgtcgagcgcgtgcggctcggcgaatctataaacgagggagagccaccgatccagggcatcaaggtatccgatgtgcttgaatcgtttttccgggatatcacgccaccccgcctggaatccgcggccgtgctgcgcaaagggatcgcgcgcggcgttgaggaaggaattttcgcgtataccagtggccccacgcccagcctgggccccgatggaaagttccaggtgaaccgcgaaaaggtcgtcataaataaaagggtcgccgaggacgaaatcgacctcgagaccggcttcctgatggaaccgggcgcgatcccgactccggcggtagggcttccagcaactggcccgtcaggagatcgcgtacaggagcccaccaccggaggcaccgagggctgggttcctgtcccacccgcctcaacaggaggagacaccgtcacccgcgagcgacggatcgctcttaccttcgaagcgacgggggcacaggtctacaagtcgttctctgctatcgctaaactcgctgacaagtccgacggtggcagggtgcgcatccacgtcgagggcatgtccaaggaaggcttcgaagcgacctgggtacgtaacgccatttacgaacccctcgaagaagcagacatcgaatataccagggaataaacggttaaccgcctcaccggctgacacggtctccccggcggaccggttgctcaattcagccgcggtggctgtcgtctccgcgtgacgcgtgccgtccggcaggtgatccggcgtatccgtcgacagggaagcggagccaggttgccagtcccgatttgcgccagaccgcgcgtggacttcaatgcgatcgccccggacagggggctgtccggggcgacctggagggaagcactacaggcgcgctacgcgcggcccggccgtttccggcggagcatgcccgccccggccgcgctgatcgccacgcccaggaaggccagcaggcccgcgccgcctaccgggacccccggctcggtcagcacgatgatggtcgccgggtcgctgaccacgaaggtgttatcgtcggagatttccacccagtaattgccggcgtcttccgccgaggcttcggaaatgtacagcgtgggactgtcgtccccgacgttgaccaccgctttctcgccggaccgctcgaacttccactggtagtggagggtacccgtcccgccatcggccaccaccgacaactcgatgggatcgcccgcccgcacggtagccccttggggctgcgccgtgatggccagcgtgacgaacagcgtggccgggtcagacgtcaccgtctcgtactggtcgctgacctccacgtagtacgtgccggactgggcccgcgtgaggtcggtcagggtcagggtcggcgcgttgtcgcccaccggtaccggcgggttaccggagccgtcatcgaacatccacgtgaactgcagcgggtacacgccacccgtgacggccacggtgaacgtggcgctgccgcccgccggcgcctgggtcgattgcggctgcccggtgatctggatcagcggctggctgaccagggtcaactgcgcgggttgtgatgtcacggtacgcgcttcgtccgtgatctcaacccagtataccccttccatgttcgcctgcaggttcgtcaggaacaggtagggctggctggtgcccacgttcaccggacccgagccgtcgtcgaacttccactggtaagtgatcgcgccttctccgccggtggtctgcacggcgaatacccacgacgcgccgatcttggccgtgccgccctggggctgcgcggtaatggtcaacgccggcggcggcgtcaccgtgatcacggcgggcgaggaggttacctggtcgttgtagccgtcatagaccaccacgtcgtaggcccccgcatccgcgtactgcaggttgttgagcgccagggcccacgtctgcggctgctgctcgacgggcagcggcacgccgtccttgcgccacaggtaggtccggccgggcgcgccacccgtgacggccacggccagcgtggtgctggtgaagcgctcgaagctgccgccctggggctgcgtggtgatcaccagccgcggatagaccgtcagggtggccggatcagattgtacctcggcgggaggcgcgtagttgtcggtcaccacgcaacggtaggagcccgcgcgggacgccaggggcgcgttcagggtaagggtcggaccgttcggctgttccgccgggggcagcggcgtgccgtctttcagccacgtgtacgcgtacggcggcgtgccaccctgggccgtgacgctgaacacggcctggggttcgtctgcgtacgcgatcaccgaaaccggctgcgcggcgatggccagcggcgtggtcaccgtgagtaccgcccccgcgctggtcacctgcccgaataccggcacgccaagggcgtccgtgataaccacatcgtaggtgcccgcgtccgccggggtaaccggacccagggcaaggtacggcaggctgggctttccaaggctcacgccatccttgcgccagtcgtaactcaacggcgggtagccacccgtggcggccacggtgaacaccacgttacccccctgcacgatcgacgcgctctggggctgcgtcgtgatgctcaccggcgcattgaccgtgaccggcacgggcggatcggtcaccaccacctggcccacgccgtcggtgacttcgagggtatactgcccggcgtgcgaggccagcaccgggttaaccgtgaaggtgtactggtcccagccgctcgtcacggtaaggccattgcgtcgccaccgcgtcacccggggcgtcgcgccaccgctgacggttgcggtcagcgtgaaggaggcgccaaggtaggtgttgatctgcgactcgttgatggacgcctgcaactgggtatacgccaacacgttgcgtcccgcgggaacggtcgtggaccatacctgtcccggggccatcgtgccgatcacgaagggatcgcaaccgtccacgaaaatagtcacgttgtcctgaactgttgcgccattgttggtcacgaaaatctggtcgaacccgttgaacggcgaattggcgttccgcagggccaccacttcaatggttggggaacccagccggttggccaggtaggtggtctggttccagaagcccggcttcaggaacccgccggtggccaccgtgttgttcgccaggtctccctgcaggggcacctggatcgattcgtcgtacggcgcggaggcgcgcaacacgctgttgttggtggcgtagcccagcaggtagtcatcgctgaacaccggcaggggcggactggtcatgttgctgataatcgttgcccgacctttataggtgtcggaggtgttggcggtgtgattgttgcattcgatatatccactgtcggccagcaccaccgacccgtgcaacttgaccatgcccggcgtgcccaggccaccgggcgcaccattgccaccgcttccaccggaaccgccggggccgccaatgccgccccgtccaccgcgggtaccgtttccgcccgccccaccattgttcgcttgaggccagcatccataaaacgtcacccaatatacccccgtggcgcctcccgcgcctccggatccattctgccagttgttgcccggatccgtgccgccattgccggcaaggcccgcgttccccacggccccggcgcccggcgcggatgaggaaatattcacggttcccccgaaccgcagaatccccctggcggccagcaccgccacgccaccgccattcccgccggcaccccccgcgccgccgttgcctcccgcgccgccgttgccgccattcccgccggcgccccccgcgccgccattcccgccgttgccgccgttaccatctatcgggacgttacactgggcaacccaggagttgtacgcaaggccaccaccgccaccccccgcgccactggatccaccgccacccttgccgccgccctggccaccggcccccccaccaccaccaccgccaccaccacccccgtgacccgccgcgagcccaagggtgttggccgccaccgtgaatgaagcgggcgtacccgggctgccatggctacccgacccgccctgcgcgccggcactgccatttccaccatcgacaccgtccgcccacgcgttacctccaggatatccgctattcggcccaagttgtggatcaccgccgccgccgttacccccggaggtcacgccacccgcgccaccgttggtcacgctctggggcgagccgccacttcctcgcgcgcccccgacaccggcggtacccatggagccgaatcccaatgaaccatttccgcccgtgccgccctgttgtcccgcgttccccgcggccccggaagcaccgtcagagccgctgttcctgcccgcgccgtgggctcccttccccagcacgccatctacccacatgccaatgttccccccggctccaccgggcgcgagcgcgccccccgcgccgttactgcttccgcccgctccaccggcgcccccgctaccggccgaacctccggcgccccccgcgccaccgcccgcgcgacccgccaccgcgccggacacgtccagcgtggtgttccaggtcatgtcgccggaagcggccagtaccagcggccggttgcccgtgacggacacggtcacgccattactcacggacacgttacggaagttgaacttggccacgtttccggcactggtgctgagaatctgtccgtataccgccgggctggatcccgcctgcaggaagggtggggtcgtgccggtattgatggtcaccgatccggaggaaacggtaagatcgcccagcgatccgtcactgaggtaaatgtcgccgtccgataccgggccgccaggatactcaaaggtgtatgcgttgtccgcgccatccaggtatgaagccggaagagaagatcgacccatggcgtccgttgccgcgcccgccggaatctgcacggagacggtaatggtctgggtccggctgacgagcagggagaacgaatacgacgcgccgcttcccgcgaagttggtcacccacgccgtgccctggccgctttgaaccaggacgatcaggtcgtccgccgtgaaacccgacacgtccttgttgaacaccacgtcaaaggtaaccgaggtctgggtggttggttcaggaacacgcggcgtaatcgtggcaacgggatcgttgcggtcgatgaggtaggtctgaccggttgtgaaggcgccgttgttcgcgccttcgccacccagctggttccagtttttatcgtaaatggaaccgtcgtccagcaggttcagccccagggtaccattgggggcgccggaaatatccacgcgcaccgtgcgggtcgccgtgtcatcgttcccttccacggcagtgatggaggccccggacgccgaagagccggtcagggcgaaatccgagacgtccacgccccgcaccgcttcgttgaaggtcaccacgaacgtgacctcgttcgcctcggtcggcgacgggttcccgcggttgatagacagcgcgacgggcgcggaagtatcggtcagccagccgttcaggaattgcatgacggcattgttgaacagggttttgtagccctggtcgttgagatgaatcggatcccggtaattcttgttcgcctctggcttgttcatctgcatcggggcggtgccgtaggaaatatccccgcccgccatgggcgtgtacgcggggtagtaacccgggaacggcgtggtacccgggttgaaaatggtcccgagcgagttggtgtacccgttcgcgtagtgattcgcgccgaaattgttcaggaagtcccagcggggcgtggccagggcgacattcttgttccgcgtgcccatgcccacgaagaactggttaatgacctggttgttcgccttgttctgccagatgtcccccacggtgaacccaagacctgccgcgaagtacacggagttccaggagaattcctgcatcccgtaggtacaggtctcggtgatgttcaggtagtcgtagccgatgtgcaggattttcttggtgggatgattggtccggaaccagttgaccagcgtttccaggtcttgctggatagagtcatacagggcttcggtctgtgccggcgtccagtcggcccgccaggaccacatgtcattaccggtgatggacaggcagatgatatcgatggtcggccactgggccagcgaccagttgatccggtccagcaggggcatgttggtgtagcccggtggcgaaggaaaactgctctcaggaggcacggcgttgttggcccacatgtccaccgtggatccgccgatagccgtgtaggtgccctccacctcgtaagtgcccgcgccgtaattgtagttgagcaccgactggtaggatcccatgttccagggccactgcgcccaactgtcgcccaccagcaggatgcgctttacggcaaaggcgtctggcgataacaccagcaccgccagggcgcacacacagaaaaggaaagttatcccgcgatcatgaccgtgcctgctcatggccatctcctaggttatcgttgactataaagagtctagcacaacttggagaaaaagtcaagcgataatttgcacgaggcacaacttggccaccagtttcagcataagcaccaattaacaataggttgaatcattgaccgggcgtatcctcttcagcgccggaaccataacagggcaaggtaaccgatgccgttaaccagcacgataaccggcccggacggcaaattccacaggtaactggcggccatccccagcacgccgcaggttaccgagtacgccacgcccatcaccatcacgctgtccagtcgccgggccattcgggccgccgccgccgccggcagcgtcagcagtgcgatggatagcactacccccgccaccacggtcagcgccaccacggtcagcgccaccaggatcagcaggacactgtaatatcgttccgcgggtagtccccgcaaccgggcatactccgtatcgaaacatagcgcgaggaagggctgaaaataccacccgacggttcccaggatcaccaggtccagcccggccatgatcccgatctcccggggcccggccatgagaatgttgccgaacaggtatgccgagagatcgcggctgtacccgggggtcaggtacagcaacaggatgcccacggccattcccgtggaccacatcaggccgatcagcgtgtcttcccgttcccgccaccgctgcgccacccaggcgatcagcagggccgacaggatggccgcggtcaccgcgccccagagcggatgcagccacgtccatccccgggtggcccgcaggtattccgccgcgccaatgccaccgagggcggcatgggcaatcccaccggcgatgtagcccagccggcgggtgaccacgtaggcgcccaccgtgccccccgctaccccggcaagggtcagcgccgccagcgcgtgtcggaagatcaccgatcccgccatggtcgccagcacttcaatcatgatccgcgagccctccccccgtcatgtgccgcaacaggccgctgtccatgtgagcgacccggtgatggtgaatcgtgcgatgcacgcagtacaccgcttccagaaagcgttccgccacttccacgtcatgggtgaccagcaccatcgcgcggtcccgccgggtggtctccagcaggtccagcagcgcggcccgcgaggccgggtccactgcggccgtcggttcatccaggaacaggatttccgggttgcttaccagggcccgggcgatcagggtccgctgctgctgtccccccgacagttcaccaaaggatttacgggccaggtccgcgatgcccgccgtttccagggcatgaaacacccgttcccgccgcgcgtgccggttgccggccccaggatggttcagcagtcccatccctaccacttcctggaccgtgatgggaaacagcgtgtcacactgtagccgttgcggcacgtaaccggcccgcgggcgggtttgctccggaggccctcccagcaggaacaccatgccccgccggggttccagcaggcccagcatgagcttcagcaacgtggtctttccgccaccgttgggccctaccagcgtcacgcaacctccccgcggcacgaccagggaaatgtccacgaggatcggttcacgccgctcgtacgcgaaggtgacgttccggacctccgccgccgcggactcaccccgcgggtccgccgcgactggcgcaggcatggttgaagtgctcacagcgtatcccccggtttatttttgtgcccccattataaggttcgcgaggcgcgtcacggcgcggcgggggcaaaactttcacgtgtcgcctgggccagggcgcgaatcgcttcgggatagtccggacggttcaggttgacttccaggacccgcaggttcaactgtcgcgccagagccttcatttcggacgcggggtaccctggctgggtgatcagggcggtgacgcccgacgcgcctatttcccgggctaacgcgtccaggtcccgcgcccccggggttttcccatgctgctccacggcccgctcaaccaggccgtaccggcgggcaaaccatcccgtttccgggtggaacacgtaatatggtcttcctttaacaggctcgagcatgccggcaatctccgtgtccagttgctgcaggtcccggcggacggtttccagtttttcccggatgctgtcagcctgttcgggcaggtgtcgcgacagcacctcggcaatccgttccgcggcacagatcatggcctggggatccgtccagaaatgagggtctccgtccccatgatcgtggccatggtcatgggcttccccaccgtggagatcctggcgcggctccccatggtcctcttcgggtttcgtgtcgcgcgcctcctccggcgcgatctggggcgggggaatcttttcggttaccgcgtccagcaggcacacggcctccagggaagggttcaacccccgcaaccgttcaatcaacggttcttcgaagggcatgccggactcaaagtaaaccgccgcccgggccagggtatccatgtgtcccggggcgggttcccaggtttcgtgattctgtccggggggaaccacggtgacggcgcgcgccgcgtcacttcccaacgtggagaccagccagttaagcggcgccacggtaacggcgataacgagtggtcctgttccggaatcttcctgtgactctgtagttctggttttcgggtcaccagagcatccggtcacgacgaggcacattgcggcgatcccgaccatactactcagaatccaccggccagtcagcatgagtcttaccgcggaaaccatgtcatgctccttagcattgaaccagcctgttaatgataaatcattatcatttttcttcgcaactttgttgtgatccccccctggaatcctgtaaactggtctgttctatgatccctgttgtatgtcctcattgcggccttcgcatcctggttccccccaccgttcaagggaaaaaaggggtatgcttcggatgcgggcacctgctggtagtacccgacgagccccgggctggaaccacccagtacgccccgggcgacatcgtgtccgggcgataccgcctggtggaaaaagtcggggaaggtggcatgggcatcgtgttccgggctcacgatggcctgaccggtgaggaagttgccctgaagttcatgcatcccgccctgctggccaccgaaaaggccctgcggatgtttctgcaggaggcccaagtatcccggaaactccggcacgaacacatcatcgccgtccatgacatcaactttactcctgacggcgtgccgtacatctccatggaatttgcccggggacgttccctgcgcaagacgctcaacgagtaccgcaaggccaggcgctacccggaagtacgtttcgccttgcgggtgacggaccagatcctggcggccctcgactacgcccacaggctggtggtccaccgggatatcaagcccgaaaacatcttcgtggaaccgaacgaacgggtgaaactgttggattttggcctggctcgggccctcgaggaactggaaaaagaccagggaacccggaagaaacgggtggttgggacgctggcctacgcgtccccggaacagaaggccttcaagccggtaacggccgcgtcagacctgtacgctgtgggcctcgtgctccgggaaatgctgacgttacggacgcccctcgaggacaatccgcccgtggagcagctccgccaggacgtggcgccatcgctgctggaaaccctccggcgcgccctagcggaggatcccgacgcgcgttggccttcggcggcggctttccgagaggcgctcagtcgcgcgtggtccgcctatcgcccgccggaggtgatcacacccgccacggacgcgcgtccggatgtggccgcccgcaaggcggacacgtccggcatggtgttcctcagtgggggccgttttctcatgggtaataacgcggtgcgggaacaggccccggaattcgaagccgaagtgggaccattctggatggatatccatcccgttaccgtcgcccagtacgcccggtatctcagggaaaccggcgcttccgagccccggttctggcgggacgcgctgttcaacggtcctgaccagcccgtggtcggcgtgtcatggcgggaggccctggcctatgcccgctgggcgggcaagaccctgccgaccgaagcgcagtgggaattcgccgcccggggttttgagaaccggcggtacccgtggggcaacacccctccgaatccatccctgtgtaactttggggatcacctgggcatgcccagcgtggtgttcctgcacgaggagggacagacaccggaaggtatcgtggacctggcgggcaacgtctacgaatggacaatggatccgttcgttccctatgaactcgcgttacgggatctggaatcggctgcgaagtacccgcaacgggcggtccgggggggctgctggaactcgcccccggaagaactgctgaccacgtttcgccggggatttttccctgaatcccgggaaaacaccctgggattccgctgcgtgatcccggttgacgccccgaccgtcttccccgaaccgcgtcgccgttgacgttctggccgtcttccgagtcaggatatgccgtcccagggcggtggagggttatcgttcccggcgcaggctttttaccagttccagcaggcgtccttccacgcgatcgtatcgcagcacccccttcggatcgattactaccgtttcgggaatgaaccggatgccatatgccgagaaggttttcgagggttcggcgtccaggccgaccgggaagcggatgccctggcgggtcaggaagtaatccagtgcctcggcatcttcactggcatcgtgcaccgtcaggataacgacatcttccacgtcgcggtacaggtcatacagggcttgcatctcatacaaacggtccagcccctgcggactgtcgtcgaacatgccccagaaggtgacgacggtcacgcgtccgcccagggttgtggccttttccggctgaatgttgaaccatcgggaacattccagggcgggcgcgggtcgccccagtttacttttcaggtcgttctggccgggaatggggggacggttttccagctcgggttggaaaggttccagtgccagttcgacctcgccctgctggtcgaggttgaccgtgaagtcccgacgcaacatgcgcagcgcgtgctccacccggaacgtggcccggttgttctcgggctgataccccagcgcgatactgaaacgcccttgcgagtcggtgaccgcccgcgccaccggttcgagcgaaagcgaggagaccagcgccaggggaggatcggtcacgccatccgggaggcggacgcgcccggtaatcacgggtaacggcaacagcaccaccggtggaatattcatttcggtggccgattcgaaccgcgtgggaatgaccggaagggcccgggtacgcagtcccgctggcggctgcacgatcacgtctccttccggcgcgccgacgtggagggtgaaatgtccttccaggtccgacagggactcggcaagttccaggtcacccttgcggaacaccagccgggccagcggcacgggttttccggacgcgtcctggacctgtccccgcagggtgcgggtttccggcagggagaagttcacggtggcgtcgctggcggacaggtccaccgccacgggctcgggatccgcgcggtccccatgccccaggcatgccgcgtagtacgatcccggcggaacccgcagcgagaaataaccctcgggatcagtgagaccctcggccagcacgatcgttccacccacgccaggctggaaaacccgaacccgcatacccgcgaccccctggtttccgtccgtgacccgtccgcgcagggtattgccgggttccatttgcgcgtggttgcggtgaccttcccgaacgggcaggtaatttaccatcgtgtccgcgtatttcagatgtcccagcacgacccgcgcgtgatccacgggtggcaacgcgtcaatggtaatgacgccgtcgtcatcagcccgcatgggggggaagcccaggggcgcgtaatcttccacggtgatggtatacagtcctcctggcgacagggccttgatccatgcgccgggcaggggcttgaaggcctcgtcggttatccgcagatccatccgacggcgttccgggcttatcacgagggtcaggtcccggtccggcaacgggagaccgttccaccccgcgaaggagaaaccctccgccagggtgaccacttccatgggcgcgaaacgaagcccgtcaaaagcaaagcgcccttcacgatccgttcgcgtcacccgggccatgcggaactgtccggaccatacctgtgctcccgccacgggaatgccggacgggtcggtaaccacgccgcgcagcgtgatgccatccgcgacggccaggcaggtgacgccccacgcgatcagcagcagaaaaccagtgcctcgcagcttttccggattcatcgtgcggcttcccggaccaggaacaggggtggcaggcccgccgtgaccacgacagtctggccttggcggtccaacaggatggtgtccacgccggggggcaacgttccggccggcagggtgggcaggatccgaactgccgcgcccgcgtccgcgcgccctgtcgcgtcggcagccacggcgccctggatgtccggcacgacgcggcatactgccgccagggtctccgtccacgccgtcagggtggaggcgtcacccagcgcgaccaccagggcggggccctggatgtgttcccgcaatcgcgcggcaagaacctcagggggcaccggagacgccgcctggcggccgccgcccgctagcgttccggcgggcagttccagggattgcccgggagcggcgttgatgtcccccaggacgagttccgtgccatccgctgccagcgccaccacccgttgtggaatgccgggcaccaccgccggccaggcaaatccgccggacgcgtcggtgaccgcgcgccacaacaccagcggttcttcaagtccttccgcgccgtataccgcgccaacggtcacgcctgcggcgggagaaccatccggcaggagcaccttcccccggacatgggcgcagggcagcaaccggaccaggttgtttttgggccgggcacgatccagggcgaacagggcggcctgccgttccgtggggtgccaggccatggcggtgaccttgccgctctcgggcatccggtttacccggaatcgcgcggtgccgtccgcgtccgcgatgacccagcctaactgccgcggttcgagcggggccaccaccgccccggccacgggcttttgatcgtcgtccaccaccaggcgggtttcgaattcgggcaggggagcgagccacacgcccggcagggccacgttctgcccggacgggaccatgacccgtacagccctgggttccggtggcaggtatccgggggtcccttcaaagtagacgacgttctcgccctccgaagccgttaccttgaacgcgccccgggcgtccgtgcgcgcgatggccgcggtgaatccgccgcactccacccgcacccgcgcgccctcgaccggcgcgcccgtgatcgcgtccgccagggagcccgatatggatcccgcccggctcaccggcaggcgcaaacgggtttcgggggtttccccggtaatcgtgatttcctgccagccgggactcagtcggtctgttgcctcggcccgggccaggtagacaccggggttcaggcgcgtcatgaacaggccctgggtatccgtctccagggacacggtatcgtggggcgggcttgcgttgcgcagggtaacccgggccccggcgacccggctctgcagggcccggtcgaccacttcgcccgagaccagcacgcccggtgaaagcgtcacggtcacggtttcaccgaccgggcgggcaggcgtggcggtctgcgcgtgggagggatgggccagtttcagcgctaccaggcttcccgccgggagtcccggaacggtgaagcgtccgctggcgtccgaccggatgtccccaaaacccaggcccgataattttgaaaaggggatgcccaccttgaacggctcggtcacggccgcccggagcaccacggcatccgcgacgggttttccttttgagtccacgacctgtcccgacagggtgacggcaggtcgcaacaccagccggacgtcgtttaccgattcgcccgggctcaagttcaggtgccggccggtccatccgaatcccggcgcgatggccagcaggcctatcggtccgacgtatggccctgagaacgcgaattgtccggaagggtcaggatgggtttcttccagggcgccgtcgatgcccggctccaggaaaatccggacgccggtgaaatcctgccggctatccggaaaggccaccaccccggagacccggctctcctgggaccaggcatgccacgcgagcagcgcgatggccgcgcccgtgaacagaacccccgtgtgtctgacattcacggtttcttctccatggttctgccggcccgtaaagcgtagagcgcgccatggatccggcgggcggcttccgtcagttccgggtatggcaagtccacgaccgataccaggccgatgttgtaattctctccgtcgtaccagcggccggtgataggttcatcaataaactggaaccagtgcgtgccgacgatcttgggatgcgtggccgcttcgcgcaggtaattttcatacagggccgcccgttcttcctgggatgccgcggctaccaggcccgtgtggaacatgccgcggtccagcgcgccgaaatgaaactcgccgatgacgactggcttgtcgatgttttccatgatcttcggaagcgccggggtcttctggtaaatattaaacgacaacacgtccgcgaattccgccgcggcctggacggccgcgtcctccacccacgcgaaccggcaacccaggtaaagggtacccggcgcgtgccggtccatggcttcccggattacccggaagtagacacgcgcgaagtccagcaggaacgcgtccaggtcgtcgcgacaggtcttgttgattcgccggggcttggacagggaggtccagtcggtgaaatcggtctgccaggcggcattcagggcgtcgagggatccgtaccgttcccgcagcaggcggaccagggcttcccgcgcgggctgttgttccggactggccagcacgccgtagcggacgccttcccaggccagttcgttgtccacgaagaaccccaggcacaggggattggcggcgtgatcccgggccagttgttccacccgctcattgaccagttccgcaaacttcgggtggtacgggtcgtacatttttccccagtaccccgtggcgccctcgactaccggcgccccccccaggctggtgcccgcgacatagggaatgccatgccgcgccgccacgcgccagtcgctccagttggcaaccgtgttgaagccccagtgcctgaggcgtttaccggtgatctcggcccagcgttcccgccagttttctccgtaccgccgccacagattgcacgagaagaaatcaaaggtgcggcccgcgccgccaatgggctcggcgtgactgtgggcgccgctggcccgggagtagaacgcggcttctggttctccttcggctggcagccattcaaaccagggctcccgcttttcgacgaaggtgtaatcacccagtcgcacgcagttcactccggcgctgaaaaacaacgtgccgtccggcgtgaccagccaccatttcccgtccactttttccacgtggaaccgccccgtcgcctcgaggcggggaccatctatccatccgccgaaccggtcccgtcccggtacttccggggcggtggcccaggcggcctgttcttcggcttcccgggttttccactggttcgggtcgattaacttgcctggccagtcggcgtgtcgatactggccgaagcgatccacgaaaggcaatgcagccgggtgcgcccccccggctgcccggaacagttcaatcggcccgatcaccaggcggtgcggctggtctggtttgtggagaaaaacctggaaagcgacaatccgcgcgaggtcgatggccgtcccctccgccagttgggacaatccgggcaggccgcgcatgccccagagattgtccgtttccggggtgcgaaactgcataaccagcgtggcggattggcccggacccagcgagagggtccgcgtgttactgagggattgtccgtccgcgccggggttgtctaccctcaggccgacgcgacagggtcgctgttcaaggttccgcagggaaacccgcatgccttcccagtggctccagtcccacgggtcgctcgacgcggtaaaaagcaactggggccagtccacgggatcgaaacggacccgtagtcctggtccgttctccgccggtccctccgcggctgtcccgtggaactggcattcccgggcaggggcggatgcattccagagaacaaaggtttccggcgcggcggtgtctccatgactccacggtcccggggacaggcatcccacgcccacgcatatcatcgtgacggttcgccggagggtttgtcgcatgccggtatccttgcagagctccagttgaagtccgggatcatcttaccattccgggttggaccgcttcccccgcgcgacgtcccgggaagttgtcgccgcgcgcctggacggcatatggtattgcccatgaacgcctccaccaggatgccccgggcatgggatgtggaatgttacgcgtgcggcgcgcgcgaccgggttcccatgcccatggagccggccaggtgctcccgctgtggcacgcccatggggttaagcccctcggtcccggccccggcggatctgtttgaccaggatccccggtccatgtgggactacgcgtctctcctgccggtacgggatccggcgggcgtggtgacccttggcgaaggggcaacgcccctggtgcccgcgccccggctcgggcggcggctcgggcttgccgagttacgcgtcaagaacgaggcggccaatcccacgggatccttcaaggatcgacaggtgtccgtgggggtttcctgtgcccgcgaagcgggataccgggtggccgccgtggtgtcctcgggtaatgtcggcgtggcaaccgcggcgtattgcgcccgggcgggcatgcgggccgtgctgttcatgcatgcccatgccggtgccggcaagatcgcccaggcggcggcctgcggggcgcgggtgttccgcgtggcctgtccgtcgcccgaccgggtatttaccctgtgccgtgaggcctgcgcgcggttcggctgggcccacctgtccacggcggggatctacgcgcccgccaatgtcgagggcgcgcggaccatcgcctacgaactctggcggcagtatgacggtaggttgccggactggatcgtggtgcccgtgggggggggaggcctgctgggaggcatctggcgcgggctgctcgacctgcgacgcgcgggaaagatcgatcggctgcccaggctggccgggattcaggccgccgggtgcgcccccctggtcagggccctgcgcgagggatggacgccgctcgaggccctgtcccgcccatggcctcacccggaaaccattgccggaggcatagcggacgacatcctgttcgacgcgcacaccgtgctgcccgccctgcgcgacaccgacggcgtggcgctcgacgttaccgaccaggccatccgcgaagccgccctggccttggcgcgcgaagaagggctgatggcggaaccaaccgccgcggcggcgtttgccgcgttgtcccggctggccgcgatgttcccgggatcgcgggtctgctgcctgctgaccggtcacggcctgaaagacttgccctttttcgcggaacatgccgcggcgcccatctatataccgccggagttcgacgcgctggaaggcgcgctgcgggaagccggcgaaccgtgacggggagcgcgcgcgccggagcgggacgcaaaaagatggaacggtgctgaaacgttggcctcgagaaggagccgtcatgaagatccgttttttgtattttgagggctgtcccaacagccggcccgccctggaacgccttgaaaccgtgatcagggaagcgggaatcgacggtccgatcgaaatggtcgaggtgaccagtcccgggcaggccgttcaggaacggttcctgggctcccccagcatccaggtcaacgggcgggacatcgaatccgcccgcgcggaggatccgccttttttcggctgccgggtttacctgggtgaccacggtccatccggcatccccccggtcgaactgatccgcttggctctccgcgaagccatggaaccgtccctgtcccctcccgaccgtgaagcgtgacaggcatgggagcggtcatcccgcgccgccctgcgcggaaacggtttgccccttcacgacaacgcgcgtgcaaccgtagggtgctttatggtttcggttgacctggtccccggggcttgacccggtagcctggcgcgggcagggtgggcgcggcaacctcgggagcgcgctcgcggacgggggtagtgccgggtgatccgccaggccgtcctggtaccctggatggcctgatgtttccggtgcaggccggattgcttgtggcggcttcggcaggattgcgcgacccggtcgtggacacggcagtttgtcgcggcgtggcatggatcgagcggacgtacgccttgtgctgccgggcggtcttccacccagggctcagccgtttttcccggatagcggattcgatagcgtcgaccgtgtccttgtcgatcaggaccgcccgatgttttctgatgtaccgcacgcaactgaggggctgggttacataatccggcagtttatcgcgcgtcttaagcgtgcagtcgcccgtgaaaaccaccacggatttaaccaggtcgccgggaagatccaggagcgatttcaggcattccgtgtgcttgtaattctggcgcaacggattctgaaatttctgcttgtggcgcttgtggatcatctgggtccacgtcggttgctgtgggtcgccgaatatccagcctttgtagtgcttggtttccacgacgaaaatgccgtagggcgagacaataacgtgatcgatctgcgtggtgcctccctggttatccgggatggtgacgttgttaatgacccggtaggatgtttctggcaggaacaggctgaactggagacgcatgagggtctcgccgatccagccctttaccccgggcaatcgaccgataaaggtcaggatgaccattgctcccaccgtaagcagcaacaggggatgctgctgaaacatggagacgaacggcaaaaatttcacgagttgatcggggttcatgggctgctcactccgggccctcgaaaaagtctcgatctatggatttcaacacgtaggtggcttttgcgaaaactcccacgttgtagtcaaccatgaggcgcgccagggtcttgccatccaccagcacgactttcagattcagggttttcacgtagtccctggcctcctggctgaaagtagacgtcgtgataaacacccctttttgggcgtgtttgccgtgcagggcacccacgaaccgctggatttcaggacggcctacggggctggtccaccgtttcgcttggatgtagatcacgtccagcccgagtttgtcctcgttgatgatgccatcgatgccctcgtccccggatccgccggtcacggatcccgctgtggtcagtcccttgccgtatcccattgccagaagcaactgtgtcaccaggtgttcaaagaatgctggcggcatctccttcactttttccagtagatcgtcactcagcgattccaggtgtcgggcataagccgattcaatcatttcctccggtgtttcctcgcgtgggctttccgtttctttagtttggccatttttagaaagcctccgggaacgcgccataaattctcgaaactcctcgaactgcttcaggtattcggtggtaattctgtctggcgggtcagagagagcctgcaggcccctaggcgtgatttgtatgatgcccttaccggtggattgcagcagggccgccttcccgagatatgtgcgcgcccaacgtacccgattatcgaacacccgccggtcgctggaaaaccgccgctcccgttcttccgctgtcagatgaaactgatcagccaggatgtcttgacattggtgtagcgtccgcgctgttccatcccccatcagtttgagaaggggaagcatgatatcactaaatgttggaatagccacgccattacctccggtcattgaacttcgtcacagtataaaacacccctcccggtcggtggaacaccatgtaacgcgcgcttcctggcaaagtcgcgcgtggtatgggagagcggcttttccctggtggctggaggcgcgaagcgacgttgttcatcgggaggagggctttcccggacgggtgcggattgcatcatcaagcaccagcgcgcgggacgatcaaggatgtgtcggcgaatccggttcgattcatcttcgtcgcggatgacgcgtccgtaatcatggacttgccaggttgggctccgggcgtgccccgcggagcgttgatgtgtctagtaacggcggattggaacgcgggacgatgggggaatggaaccgtatacgggggcaccaaattgttcttcggggacgtgggcacggggcgccatgctcctgcaacctcgtcattattcacaaacgattgatgtgtggcgcggcagggtggccatgaaggactgctcgtctgcggttccggccaagtcaaacccgacggaatttttacctggcacctgtcccccaaatgggaataacttaatggcggcgagatggctgggaatgccgtgaatatcggccgaaaaggcgacgccccggaaaggaatactctccggggcgctgcgtcaaccaatcaaccgcgcaaattacgcggaaaatacctggctccccgagtgcaaccctcttcataaccactctccactgccaggatatcacctaacccattgatacacaatatcttttcaaagagcagcacatccccgagggggcggaaacggccttgattcggatttcctcccgtccggcctgagccggatgtcgcaagccgtgtcgcaagtttgtcgcaagcatgggatgtcacagctccgtgtcacagcttgtcacagctccaaccgggtcgctacatcctcgtaatccgggtcctcggcgtagagcttctcgatctcgctgcgtgcccgccggcgctggccgaggtcctcgtagaccagggcccgttcgtacctgagcgcccggagcagctcctcggagcggcccttcttccggcgcagggcgccggtcaaggtctcccgcgctgcgtccggaagtccgagcccgcgcagggccctggccttgtacagcagcagcgcggtgtggaccgggctctcgttctcgatgccctcggtcaaccgcacgatcttccggcagacgttcttgtcgcccgggcgggcgtccaacagcagctccgcgagggacagcttcaccaccacgtcgtcgggttcgagccgccgcaagcgctccaggcaggcaatcgcatcctcccagcgctcctgacgctgatagacctccaccaggcccaacagcacgccgcggagatccgggcccacatgcgcggacacctcgtctgtaatggggaggctcatggtggcggagatgccgtacttggagaagtagcggcccaggcggctgtgtttctcggcggccgtcgccaggtagttcgcagcttcttccagccgctccttcttgagcgccaggaaaccggcgaggtacgcgccgtcggccaggtgagtcgcctgttcaaggtactgaagcgccttgtcctcattccccagcaccaactcccggcacccgtccaccagggcctcctcgtcgtccggcgtgataagccgcttgaagaagcccagggtcaggcggtcttccgggtggaccgttgggagggccggagcggagtaggacgcgcttctcctaccgctggatctcccactcggaaccgtggtcgtgtagaaaaggcctgttcccggaatgcccaccgtggcccgcttgcccctcggaccgatggtgaacttcgccccgcgcggcccgaacgagagtgacccgcctgacttgctcaggttcagggtcacgcccggtgcgatcctgattcgtctccagaagcggaagctcatccgaaacgtccctgttaccctttgggcggatgcggatccttgccgtatgtgtgttccgtctggatcgtaccgtcctgcttgtgaatgatcacctgtccaagcgcctgcttcttcgccaattccttggcacgggctatggcctcggccttggtgtcgtggctgctggacgcccttgacgcattttcctctttcacgttccagccgccgtcggtccgaggagtcacatggtaagtcttacgtcttggcatcgtctccatcctccttttgggtatttcatggtcttcgcgcactaaggttcggtgacagtctgcctaccaatgactccaatccgtttcctcaccggacaccgcgcgggccgaagaactcaatgcgtaccgtacttggttgtcgtccgacacgcgcatcgactatatcctctcgcgggcgttcgagaggagaacgaagccgtccaagcggtgtgaaatctggctgcaatacccatccaccaccttgtggatcggtagtggtctccacgatgacgtgagatcctggttcaggtggtgaggccgggtcgagccaatctacgtctaccgtctgcctggatcgactccatcgaactcgattaccttgcctgatcgtttcgatgaaacggagccaggtggagcgtccttcaggcgtcggccagtcttcctctctacttcgggtttggacttcgtcggattccagccagcccagcatccccgtcctatctacgaagttggcaccggtcgactcgacggccgccttggccacgtccctcgagttcagccccgaacgaagcaacgttatcaccgacgggttggcactccctgcttcaacggccattgcagcgagcccacgaatgttatctgcaccgtcatgtcctatcgtggtagcgtgtacgcgcacggcctccattgcccaggcgagtcggtacatcaccgcgtcctgaagaaagtcgataccttcctcacctccaatgtcgacgacttctgcagccggtcttccggaaatccaggcatggagcgcatcccgccaagcatctggcatcttggtgggtcgaaacggaaccgtttggaacaccagaccagcgaattgtacgatggcgtccgctgcactcgtctcgtcgctgccatcgatcatagtctctgctgcaaggagtgctccaaccagctcttccatgtgctcgtccaaaaaacgaccacctcgtagaccgagacccgcaacctggtagcccctccgttgtgccgttgtcgtgcgcgaccagatcaacctggccctcgctgcgaggaatcgacggatgagatcctggatgcgggcttcctgtcttgcgatctgccgagtaaagagagagccgtcgagcacgacatcgagctgtcgctcgatttcatcaatggctgtctcgacatcgaggagacccaatattgccgcatccagcgacgcggcatcacgttcccattcggactcggagacttcggtgcgctcacccacgagttccgtgtaatcccacgcttctccgtggccagttacgtattcgatgacctcctcaatcgagacatctgcagctcttgcgattcgctcgaaaagcaaagctgtaagacggagtaacccgctttcgatctcggaagccctcgcctgtgctacgagttcttcccattgttggatcacccaccttctcttcctttgattcctctcccatacgacatgaagcaccaatccttccaagtccacgaacgcccgtcccgcacggccggccacgtttgcgaactccactggtgagatcttctctccctgggtacgccatatcgatggaacgagaagcacgcttgcagacagattgagtccttgagcaagggtcggtgatgcgatggtcacacgacaatctcccgaccgtagcagccgttcgacctccgagaggaactgacgaggcaaacctccgtggtggagtgcgacaccgtattccaagcaccgaactgccggatgattcggcccaagccactcttttccagtggccatcacctcacggatacgcggcgtgacatccccgagccgcgaaagcactccttgacgtccacacttgagaatgagttttccgagagactccaccgagtctctgcgagcacaatagatcatgacgtccttaccatggccagcaaactgccatgccgtcgcaagtgtcaattcgttcttgttctggggaaaggtattcctcctcctcgaacctgacgggggaggtttggcttcaacgaatcgcgggacatacgactcctcttcctcgactcggacctgaagccgcgcagcgcgaccctcccattggatccatccgaatcgctgtcgggtcggtcgccattcggaatgtacgggttctccgggcctatcacgtcgaatccatgccaccaagtcggtcatcttctccgtctctgggaacaatgccgacaggcacacgatacgtcgatcacctgcgtcatctcgccggaggagacgctgcaccagggcctcgtaccgcacctcccgctccccgggcccgagcatgtgcccttcgtcgaggacgatcaaaccgacgtcgtcgatgatcgtcgggtcgtttcgaagagcgaagtccagtttctcgggtgtcgatacgacgatctccttcgtacgtagcgtgtctgcgtcagcggcttcgaccccggccgatccgtacaaggaagatacggggaaccccagaggaacgaaggtatcggagaggtcccgttcgacttgagcggacagcgctcgcaatggagtcacgtacacgacacgtttgccagccgccagagccctgaggatacagagctccgcaattcgcgtcttcccagcgctggtcggcaaggcgatgatcaggtcgtctgcgggatcaatggcgcgctcggctgccgtgatctgtgatggccagagttcgattgcagctcggctgtttctgcggaggcgatgaatgtagtctctccgcagtccgttccagcgttcatccggatgatcaggaggcagcttcgggagacgttcatggaggctgtgatcccagagctcgtcgatgagatgggcagcaagggtgaggatccaccagtgagggaccacatggaggtcggcggcggccgccgcccccgtcagtagtaattgcttggctcgatttgcagatgccgtggttccggtacgcaatgcgtgatcgaacaacgcgaggccacgcatgagtgacgtcgtcaggatgtcgtcgatcgcatcgtactcatcgtagtcgtcgtcggtctgcagacgttctgctaccgcagcatcacgatgtacctcgtccagcaaccatgtcgagagctgttcgtggagctcgtccagcgagcgccgcagcaatcgcgcgagagccagctcggagaatgatgtgtttgtttcgatggtaccatccggcagaatcgaataggcgcgagccgcatatcgagcaaggtgaaaggccactgcggcggtcacccgatgaaagccggaatcagtccgtcctggctccccttggtgaacggcactctcaatggcttcgcctgcgcataggaaagctcgtttgagatggggactgtccggggaaacacctcgcagccggagcgccatcgcaaggacggtgtgtccgaaatcgagcaggtcttccgtcagtgtcctggggaagcgaggggaccctggaggaagagcaccatcacgccagatgagcccgcgagccaatcccttgtccaagagccgatcgcggaaacctggggcgatcgctcgctggattcgggattcgagtattgcaaccggctctggcatctacagaccctcgtagatcgcttggatgaaatcacagtggtcatcgattcgcagacccactgcgtaacgccgtcttccgcttcggagcgcctcgaggtggttggacaagtgggcatcaggcgaattgccggagaacgtgaacagaaggtgctcgacttcacaactactgaagctgttcaaaacggcgttctcgagtagaacggccatttcgtccgcaccctgttctcgaagcctctccgcgacgaaaaggacggagtgacgacccggtcgtccatggtcctggtcgagcgcgtttgcagcctgttggacgatatcgggagtcagcctcgcgcggctcttggcttcccctttgagaaaagagagtctatcgtcctcatccctgcggaaggcaaccacgtcatccccccgcagcgccatctctctgccgtccttccaccggagccgtaggatgggcacttcgtaggcgagctttcgagtgacgaattccgttgcaaggatctcaccgaggtccccggaacgggagcccttcttggtgggaagatgttcccgaagcagctcagccgttttgtctgcgcccagttgctcgatccttgctgccatcgtctcaggggagacgtaatgacttcgtactacatttcgcaagtcatcgaggatcgcatcccttgctccatccttctcgcgaagcaggatcttccggtgacgccgaatggtccagtcgcggacctcaagccactcgtcgaagaaatctcccgaggaagatgtctcggtggcccgaccttccatatgtggcttcataccattcattcgccccgatccacttcaggcctgtgctatctctttcgtcatgatccgccgcccttcgccgctggcaggctttcctcgcggagcatgatcaagtcctggtcaaggccgtgtcgcagcacatcgagccgcccggagaccgcgaccagatgagccgcggaaacagggctcaggcggaacgggaacaggctcgtggaatcgaggaccgttctcaaagccaccgaagcgttgggatgagcgtgcaagaaggcctcggccaaccaggcgataacctccacctgagctatggcgagtgaaagcccagcggtatagatgcctttttccgatgtttccttcaggacctcccaatcgacgaagctccgcagcacccgtcgtgccgctctggataccgtgccgcgttccccatattgctcccgcacgcggcgctgtacctggctggctgcggccgttccctggagcctgagcagtcgccccacatgggccgctacggccccccagaacggataaaccgccatggccatgccccagtggaccgcgatatggtcctcacgcggcaggtgtgagagaagcttgaggccttcccgctgaaggggatggaggtcgcgcggggggcggacccagatcttcatcaggatggtgatcaccttctcccgattgccgcgtttggcattcccgccgacagacagcttgtcttcgaaaagctcttggagggcgttgtagatggacgcctcgtcgtttccggcaagcaccaggttggccgttctctccagccattcaagacggacccgctggctgaaaccgatctgggtcaggcgactgttcatcggtccctcctatcgatctggacaagagggacgagcagttcctcgacactaatgcctccatgaccgacgagggtttcacccgcccgcacaaaagcagcccggttcggagcgatgagggcgaggtagtcctctgggaggcccaccgagggccactccaaggactccgggaatcgctccttgatttgagccctgagcctgggatcggagtagacacgcacgcgctcgccgcgcaggtccgcaaccgccccttcggcaggccttcctgcgcctttcgcctcgatgtttccgtggtccgaagcaaggtagacctggaaaccgcggtcataaagcaggccgaaaaggtcccgcatgaaaccctgcctggcccattgccgaacctggttgtgcatgcccgccgcacccagctccatgccgtgcatgatccggtcgaccttgtcgatgaccaatccgacgacacgtagcctgggccggctcagtagctcggagaccttgtccaggtccccctcgcccagccccttggcgtaagccacctcatttgcgttgagcccctgatcgacccagaactgcgtccaaaggcccggctccttgtctgtggtatggatactcgttgggaagtagatcggtggcttgccggcaaaggcggcctgccgggaaaccgaggtgatggtgggaatccaggcgaaaacggcgctctcacggaaccgcagcttcgaatccagctctccgagcacctcgcgcaaggcgatccattggtccagggcgaggccgtccaccagcagaaaagcgatcttcgagcgccggtcgtctccgaggcttcgggcgaggaaccgcgggatgtgatgcagcatcaccggcggcgcgggcggaaggttgatcaggctcgcgtagcgcttcaccacccaaccggtgagcgcagaatcgatccgggatctcaatgcatctaggcgctcccggtatccttccggcagggtggtgtccggctcgagctccaaggcgacgagttccgcccaacggtaggcaaaatggagccactccccatgacgcgtctccaccgtggggatcgtcttctcgatggattccagcagcccctccacgcggcggcgacggttctccacgggggagactttgatgccgtaagccacccaggtcttggcgagcgcttgcgattgctcgtgaggaaccggctgtagcaaaccctcgaggaataggttgtcgatgaaaatgcggacatcgtggtggtcgaaaggcaaaagcgtcggtcctgggaactcgaagccggagtccgccgcgtcctcgtggacggcatcgtccttcggctttgcgagcgaatccaggaacaccggccagcgctcctgcaggaacgcaaagaatgcttgcgcgtccggaatgatggtctccagaggccaatcctcgaacaggccgttttgacgaagcacctggataaagcgctcatcgaggatggccgggattcgttgtccgcggtaatggcggcgcagcaagacccggagcaggtccgatggctgcttgatgagttccggcgcgatctcgaacacatgacgaaggacgaactccttcgtagcgttgtcgccgagctgccccggcgcgtgcttcgtctgcgcatcgaacaaggcgtcgagatcagcccggtcgagcgccgcgaccacggggtagctgagattcgggaagagatcgcccaggttgaacgagagcttgcggccagcctgcagcaggtcgtagggcaaggcatcgagatcgctcgacggcgatctcagcaccaccaccagatcggttttctcgccacggtcccagcgggagcggaacttggattcgtaggcatagcgaaaggcgacatgatcctcgaacgggatcagctcaaagccccgttcccggatcccttcgaggacaccttcttcaaggagcaggccatccggatccgcgaccagggtaagcctggcgacctggggtgtgaactcactcaggatttggtcacgccaactacccatgggcgcatccctccacgcggacgagaagcaggggcgccatttccggcaagatctgggccctgcgctcgagttgttccctgaagcgttcttcctcctgttccaagagactcaggcgatggttacggacctggggcagtccgatgcgctcgatggctctgcgtcgcgcagcgaaggcgtactcgcccttctcacgctcacgagcaagacgctcccggtgagcctgcaccagctcgtcgtagatcgtcttcccctgtcgttccgccgccccccggagttgatcgaaggcttgatgagaggtctcgatgtccaaatgccggaggatcgtgggcggagtggtcaccagttgatcccagatgtgccgggcggtcggcgcgaacacccgaccgtcgtcggccaggaacaagggcatgatccggcgacgattccagtcgacggtcgagatcgagattcgccagagcgaccagaaacccatgatctctggggcaaggccaggaagcgtgatgacagggaccggttgtcccggggcaaagggaggtaggcgcatggccagcccacgcaccttgggatcttccagcgtcaagtggcggctcaaaggcttctcttcagcctccttgctggtgaagacgacattggtcagtcgctcgccgttgggccaggtgagatcccaggcgccgttcttcctctcagccttgccgccgtgagcctgcaggtagcttaccgtcatgcgctccacccaatgcgggagcgggtgggccagcagccgctgggcctcgcgagggtccaggtcctcggtcgagccgagcacggaagcgctctgccgggactcccgggcctgctcctggatgcttttcaggacctcgtcgaccttcgtctccaccacatcgggattgaggatggcctccacatacagatcatcgaagatctggcccgcctgggcagagtcgagcacgtcaccggtcttgtcgatgccgaactcttcgaagatgaccgccaatttctcctccaggacctcgcggacacggtgctcgaccgaatcctcgaacacgaagttgatggcgcgcaccgtatgggtctggccgatgcggtccacccggccgatgcgctgctccagacgcatcgggttccaggggatgtcgtagttgatgaccacatgacagaactggaggttgagcccctcaccgccggcgtccgtcgagatgaggatgcgggcatccttggcgaatgcgtcctggacccgcttgcgctcctccaggtccatggagccgttgaggcacaccacctcgaagccacgctcggtcaggaactcgtacagcatctcctgggtcggcacgaactcggtgaacaccagcactttgagatccgggtcgccttcctccgcctggaggcggtagatccagtccaggagcgcttcagccttggcgtccgggccctggctttcgcagcgcttggccgcctccaggagcagcttcacctcggcccgttcattcttcagggccttgagacgtgttttgagcagggtgtccatctgctcctggccgtccaggtcggcccagtcctcctcggagaccatggggaagagtgtgagctgttcttggggcgcctcgagcgcttcgaggcgccgctccagggtggttcggatagcgcgggtgctggagaccaccaggcgctgcatcaggatcatgaggaatccgatgtagctgcgcttctcagtgatggcctggttgtagccttctcgcacgtattcggtgaccgcctcgtagagcagccgttgatcccggtggcgctccttccaggagaccggtgccagctccgtacgccggggtttgaaaagcggcttgccttccgcatcgatggcgcggcgcttctccgtgcggatgacatagggctgtacccggtccttagtgatgctcgcttcgtcgggaaacgcctccgcatcaaggagtgacatcaaccgccggtaatggtcggtcttgccctgatgcggcgtggcggagagcaggagcaggtagggcgctgcctcggccagcccctggccgagcttgtagcgggccacctggtccgtgctcccacccaggcgatgggcctcgtccacgatcaccaggtcccagccggcggagatcaggtcctcgaagcgctcccggttgtactcggccacctgttccctggaccagccgcgccggccgtccaggggcttcaccgaatccatggggcagaccacctgtggatggctctgccagaggttgtcttcctgggcgatgcggcggtaggcggagaagtcgctcgggatgagcaggcggaactcctccccgaagtgggtgcgcatctccgctacccattgggtcaccaggcccttcggggcgatcaccagcgttcgcctcaccaggccccggagcttgagctcccgcatgatgagacctgcctcaatggtcttgccgaggcccacctcgtccgccaggagatagcgcacgcggtcgttggaaatggccctggagagcgctcgaatctgatgcggcagcgggatgacggacgattcgatgggcgcaaggagaacgtcctgggtcagcgcatcggccacccgcgccgcggcggcgagataagcgatcccgtccacggtgccgacagttgcttcatgcactggccggaggcgcgcggcgggcaaccgcacgacggtatccttgcccggcagccagacacggcagacggtctcgccccagagcgtctgggtctcgatgacccggcagagctccccgtgctcgggggaatagaaccacgaattcacacgaatgggcaccaatggtccagcggcttcattggcaccaagatgttttgattcgtgttgattcgtgtccattcgtagtcccctcaaagcacaagccgctcccattcgagtttaggatgcttgaagttgaggatcagcccgacccgaagtcccgtgatcttcaagtaattgagaatctgcccgcgttccacatcggtaatacggtcaatcgtcttggcatccacgacgatcttaccgaatgcgatcaaatcgggaatataatcgcctaccttgactcccttgtaaatgacgtcgaagcgcggctgctgcttgtaaggaattcctctcaagcgaaattcaactacgagtgcattttcatagggcttttcaagcagtccatgcccgagcgtattgagcacctccatggcgcaaccaacgatctggaacacctcgtctttgaacaataatttgtgttcattcgtgtccattcgtggttctactcctcccccgttcgcgtgagcgcctggtcgtaccacatgaggagcttggggtcctcctggaggacgttctcggggatcttgcgcgccacggcgatgatggtggcgtagtcccgctcggcccatgccttcttgaagccggcgcggacggcctcgaggcggaagaccttcaggcgcttctgcttggattcgcggtactcctcgaactcgcgcagcagggcccgctcgcggagcttctccaggtcgccggccttgttcgggtccgggacgtaccagcgcgctttcgcgcgggttatgagttcctggttcctggtttctagttggccgttctcttccgtcgcgccgccagctgcgagttcttcttggatgatcttgcggaggttttcgctttgcttcatccacgcgacgatctgcgccgggatggggcctttgccgtcatacatcaggaagttctgttccagcagctcggagagctc

SEQ ID NO: 529 - DNA, 66308 bp, Artificial Sequence
  Synthetic Oligonucleotide
catttattatatgtgcggtcaaaacggttcatccccacgcgcgtggggattactgcggccaaccggaatgcggccgatagctcgtccggttcatccccacgcgcgtggggattacacagtattgtgttggtcgtgttcgtggatttttcggttcatccccacgcgcgtggggattaccacaacaaaatttgaggcggtcgctataatattcggttcatccccacgcgcgtggggattacgcgaaccggagagacttcagaacgctattgctcggttcatccccacgcgcgtggggattactcctaaattattgaagtatcgtatcggaacaaccggttcatccccacgcgcgtggggattacaattcaatgtcgaacgcgcggaattttaacgccggttcatccccacgcgcgtggggattacctcaacagttttgataaaattggagtgttcaacggttcatccccacgcgcgtggggattacccttcgtaatcattgaagttagatcacgaaaagggtgttaagtatcagtggcaactgcatcctctttaggaagatgctttacagcaaaccacaatccttctttttcctgaaaattccttgatgtatcgccattcgaccgcaacgaaaacccttgctcattgttgtcgttccagatttgaatgaccgctggtgttccacgacgacccacacaaagatcccaaagcttatcgcggactatcgcggaaacctttccgataaagacaccggtctttgcttcgaacagccatcgtgtcaattcaccgcgcaatgacgcaggaaccttctcaagaatcatcactaccatttgtcaattccttttccacttccggtgggttccaatacggagttggacgtgccgggtcttcatcgatatcccaaccgaaagattcgtcgtccaagttgaaatcaaacaaacggtcgatatcaggtaaaatacgttctaataatttgtactcgtggaagtaatctcgacagagatgccgcacccgactttccaagttgtcagtggattcctgtacgacgcgaaacgagagtgggatcgtcgtctcaaccttgtatagatcgccaatatcgtacacgaatgagagcgctttaccgacatggacgaaaccaagaccgggagtatagccgccactcacgatggcagtatggcacaacgaataaaggcaggcatttgctgccgaaagtgcgcgattgactggatcggaattctcccaatggttccggtcatagcttcgaccgacccactccacaccggtttcgttcgaggcaatcgcatacgcttcgcgtacacgaacaccttccattccccgaatttgttccaatgataaacccttcggtaatcgttttcggaaacgcatccggtacattcgaagcacgattcgttcgtgtgactcagggtcagcccacagtgccgcttgtcgttcgaggtgccctcctttccgggtttcaccgataccggtcgcataaaaccggatcgcgccttcacccgtccacaataccatacaaccattgtcagcaagcgctttcactgccgcgtgggtaatcgttgagccgggacccaacaacaatacaccaagtgaagcagcaggtacgggtatgattccttctttcgtccaaaccgcaatcgacatttcgtcttgttcgacccggcaatgttcgaagtatgcatacgataaaccatcacgtaatttaggtagggcacggagatcgttcattggtgatctccaattgggaagacagaaagtagaccaaatccgaatcccttcgccgatccaattcctgcatttatcgcagcatgaaattccatagcatcggtgacagtcagttttccttccaacaatgcagaacgaaagcgcatgacgtgttcgtcaccctttccgttcggttttttaccaactacccatcccaagttcacgacatcgcaactaccgacagaaaaacctttctgcgatcctttgcgagcaaaccaatcaaggatcgcatctgttggttttgtctctttgtcccaaagagtaacacgtttcccttgcgacttggaagaagggtttctatctgcaccattcgatccgtaggtagcactctttttcgtcggattgacacgaatccgaaatctacgaatgtccccattctgaaatgcaggagtgtactcgtatggctttattggtgctgctagaaccatatctaagttgtggaacgcatacttccaatctggctccgtttccgattggacaatgatgatcgtctgttgataattatctcgaacgatttgatcgatacggaagagaaaacgagagcggtcaaacccgtttggatcgaatgggagaagaaaattcggatcgactttttgcgtcgtggacatgggaaatgccatcgacaatcgttgatgaacgtgatagatgttacgcaaccataaacgaccggggcgaggtcggtctggattatcgccgacatcgatcatgagattggaatgatacatcactctacctcctcgatggatagccgacgacgacgggtttccaatgaacggaatgcgacaatttcagagcgtttttcgatgataagttcacgccaacgttcctcttcgggattgatgcgatctaatcccatcccgaccccatactcgatcatcgtcacggcatcatggcaaagtcgacaaagcgaacgcaattcgtcgggcttttcttcgcctcccgcgtgtcgataggtaatatgttgcacggtggttgccggagatttgcagaagacgcagagatgctgatcctgagatagccgttcgcgtcttttcgctttgtatttcgtattagtgtaatcggcgcggggtcttggtggtcgcggtgtttcgtgctgcaatggttcatttgcaatgcttatctgcccatgttcgccaacagtcaactcttcacgaatgacgaatcgaggtcgatgcgagggcggatcgaaactaaccggtatatcgtaccagacctgtgcatcgtcaggggcgtcgggttgttccgaagtgggttgccagtcgatcaggcagacgaggttctttttgggttcgttatcacgtttgagtcgtttccgccacggaatcgaacttaacgcagagagcggatcgggaaagaacccagccggatgttccaacaatggtcgcgacggaacacagcatttgcgaccaaggtagagtgtccactgtgggtatttgaccgctttttctaactcttgaatgagagatgggtcgccctgcaatactaccaaaaaactggcatcgcaaaggtactcgcgtcgggtgagcattgctcccgacttacattctccctttgcggttcgcatttgcatttcggcaccgacggtgtggtaatcccaccagcgaattcccggtacatcaattcgtacaccaattcgaagttcacttagtttcggtaaccactcgtccggcgcttgttgacgggtaatacctagcgcagcacagaacaatccgatgactcccgatttcgtcggcgcttcggcagttcgtcgaactacgaatttcgattcgtgtacaccccatgattgcatggaactttctaggcggagaaagagcgtattgggcagatcgctcatgctatgcctcgttgttaacgattgcctgttgtacctcgttccagtcgaaaccgattgcagctataaccattggtatcagttcatcaagtgacttgatattatggtcggttagtgcgatctcttgtttgttttcaaccacgtagaggggatagcgaagattgggtgaaaaccagaagcgctgtttagggatgccaaacccagtatcaaggtcatgcatatattgacctaattgagcgatactttgtgaaatgatttcccgttcccctttggctggcactggattcgcaaaggcgttggcatagctgattggcgtgcctttgatctcgatgagtatcccatcgggaggattgttcgcggcgaaactgttttgcttcccactcggatttactactgcggcagtgcgaataaatgtgcctactgtatgagcggctaattgtttgttatcgccgagattctctacaagttgctcaaaattaatggagaaatatttgtagaaacacgcggaagcaaatagttgttcaccgattaaatcggcaccagcttcttctttttcctcgcgtgtttcgtctcccattgccacgaagtaatcagtttcaggaaaggcggcgtgggtcgatatagcgtgagccgtttgcaacgatgcctcgacattcttttctagtttttcccaaattttcttcgcagatttgtcgggttcaagcatacgtccacttagtgccatatcgggcgcttgtgtgtaaagagcgattgctttcgcaaattcttttgctaactcatcatcagatttgctgttccttgattggaagagattcacaatcttctcaatggcttgttgggtcacgaagagcggtgccttgcttctctgactggtttcatcggattcatcggtctctccttcttcgcctgcagtggtgcgcggtttcttcgcttttgattcagtctttggtttgaaaccgcaaactttgagaatgccttcgactcgttttttgtcgtttgcatcaccttcgatcttgtcaagaatcctcttagcgagatcgcgcgttcttactcctcctaacagtttcgcaaactctggactcatccgaatacttcgcttgatgcattgactcgagatgcgcgagcgtaatacaccaccgaaataacaggtttttggtgcgccgaggtcgtccctattaagattcgccgggctgtggttctggatcatgtgaatttcgatcaacatggttgtaccctttcgttgatgctgagatattggtttatccattcctgatgcttggtctcctgttcccaaaaggagagatcatcggtcagttttacccagtcgagtttcaattcatgggaagaaatttcttgaagcgctcttcgcaatgtgggctcgatttgctccaagggagtggttatcagttcatcgaatttctgtcgaaaccggtttcgcgcacgttcttctcttggttcgcatcgctgtagttggtgtgcaaacaaacaatcagactgatgttcaatgggacactttgcatatagtttagcgatcaaccacgcgacttcccgtcgcggtgcaaactggttcttttgccgtagcggccaccacaaaccggtaaacagatcgaacccatcaacagtctggtcaagtcctttattagcatgggttcgcaagagtcctaggtcacctgcttttaatgtttgtaagaccatgataaaatcattggttgaactcattctgtagccgactttctacgtttcgttttctccggtgggtcatgttttgctcgcatatcgggtaatgcgttcgcgatactctttcgccgtatcgtcgctgttagtgtagcgccgggtgcgagtgatttcgcgatcatctcctgcattggacgatattccgatgctgcgttttgccattccgtttcacccccggatagaagattcccaacagctgttgagacggcatgctcgacatgaggacgattggaatcgtaggttgctttcaggtgatcgagtttccgtttcactcgcatcgtcttaggcagacgctttacgaattcgttgttcgatgtctctttctgccattgctcaaccgtagacaccgctgcttcgggtactgaattatttgatggtaactcaacaattcgttcccaaacatcgacatacttcgcattatctgtaccgagaccgatgatagcaaaagtggtcgaagttggataaatcgttttagcggcttcgataacaggtgcaagtaatttccataagggtcgatccatcttaaattttccagccgaaaccggatcaggtgcttttatcgatttttgagaagtgctactgagataaagtgcgtgtgggtctctccaaagggcagtttcctgcttacctggcgattgaaattcacaactgcggataatcgtatcggattttactccacagttgtagcaagtttgatggctctccgtttctgccaaccaaactttacgggcgagcatcgttagccctttgagtagtggaatttcggcagtgtcgcccacattaaaattgaggtcgatccaagatggttcaccgaaaggaatggcgcgaggtatccagtttttgtggagagtctcgaacaacgaattgcccaccgacattatgtaaacaggcggaactccatttattcccggataaaggtatggtttagtattgccaccaaaagtcataaataatgggagccgaagtagtcctattgcacaacaggaagcgcacaacccctcttgaaaatcggttgtgtgtttaaaatgccaaaaattgtgtccagttggtatctcttgatacaaatctgtcgtgggacgagaacgtcttgcatcagcatcctgataaaaccgctttccgtttccaagtaaattgaagcaatcccgattctctgtctcttcaagtttggaaaaccactctgctggaaacgaatcgatatttgtttcatcagggggattccccttgcaccaatacaaaatggcgagcaaaaaacgcatcactgcaaacctgtccatcggattcgatgcggcgatctctcggatttgaccggctttaattagcgcgtctttgatcccgacccggtcgaattgtccgtttcgatagagtaccggaatccattttttctctaacaggttatagcacataagcgctcccgtagttgaaagatataacgtagttcattattcgtggttgccaagttcatcctcaatttctttaatcgacggcaggcttcccttcagctcctttggaagtgttttaacgattttagtctcccaaccggcaacaccaattggtttcttcaaactgcgtagtgcatactccactaccaactcgtttttcgtcctacatagtagcaatccgattgtcggcttatcgtcgggatgacgtagtagatcgtcgacagcagataggtaaagatttatttgtccaatgaaagcaggatcgaatggtacagcttttagctcgattacgacaaaacaacgcaatttgagatggtagaataataagtccactaagaattcttgatccccaacttccaatcgaacctgcctgccaacaaaggcaaatcccgctcccagctccagtagaaaactctgaatatggtcaaccaatgcctgctcgatttcatgctcacgccggggatcggcagtacccaaaaagtcgaacaaatatgggtctttgaacacctgtgcagccatatccgattcagttggagggagcgttaccggaaaattcgtaattgctttgccttggcgtttgtgaagttgtgagtcaatctgtaatgcgagaatgttgcgggaccacccatgctcaacggttttgttaatgtaccacaagcgtgtttcaggatcgtctaatttttccaataaggtgaggttatgataccatgtgatttgtgcaagtgcctcttgcacaattgtccggtcagtccatgcagaggcaaatgcccgcatgtatttcaggttgcgtggcgagaagccgcgcatttctggaaacgatttttgtagatcgacagacaatcgatcaattacttgtgctccccaaccctcctgttcctgacgttcgagaatcgtccgaccgatatcccagtaaagtaaaaccatagcggcattcgcagcaagaaccgttttcaatcgttcccgttgaatatgttgtttgatctgctggaaaaattcgttgtaaccttttggcatccctgataggggtgctgcgacaggaaaagttgcctcggctcgagtccgacctaaagcacgacgtttctcattgggttcaactatttgtcgttttttactaggcataaatcgctctcaatgactgaaactcatcagatcatgaatgtactcaactacaaattcgctcagtagtattccttgatatatgcatacgccttctcaaacagttcttcctctttatgaagctgatactttagaagagtcttgcgtagcgatttctggacttcgcgctctcctgcaatcgtagtctgccaaccgtcaaaccgaacaattttcacgatctcatcgatatcgttgacaatgcgttcgactactgacggtgtcttatctgtgcgcatttcaagaaaaagttctgtaagtgctgtcttggcagttctccgttcgtctgcagaaaataactcacgctcggtctctaacgtatcgcgcgcgatttggcagaggtgcttgataaaatcgatactgctaatcaacccttgctcagcacgattccgcaattcctctaaccgctcgctaagtttcttaaacttaggattacctggatgtttccctaatcgaccgacaagaataagaacgatctgtttggctcgcttagtgtccttactattcatcaatccgtcgattaactcggcatcgagcaccatctcttccatgtcatcgtgaatgccggagacatgaacatgctcgtgaatcaatttttccgtctgcggtccaaacgcatgccagagtaatcgtccgttgtcatccgaagctggtcgaacagaggtatagacttgcgataaccatttgtagtcacgctgaaaacgattgagaattgaatcgggactcagtgcttcccacacttttgatagagtgacgtagtccttagcaaacgcatcgcgcatttcattcgagttgatacaatcctgcgcccgactcagaccttcgaatccttcaatcgtacgatcaactccgggaaaatgggaacacgctttctcgatcaattctggaagtttgtctctcaattcctgcaggttcgttattacagcacgcacagtcgcttcgtcaaactctaacgccttcgcagtatcatcgaaaaccccaaagtaatcgacaatgcgaccgtaagttttatttggatagacgcggttggtgcgacagatcgcttgtaataatgtgtgatctttcagcgatttatcgaggtacatcgtctgcaagagttgagcatcgaatccggcaagtaatttagcggtcacaatcaagaactttagttgagaatccggattgttgaactgctcaataactttctcttgctggtctttatccaatccccatttttgtttgaattcgagtgggtcgtttgcggtcgttgaaatgaccactcgactggcatccacaccgagttgttcatcgagtgcttctttgtaagcaacacaagcgagacgatccggagtcacaatcatcgctttaaaactgtgcggttcgacatgtgtgcgataatggttcgcaatgtcttcgacaatcgttctgatccgctctggcgatttgaggaagagcagcatcttcgcagctttttgactcaatttgttgcgatcttcttccgttagatcattagccatttcgcggaaagcaatatcgagcccttccttgtcaatgtgaacattggggagtcgcggttcgaagtgaagtggaagcgtttgtaaatcgcggatactttcctgaaatgtatagcggctgaggtatccaccctcatcctccggtgcaccaaatgcccaaaaagtgttcttgtcggaacgattgatcggagtaccggtcataccgaagagaaacgcattcgggagtgctgcacgcattttacgaccgagatcaccttcctgtgtgcggtgggcttcatcgaccataagaatgatattatcccgcagattcatgtcgggataggcatccttgaatttgtgaatcgtcgtaacaataatcttacggatgtcgcgttcgagcaggtcgtgtaacgcttggatactatcagcattgaccatattaggaacttcggcagcaccaagagtattggttatctgtgtatcgagatcgacccgatccacgacaatgatgatagtaggactcttgaggtcggctttctttcgcagtttctgcgcagcaaatagcatgagtagcgatttaccagaaccttggaagtgccaaatcaaccccttcttgatatgtccttcggaaacccgctgtacgattgcatttgcaccttcatattgctggtagcgacagacaactttgatcttgcgtttttgcggattggtcgcataaattgaaaaatgacgcaggatatcgagcaaagtttccggtcgtaacaaactgttgagttgtttaccgacttcattcagtccggaaaaaagtgcaagagtactattggattcatccaatcgccatgggcaccaaaattcaagtggtgtgcgaacggcaccatagaagaaatcgcgaccgtcggtagcgaaactgaggatgttgggtacaaacagattcgggacagtattctcgtaaaccgcatggatttcgtgcgcaccatcgacccatgttactgccggtcgtactggcgttttcgcttcgccgactactaccggaatgccgtttatgaacagaacgatatcgggaatcttggtctcgcgggcacgaattttgaactggttagtcaagatataggagttgttttcaggatgatcaaagtcgattaggtttacaccaacgtgcttaccgtcgatgccgaacggcatcgtaatctcacccttgtaccacttggcaaactcttcatttgactttactaatcccacattatttactgtgatgaggatggcgcgtagtttgtgaatcaattcgtcggcgcggtcgggttgttcggcgatttcagggttgatccgaattagtgcctgttttagctcgctttcaacaagaacttcagtaatctcgcggtcgagtgtgtcggtaggcatatagcgccagacgtgacgaccagtgtctggagatgaaacaaccccatcaccggcattcagattgacaccggtgagttgttgcacaatgaaatgttcgacgctattcatttcggtaaaaggcatattagaacaccttgtgaattaaattcttgattacattctcagttttggtaacatggtttttggcttcagtaattaactcttcgattctgcccaaattttcgacacatttttcttgttcttttttttcgataaccggtactgaaatattgtagagatctgatccagtaataccggcaacagttgtatatccgactattctctttattctttttacaccctcagaagaccggaaaaaataatggcagtacattgggagtattaattttgtgttgagccgtagtctgataatcgaagattcaaaagtcattttctcttcatcagtcatcacaatcgaacacttaccagctccttcgatgactaacgaacgtctagcgaaaagtaagtcgcctttttgaagtaagaattgtttttcctctttatcgcttaacgtgattctttgcatatccgggttatacagtttaggataagcgaataattctcccatatttaccaattttatcccatgcccaagatattcttttgatttataaattccattaagcagttttgtgcttaacaaatccgttacgggacactcttgatacccatccaaatttctgacgttattaatagttggtttctttgtgtatgtttcaaaaattagatctgatgagagttttagaagttctcctagcccatttaccaacgatattgccttttgtgtggcgttatccgctgcccacaacaattcagcgattttcgcttgttgttcttttgggggaaggaggaactcgaattgagcaaggtcttgaaactttgttcgaggtgaaagagccccagccgatgtattaaccgcatgctccaagaaccgctcactctgtaataagaaagggaacaaacttggttcgattcgtttctcattggcttctaagaccagaatatcactagaacaaattccatcgaactctgcaaacgcaacttttttctgatacgaacgacgtttaccgaacagtacttgaccgggtttgaatcgtttcgaaaaagttataccatcagcgatattgccccacgacttaagatgtaggttttccggttcgatatgctccaatccaacaaatcggtcgatcccattcgataatggatcacgctcggcaatattcaagttgcggcatacttcaccgaacttgattcgtttccaaccttgcttgtcgaatgtttgcttcactgtagtttcgctatcagcttttgaatcgactgtcgtaattcatctgcgctactattccattgatcaattgcatcgtgtaagttctcaccattaccggttttctgcattgatccggtgtaaagcgtaatgttcaaattagctttcttatcaagcacaccttcaaccgatataaccttgctgaagccgtctatcgtttggtagtcatgatatgtattgaaaatcttctgaatgtgtttctcttccaagtaactcgtcgctttttctttatgaacttctttcacggcattgataaagagaatttttccttgccgcgttttcggtttattgttcctacagatcaggagataactctccattggtgagttatagaagagattcggtcccaaaccgatcacacattccaccacatcactttctatcattttacggcggatagcagattcggcatctctatagagaataccatccggccaaagaataacacacctcccgttgtcaggatcgagagatgtatggatgtgttgttggaatacgtaatcggcatatccctgaggaggcgtcccccagatatttctgccgaatggatcgctcgcaaatgctttctgatcccatgccttgatactgtatggaggattggcaagtatcacgttgaatgtcttcagtcggtcgttttccagaaacgcggggttgctgagagtattgccgcgaacaatctgaaaatcctcgataccgtgcataaacatattcatacgagcaattgaggaagtaatcaggttgatctcttgtccgtacaatttcagcgtccggtattccttacccgtgtctttcaactggagcgcacagttcaataacaacccgccggaaccgcaagttgggtcgtacacactctctcccggttgcgggtcggaaattaacgtcattaaccgaacgacggtacggttggtataaaattccgcggcggtatgcccgctgtcgtcggcgaatttcttaatcagaaactcgtaggcatcaccaagttcatcttgggggacattaccgatgctgagactatgctgactgaaatgctcgattaggttggtgagcgtctcattgttcaaccgatccttattcgtccacgatgcatctccgaatattccgaataattgttcctgattcgctttctctaattcgcgcatacccttctgtagcgcttcgccaacatttcgagtcaccgagcggacatcattccaatgcgaccctttcggcacctgaaaccggtgattttcggcgaaggatgcatactccaggtcaccgccactctcggctaatgcttgctggtactcctcgtcgtaaacatcacaaattcgcttgtaaaacaacagagggaaaataaactgcttgtaatcaccggcatcgatatggccgcgcagataggtcgctgcaccccaaagataactttccagctccttgcgtttcatcatgatagcaacccgaattccatgagcaactctttaaagcgatcttcagcttgccatgccgcttgtgctgcaatttcgagttcggcaatcgcctcttccatcgaagggaggttgtcgactatggttttctcaatatagagcggaatattgaggttgtactctttcgttacgatctcttcattatcgacgactcgtacatgatcaggaagtgatttgtactcacgataccatttatagattgtttcgacatgctgtgcttccaggaaattttgtgctctaccgactctgatttgatcggacgcatcgataaacagcaccttccgttttcgttgcttgggtttcttcgcccggaaaatcagaatacaagccgcaagtgtcgctccataaaatacattagctcccagtccgattatagtatccaaccgatcgctatcaatcagtttttgacggatacgaccttccgcaccctttcgaaagagcgcaccatgaggtaacacgacagccattcgcccggtatcgggtttcatggattgaatcatgtgttgtacccaagccatatccccatttcccttcggtggcacaccggcgatgttacgtccgtagggatcattcacccattgctccgcaccccattcttttaaagagaagggcggattggcaacaacacaatcgaattgctggagttgatcgttttcaacgaatgccggttgacgcagcgtatcgccacgctcgattcggaaatcctcgatgccgtgcaggtacatattgatgcgagcaatggtggaagtcgtcaagtttttttcctgaccgtacattttgagcgttcggtaatcccggttggttcgccgcaagtgctcgatactctccagcagcataccaccggttccgcaggcaggatcgtaaacggattcaccttcttggacatcgataatgagcccgatcaaatggacaaccgaacgtggcgtgtaaaattcacccgcctttttattagtaaggtcggcaaattggctaatcagatattcatacgctttaccgagaacgtcgggttcgactgcctcgtttgacagattgtattgggaaaagtgttcgatgaggttggtaagtagcgaatcaggaagtttttctttgtttgcccagttcgcgtcaccgaaaataccgtataggagctgctggttggctttttcgattcctcggaatgctttttgtaacgccttcccgacatttactgttacttggcgaacatcgttccaatgacaatcgtccggaagagaaaaagagtgaaattcggcatgggaagcatactcgcggtcaccacccgaatcctcgagtgcatgacgaagctcctcgtcgtacacatcagaaatgcgtttgaagaaaaggagtggaaagatatatgccttgaaatcagccgcatcgactggaccttttagtatccatgcagctttagcaaggtgttgttcgagtttacttagcggtaatttttccataaaattctgtgtgccacttcaatgttacaaattagtaacattagctaagtttccgccttaaactactctctgcaatcccaagcaactttgcagcctctttttgggttttgcttctccttattgcttcttgaataaccgacgtttcaacctgtcgcaaattcaatgtctcggaaacgactgtttgcagtgactgcgaagtcgtcgggagtatcgccaacacgtctttccggtcgatctcgtcgctatcggcgtggaacacgagtcgatgaattatattttccagctcgcggacgtttcccggccatagatacgccgttagagcctgcatcgcacgctcggtaaggacaatatcgtgcttaggagacagcttgagcaaaaagtacttagcaagcgcttcgatgtcttccttccggtcccgcaggggcggaatgtgaagaactagtcctgcgattcggtagtaaaggtcgtcccggaaccgcttttcagccctctcaatatgcaaatctttgtttgtcgcggcaataatccgtacatccgccagtaaatttttcgtaccacccacgcgccgaaacgttttttcttgcaggacccgcagcaatttcacttgcaatggtgcagataaatccgcgatctcatcgagaaacagcgtcccattgtgcgccagttcgaacaacccattcttgattttatcggcaccggtgaacgcacctttctcatgcccgaaaaattcggtctccagcagcaattccgggattgcaccgcaattgatatcgataaatggagaatttgtgcggtgactacgtcggtgtatttcgcgcgcgacaacttctttacccgtaccagattcaccaagcagaattaccggtgtgtcatcctgtgccactttcgtaatctgcttatcgatagcagccatttgttcggaggcgtagatgaacttccgttcggagccatgcgtctgagtgcgacgcagcatcaagctctcgatttgaccacgacgaattagctcaatcttttttagaatcaccggtagctggtctatcaattcctcttttacaatgtaatcgacgacaccaacggaaagcactttcagagcggttttgaccgattgcatcccggagataacgactaccggacagagcggctcattctcccgaatatatttgagtagttggaatcctaacgaaccatcctccataattttcgcaccatgccgttcgggaagcatcaagtcgagtagtacaaagtcgtattggtcggatttgagtttctccatcgcttgcgaataatggatcgctgcatcgatatcgaactgcgagccaaacgccttacgaatcgtctgccggtcgtattcattatcctcaaccaacaagatgcggactcgacaacccgaaccgtttccactcatagaacaacctcgaatgtcgtgccgacattgggttcactctcgacgagacgaacatcgccaccgagagattgcagtgtgtgtttgactcgggcaagtccgaatccttctgtatccttggtcgagaaaccgttattgaatatcgactcatgttgttcgggagaaatgccgcaaccgttatcacggatggtaaggcaagtctggttggactcgatacgagacgacaggactattatcgggtcgtcagtattgtgtaaactatcaccggcattccgtaacaggttaccaaaggcttctaccagttgttgcttgggtagaaatcgttccgttcgctgtaactcgtccagcaaaccatccgagtcaatgttcgttccatttaataccggacggctacgttgtaccgcttccaataatagttcctcgggagaaacgcggaacgattccagcagcttgatcagcccattcagtggaaccagtatcgaatcaaatacagcaagtgcacggtttcggacggtatcgaaactcgctcgactccgcaacagactggtaaaatcggatataaacgatggtatcacaattgcatgtaacgtatcgttgagtagtgttgtaaacgcgacatattcatctttcagttgtttgattcgtcgcgtcgcatcggcaatgcttgtcatcgccttcaactcgttgcatgctgcgcggattctatcgtgccgggttgcccgcgtctcttcgtacaactgttccaatgcctcgggagttagggattcgaggcgctgtgatacttcgcgtttccaactcgtcaatggcagtgttgacaaatcaaccggcggttccgctttttttacctgagtgttttcacgtggattcatgatgatcgttccgtgattcacgcccacgactacattatggtgtcctttattctctatcgacaccgaagaggtatttgtatcggtagtgtcgcttagcgcggtttccaattcaaccgcttgagtgcggtgcttgcaccaggcaagtaacgaagttgcgaccggttttgtcacgtacttggctaacacggcagcacccgcttccaagatttgttgcggttcggtaagtccggcagcgacaagtttacgtatccgttcgcgtccgagtcgcgggatttgcaactgtgcgagtgcgatacccgcatttggaacaccgtattgcacttgcatcgcgatttgatccagtgatttacgccaggaattgggataacccaatgtttttgcgagttctgcagcactggatagtacccatgcaatttgttccgccatacggcgaattgcacccaagtaaatttgataccttttctccaattccttattggtagaactaccgatgtaatcgttcaacagtaaagcgcttttacatgtttttgcccggttatactgatcgatgttgttactacaaactgaatcgaagattgccatgccattcgagccaatctgttctgttactcgcatcgtatattcgtaaccatggtaatggtattcggaagtggagaaattgacatatccttcttgaccatcggcagtcaatagcgcaaataacaccgcctccatgcacgaaatagcttgatcgtcccgttgcgataaccattgcttaataacgtgagccgtttcaacccggatgcccatgctgactaccgtggttccaaactcggtaagagtcagtttctcaccagtcgtaccggaaaccacacccgcgcgcaaacaataattcaggccgcaatccaactcttggttcaactcctcctgttgttgcgcatctttttcatggacatgccaactcaatgaattgcgcagatacgattttatctgttcggtggaaccaccaccgagtaacgagacaacacccaacactgtcgtcgccatcgaagaacgccagagattgggtttgacttcctccaattccccttccaaataaaatcggcgtatctgttcccgctccactatcgaatgcgccaacgcaatcgcacgaccgaattcatcctctaattggtagcgtccggcacgaccgcccatattctcgaactcacctttggataaatcgacggtatccaattttttaaactttggatcatagcgccattgctgcaattcaatgaacacatttcgggtgggaagattgacacccattgccaaagtagatgttgagactaacaccaggatactgcgattacggtagtggcgttccaccagctctcgttcctcgatggtcagatcggcatggtgcaatgcgataccgtgttgtaacagttccattaattcgtcgcgggaatgagtctcttccaaagtctccaattccgcgattgcatcggtcgcactcggcgcattgatccattgtataagcgccttcgccacaccgcgcaccgaatttttgtctttcaaaaaaagtaacgactgttcaccatcttcactgaattttgtcaccgccgcatataatacttcagcccgatcctccggtggtcgtttgagaatcgtttcgtcaccggtgcctggactgttcatcgtacggtaatgaaacacaccttgatagagataaccgattcgcagctccactgggcggcgctcgtaatgcaacaaatcgatatccagccactcattgaccaaccgatggttgcccagaactgccgatagtcctacgagttggaaaccgagttgctcccgttgcatgcgaagatgggtcaggatcatttccagtgtcggtccacgactgatgtccgccagcatctgcaactcgtcgaccactaccagacccaatttattgaggaacgttttattgcagttgagtaattgaaagaacttctcataaacgataatcgcgatatcgaatttaccattctcgatgtccgagtcatactccttatgatcacgagtcgagatcaccaccttgattccagacgacgaatacatctgacggaaggtctggaacttttcctctgcgatggctttcagtggaactaggaatgccgtcttctttttgttgattgcttgatacacggcggcaagctcaccgataaatgtcttgccggaggaagtgggcgcggagacgatcatgctgttgccgtcgaacagcttatgcttctgtatcgcttgcacttgaattggttgtaaggtctgtatcccgagtttccgccagttggcaatcatgtcctcgggaaaatcgtagcgactgagttgtgtaatctgcatcttcatctcatcaatgaatgtgtttgaacgtcaaaatctgacacttatttcatcgggtactcgcggcacaatccgacaacaattccctgtatcgaacactcggatgccggttttacaatgtcctggtggtcgggattcgccgctttgagcgtgaccataccgttttttactgtatggaaatacttaattgtcacctcgtcatcgaaccgcgctatgacaatctgccccttttcggctgttttttgcggtcggacgataactttgtcccctgacaggataccggcaccgaccatcgacttcccttcaaccacgagcacataggttgccccccggcgcacaaaaacgtcatccacaagcatccatccaatccggttctctgtcgccaacaggggcaaacctgcggcaactcttccgactacgggaaccccttgttgtttcaagatggttccggtctcatcgatgatatccaaccgtctaaacggtccgcttccgactttccgcagataccctttattaatcaagggcttgacgatattgaatgcggtcggacgactgatcgaaaaatggtcgccaatttcctgcatcgtcggagtccgaccatgcttctggaaatattgggtgatccattgcaacaattccgactgtcggtcggttaaggggatttcgctcattttttgcctcgttacccggttaccagagtatagctaacaggtgttagtataacaaacattaccggttgaggaaaaacccgttaaggaagccgataaggaaatatcaggagttacgatattggttacggctcagagaggtctcgtcaggttgctttcagggcaaagaaaaacgaagatttgatataaatatcggaggcggcaaaacgctaacctacacaatgtaattacaggtaaagcgagggcaagacattttttacagacctgagttcaagctgatttcacaggactccgcgtttttctgaatttttcgtacctgcaggtacggtttaataattttatccatacgcaacagcctcgcaatcctcataatggtgcgtggattgactttcttttgataaataccgttacgtaatgcctcagttgcgatatccaaaccaattcggttccgatgtttgaaacaatcgacgatcgtcctttccaacgaatagatgtacaccggagtatcctcaattaactgttgttcgcgtcccaccttaataatatcaggcgatgttcttgacacctgcaattggagaaagtccgttttgggagtgcgcatttcactaggaagagtaatccatatttcgttgggtatttgtgtcaataaaccgtgataccagagcgcagacaacaaagagatagtcgccttgggtatagtcagtgcaaccggaataaattcagcatgcatgcatggttggtagtcagcgacgcagtatagaccccggccaacccgcttcagtttgctttccttcactaaccgggctaaaacatctcgttggatatcctgttttactaagtcgcttacttgaacaattccaataagtttgataaaagtgagtatttcttcggctcggggcataatcctacattccgtactacttgaaagattaagtatgacactttgtaacgacggtttgcaatcttcgatgcgtaaactttgtcgcactaccgatgatcaaacgtccagttcatgatcgttaatcactttttcaaaaaaaagttgtatatcgggataattctgttcaaggaaagcgcgtaccgccaagtcggcaattaccttccgtacatatccggtaaatttaaccaaatcgaatacattgtcccgataactacttgtagcccgtttaaactcatcttccatttggtaaagttttcccgtcagttcttttctttgtgcttctgaccctacggtttttgtcggatgcgctttactccattgatcttctggagtggaaagcaccaaagttctggtataacgacgcgaaaagtcgttcgcggcattcaagagttcaacaatttcgatttgccgatgataggacacttttttcaactcttcacaagtcaacctcgacacattatgttgacgtaatagaccgataacggaaggagcgactccgatcagcatcgaatccattttacgcacccactcttttttgacattcagagtagcggcgattcgatccagactgaccccttcttgaatcgctttattgatcatcgtatgtgtctcgctaaccgtcaggggattgacccgtttgttgtaagtatagacatcatcgtcggtgccgattagacattcaaccgactcgatctttaactctttcagcgctgtccaacgcaagacaccgtccttaatgtagtagcgtccttccttttcgacgacgaccagtggttcgaccaaaccaatctctttaatcgaactgacgatttttcgataggtcgtgcataaatgacctgtaagctttcgcggaaacaggggatacagattattcaccggcaaggtcactgttccggtacgaaaagagatattgttcatgcggcctcactttttgaaaagtttgcaaacaggtcctgcaaatgcttccctttgagtttcggaaaatccgttaatttttgatttcgcagcaaagacacccaatcgggatcgttgttcaaacgagtgaatgcttctatcagaatcatgatttggttctcgtatcggcgcgacctgcgaacgaagttttcttgcttgtcgagagttcgtcgaatctctttacgcaatgtttcgatagataattcgccataaggggtcttgccggatcgattcgagttattttcctgctgaaaacgaagacgttgcttaattaattttcgcaccgccggtacatcggaataatcgaatacattgttttcgacgcaatcagttagcaaccgttgtaattcgggaatcggctcttttacgatcataaatgccgcactggcactcacttttccttgttcaaccgcctcgattagtaatttgtccccatgctcgattaataagagataatccttgatcttgtccggtgtacggtcaagaataacggaaatttgttcaatcggcatcccagtgtccgcgagtcctttaattacttgcgcgaaccaaatgggcgggggtgtcatccgtgtagcattttcagcgatggacattacatacgccgtttcacggtcgacatcgacggtcaaggcaggaatcgtcgtgtgtcccaatttttgaaacgcctcaattcgaccttgcccgcaaaccaattcatatttactatgttcagggatatatcgggtattcaccacgattggacgctttaatccctgtcgccgaatcgattcgacgttttcttcaaattttgccggatcgcgttgtcggggattgataattttgatcttatcgattttaatttcaatcacatcacgtaccgatttcatcgcaggttttctccttattgatatgtccgctatcgccgaataaatcgtacacatcgattattttgtcgaaacggtatgcatcgagatagataccattcgaccatgacacaaataacttgtcggtttccatggcgatagatgggaaacaatagaaatcgaggatatttcccgcatcgtcggcaagccgaactgcgagcgtaagatcgatgtctacttgccggtcaaaacgatacacccaacgctttttgccattgttgttgcgaatacttgatgccataagttgaatgttcaactggtcgttcaaacagagatgtgtgccgtggtcgaccacagtgagtcccatttccaccaatgcggcaaatacttcctgccacaaccgttcctcaatggatttcaccaactctttcaattcgaaaaaccggatatcatagggaggtacatatccgactaatttgtaagcattgaacagcgaaccgaaccgtttctttagaatattggtggagggcatttgtggtgtcgactcgatgatcagaccggtgagcttcccgtgcgtctggaatagttcctgcaaacgaagtaggatatcttgatcgctccaaaccggatgtcgtttctgaaatatctgctgcgcttcgagaaatgtgtcgggtgagacaatcgcttcaaacgcctgtggaaccaatacccagcggtcacgcggattcttgcgggtaggtccatgcagccgcgaagatgtgcggttatatcgtaaggtcccggtgtacgtctcatctcgaagcatcactcgtattgtattctctgtccattcgccacccccaggagaaggtattttccgctcattcagttcgattgcaatgtttccttcccgtagcccccgtctggtaaataaaccaaaaatatgttttatcgtctccacttcctctgcattaccgggcaccaacgtaacccgctcattggcaatcgctttccgctcaccatcgtgcaaaatgccaactggatttctttgctgatcgagccgcatcctttcaaaaccgtacggcgcaggtgcaccgacccggaacccctgccgcgcgatagtcagcgatccggctaacaccttatcgcttaaattcttcgagtactccgccgccatcgctcgtttcaacgctttaattaaagagtccatgatcgagttgtcgttcttgaactcttccgtaacataaatgatttccttaccgtgcttacggcaaataaactccaaatgcgccgattcgtcgatatcctggaaacgaccccaccgcgttacatccaatacaaggatgatgctaaaactcagttttccgccaatgacgtactcgttaatcaactccttaaaagcatcccgtttcgacatcgttagaccggatataccgtcgtcgatgaagtacttcagaatgtgaatgttatgatgttcggcaaatgcgtcaatcgctttgcgctggttcaaaatcgagttttcctgcatctcgcgggtcgacttacgcagataagccaccgcatgcagcttgagagtagttgatagtttgttatcgataaatgtattcatgaaagccgttagggacagtttacccttgaaaccgttaatcaatggaagcacgcgaactaagcttcgcgaagtttcccaaaccacaaggtactcatgacattttggacgataactatcaactagtgagaattttttacgactaaagagagcatgatgaggaaaaccaagtggcaaaaattattcagcaacatcgaacatggtaggcggttgatagaatttgtaaatatttgcttaaataataaaaataatcgattacaatacgaggacatcgcaaagcagctcgaggttgatatcgtttctgtacatcgataccgaaatcagctcaattgtcttggaattacggtgcattcctataaaaaatctggtgtgttgataaacacggatactctaacgagtgagacggtattatgctttgtgaagttataccaaggctacatattgatcgatgagtcattggtgagggcagagaaatttactgatttaatacattcatcgtcagtcgattccaacaatcttcgatctgtagttgatatgttgaaggccactgttgaatctcagcatgtggtaatacggaatcacacaagtaaaatttgaacagaaaaaaaacggatgcccgtcgtgagcatccgcttgtactatcgtgaaaatttattaaaccgagagcaactccaccaaatccttcttcgaccggagccgcgagatgtgcagttcggataccttgttaaagagtgccggacccttgagtgcctcggtatcgcaatcgggctccatttcctttatgatgcggacaaagtcggcttttgtccgagcaattgaaatatcacgctctttggcaagcttctgcaactcgactactgtcatttgttcgtaggggttttgcgccacgttcgattcaggggcaatttccggtgccgggttggatttgggcttgcgtgtccgcttcggtgcgaccggtattgcctccggtgcgactgtcgcagtttccgtagtcggtgccgattctgtcgtttctgccggttcggattgcaccgttgccgttgatgcggcatctggcttgggtttccgacctcgcttcttcactatcggtgctgtctcagtttcgggtgaagaggattcagcaaccggctcggatactgtcggttgtggcggttcgggtggttcggtcgtcgtatcggaagtggtctccacgaccagtgtctcgacgggttcgctgggtgtctctacggtttcctgtgccggttgagttgattcgattttatcgatccaggcgagcattgccggaatctcttcgccatcgtcggtgcgcagggtcgctttcaatccctgcaatgcgatgatgtttccttgaatgcccttgcgggagccaccggtgataacgacacggtcgccgatttgcttcttggttttggttgttgtggtactcatgctgttctcctttcaagagagtgttgagtgattgatttggatttgatgattacgattgagtgagcagatgctcacgcttccttgaatagaccgttgttaatgagttcgcggataaaccgttccgccaactcctcgtcggatattttctctgattcattgaagatccctttgtaaagattgggacctcccgcgatttcgatggtgtcgaccagttgccgcagatactgccggaacggaagcgaccgttcgaagtatccctgcgtccggagttgttcgacgatctcgacggcagtgccgacgaagaccgcattttcattgacgagttcgtgcttattgatcatttgtgttgcctccttgcaacgttgaggatttgcttgcgatagaaatcaggaatacaccagtcacggcaaccgtcaagtatcgtctcgaggtatccaccggaagggggatagtaaccgttacggtcggcattcattatgtacacccacgctttcgtattgtgattgtttccggatttgcggagcggtaaaattttgcggtgatacaaccggggatatccttcaaaccggtctagtgcgtcgaggtcggatttggtgagcagatacaacgcaccgtaaacacgatgtccttttgctggttcaatcgatgccaccccgcgaaagacaagccggtagttttcgatataggcgacgcagcgaggcagatgccccgggcaacgccattccatatcgtcgagattgagattcgctccatacgcgaaatagggaatcgtcgctttattggacattggcgacctccgtattcttttgcggcttgccatatcgccatgcactattgcccggcaggttcttaagcaggatggttcgtgcggttttgaactcgttgcccttcattcccagaccggcaaccatgaagacccggaagttgaacttgggattgtcggtttcaattttggagtgagtcgtctttttgaggtcgagggcttttgccgacattgcgagcaccagttgaatccaggaagtaattcgttctgagtttaaggaggcttggaaataccggaattcaatcgtgtggattgagcggtacaaattgttgtaattaagacctcgatagcggctctggtcatagtgttgcgggttttgattagcatgtccataccatgcccggttcaaatcggtcatcgtatccggtttactctgaagcaaccggtcgatgaactcctgctccatcggcttagtgtaatgtgctctgcgttccggtgaggtgccgatcgcttggaagagtaaatcctcattgcgatagaccatcttcgccagattggttaaggactgtgcggtatgcggtgtcgcatcgacatgaacatgcacggagcaactccgatgggcgatacagccgattcccttaaccgcgatgatgattaattggagcgtcgggatatcgtcgtaggtcagaatcggcgatacaatctcggaacccttgtgaccgcggatggttgttattgatgcatcgttttggactcgccagatgcgaccatcaggttgcgtgaccagcgatgcttgaaaggttccgaactcttgggtgactcgcccgttgacgatagtcttgatcgcttcggcgattcgcttccgctcgcatccggcagtctctatctcgactccgaacttctggttgtgtattgtgtatttcatgataatgccttgcgttggatttacttgttggcaacaccttaagcgcggggtcttgcgaagtcaaggcaaggcaataaccgttaaagccgctactgtagcggcttgtaggttagctaactagattgggaaaggagagattatcgaacggttgacagggtcaaacgttaggtcgaaagcgctcccatggaaacgcgggacccgggtcaatcttgcgtccgggggctatttcattatgaccgaccagccactggattgggtgctcttcgcggaggagcacgagcagttgctcaagagcagcaagctgtagctccgggaacgactgccaatattcggtgccgatcaataccggctcatcgccatcatagcgttcggtataatcattaggccaagcgaaaaaggattcatcgcgcagcttgagcggaccccagttgacgagttcgattccaatcgaaaaggcattgacactcggacgaccctgccattcggaaacaccagcatgataagcgcgcttgtcgtccggcaccattcggacaatgcgtccgtctgtgccgattacataatgcgccgatactttatttgcggaattctggaaccacgcaatcgtatcctcaatgctaccattggcagtataatgaatgacaaccgtgtcaatcacgatattccttggtcgggaatatgcgttggttcttgccgcaggaataaattcgatgtcgtccagagtcattttgagtcatccttctttaatgaggtcgcaattttctcagcactgcgtccgacgatatagccaccgattccgatattgagtaacgtccacatctgctccggcaccggcacggaggtaatgccaaagatcggtgcaatcacaaagttgtgagcaacgatgtatgtaaacaccaacatcaagagcggtcgccagttgcgctgcagccaactctgcccttgtacctctgcgaccagtaccttcgccttggcatcgatctctttttccagcgcaccataatcgagtgcgagcatctgcgtctgcaggtcgtgattcagtttcgccgcaaggtctttatccgacactaacttgtcgatgatgccttcggctttatcgataatttgtcccacaatggggattgctgtgagaatactcatcattcacctcaatgatttggatagaaatagatttataacgagtgcgatcaatccaccgtaaagtggcgtgaataatacccagagcagcttcgtcatcatgagccggaagttagtattgcgatccatctgcacaacgagcccttcctttccgttgcctttgatcgcatcgtttaattccttcaatgcagcatggacttccttgcgttcttccttcgcttccgtttgcacggtttgaatcgattcttttaagtcctgcagttgctgtacaatctgctccactttagccagatggtactggcaggaatagggtggttcgagatgttcaccggaagtgtgttcaaattcactcatgcgatgctcgtaataatgccattagtgatttcaatgttaattattccgccccagggattcgatacttgtatcatctgagtaataccggtttttccgagtgcatttagtccattattcacattgagcgggacattggcattcagtgccgcaccattatattgcaacgcctctccggtcaactttccgagggaggcggggtcggttaccagttgcccgcttgttacacaatcattcgctaactgtgccgtgccgattgtcggaacaccaaatccaccgatgtgtttgcagatctcttcgtaaaacacggactccgaataaccggtgacccgattaccatattcgcacttcacacaatcgacatagacttgtccggcaggtttatttgacggatcagaaagtgcgaacgagagccggattgaagaggtgttataggggagtttgctaatgtcttgtaccaaataataccggataaactgtccattaccggcagtaagctttaaccattcgatggtgctgagttcattgccgttgttatcataggaagtcagtaatcctgaaaattcggttccggtgataattgcctgggcgaagacgtaagcggatacgacgatagcatcgcgcccgtgcaccgggatcggattgctgcgtccggtgatgacattcggtggcgcagaatcaccaaccaatcgcagtgaactaccaccaaataccgagtaatcggtcgtcgtatcgaagaaactcatcagacccatgctcccgattcgaacgatgggttctgcaccaaattatgtgcatcgaatgctgccagtgcagtcgcattcagtttgttggtagttattgcaccatcggaaattttggtatcgattactgcgccatcggcaagattcgctgtaccgaccgcagaattagcaattttcccggcagtgacagaattacttgccagcttcgatgcatcaaccgcattattgactaggtgggtagtatcgactgaatcacttgccagcttactaccatcgacggcattcggtgcaatctttaccgtagtaactgcgctactcgccagcttgcttgcatcgatggcttgattcgcgactttgatagcggttaccgcgccatcggcaagtttggtgtcattgatggcggcattggcaatctgtgtattccccaccgcaccgctagcaattttatttccagtgaccgcattcgcatcaattttctgggtagtaaccgcattatcaacaaggtgagtgttaccgacttcattgctggcaatcgaagtccctttcaccttgccatcggcgatgacgtaggttatcccgccatctttggtggtggtaagttcgattaatttgcgaccactgggaaccgcatcgttccaattcggagtacccttgagttcctgcagcgcagtggtaacattggcatcggattgtccccctttgattacaccaacggtgaccaaatcgcgggttgcgagttgcgataattttttccgtactgaataagcaatcgtgaagttgacaaccggtattaccgagagttcgatccatgtcgagttattgctgccatcgccgtcgttgcgggaccaaccgggacccgacccgtgcggatcactcccggcagttatcgcattggtcttattctgtttctgccagagcgcgaccaccttaatcggattgccggaagcatcaagtaaatcctcaccattatcggcgcgcgtcagatcgaacatactgtcccaactatcgccgatgttaccgatattgatatctccggtagtaaaaccgggacggtaggtcaagtaagtcggatggactgcggatttggttacatctttatcgagcaggggaatcgcgatatccttattatagatatcggtgtagaattgttcgatccggtcgtcgatggaagcgccactactggtctggagtgctgtggttaccttgccagaagcggaatcaatgagcttggtagtgccatcggaagcgaagaggtcaccttggaaatcaccatccgacttcaatttcgaaagtttcgtgaccatgccgctgtttagccggtcttcagtaagggtgctttctgcaactttagcatttgtaatcgtaccgtcttgaattttgatactggtgaccgcattatccgcaagtttggtattatcgactgcgccattggcgagcttggtggcatcgactgcactatccgccagtttagttgtggtcacggctgcggactcaatagagtcactcgtgatccggtggtcggtattgacaccagcaaccttcttgaagacgacaccgtcaccgaccagatcgagcgaatcgttctcctttagagtatagtcggagaaggcagtgagtttgtccccctgctccgctttcacaccatcaataaatagatcgaagttcggattcgcactcgacttctgaataccaccgaattgcagtttcagcttaaccgttccggttggaaccggagattgatccaaccggtaggtctggtagaaacgggtgaatccggcattaatcgccgattgtaaaacccagtcatggttaccgagcaaattaccattcacatcataaaacagggtgcgcgctacgatgtatccggcagtgtaggtcttgatatagagatagcacgagacagtgactgccgagagtccggtgacatttacaaaattggttttatccggatcggtgagcaatgaagccatcgcactatcggtagtaatctccatcgattgggtgccgaataacttttcagttgttgaaattgtgatttgatttgccatgtcaggttatcctttcaccagaccatttgttcaaaattgccattaataattaaatttggttccgctattgggcactgcggagttgtcactgaaatgcggtgtgaaggtttacttttcaatcgcagtccgcaggcaacgaggtaacattcgtactgtgtctccggttgaactgcgggaagaataccggaacgtgcattacgtcccgggataattactggcacaccagccgcatcgacatcttgacgctcggcatacaattcataatgagtgacgccgtaatcgttgcgcagcgaccacttgaattgcagaccaatctcattattcgctaccactgacgatacctgtgttaacaaaggtgtctccaccgcatcgccgagatagcgggtgcgataatttccgggctcgccaacttcgattcgataacgcgaaaacacgaccagcgcaggagcggtaaagagcaatgcatagcgactgtcgcgcagtccggtgatggtgagtgtgccatcggttgccactgtcactacccgcaccggcagcgagcaccatttcccatcgcgttgcactcttgccagcaggtcatacaacactgcgcttctgcccacgggaagaccacttaatgtcaatatccggtctgccattagttcgctcccgttggcatagctgccgccagcgcatctaattgctcttgagtcggggcttcggcaatggcgcgttggagagtaaagacctgttcggataaatcacgcgttacttgctcacgctcgatctgtttgatggtcgtcatcgctttgcgatcagcatcggcaagctgtgctaccgtcttgccatcgccactctggagcgcatcgacggtaatggcgagactattgctccagttgctcacgacattgtactcggacattgaccgaacgaacagtagcaatcgttgtcccgggtttacttcgatggagaacgactcggtgcggacatcggattcatagagtagtttcttaccggtgagtgtggtgccggagatgggagcattggtaagtggtgataacagcgttatggtcttggtgccgggatcgacagtgcgaactattccgctttcgttaccgacgatgattcgttgattcggttgaaaagacatagtgccggtatagatgatttcactcgtagtggagccattcccaaccgttgtggtcgcatcgtcggtttcgatctggcggcgctgtttagttggtgattcatttacacgaacgatggcatcggtgtgatttgcttcgagcacagcaactgatatatcgaccggtagcgatccggtattgggcaacaattcatagacacgaacgagatattgcacgatctcttcgtggtcgaacagtaacggttttgtccaactaaaaaataatacatactggttgctttgcggttgggagataactgcggcactatcgccgatcagattggtagagtgggtctgttgttggagcgccagcgaacggttttgctccttgccggatttaaccgcatcgatgccagccagcattccggtaatggttgtaatcgaaccaccaaaaccgatctccgggacatcggaaaaataaaacactgcattggcaatattgccggttgccgtagtggaaagtgtggcatgagtgctatcagtgactgccgaaatagtaaattcgagtggggaactattcgcccccggatcgattagggttcgcttgccgatataggaactatcgaaactggtgccgttgccaaccatcgcctgtgaaccgcttgagagagaaaccgttcccggtaggcgcatattcgataacacaccgttgcgaatcaagtcattcttggtattgcgcacttcaaaatcaaaggagccaccgggcaaagcggtattgccgcgcagttgctcgaaagtataacctgcgatttgtttggcaatgaccagcgcgcgcagttcctgcagcgacgataagtgcgccgatatttgctgactcgctattgatgccgcttgatacgaatcgagtgccagcgatagttcacttgatcgttgactggtcgggtacagtttcagttgagcattcgaaagcgaaagcaccggtgcgtttggttgcgaaggaatcttgcgggtgagtagcaactggtcaccattgccatcttggaagttgatcagtccgttacgtaataaattccttagctcgggataaactgagagaatattttccacggtaaggccgacaggtccatcggcacctccgatgcgaaattccgaagcagttgtatgggtatcggtgttcggtgcatgcaaccgttcatcgatcaatagcgaaactggctcccgcagatcggtaaccgaaccatcggtttcaatgtgggcgagcagtacctcaccggattgcggggtgttgtcggtgcgtgatacaatactaaaggagtcgtcgccatagatgttgtatttgtcgccagtcagaaagtgcgatacttcgtgacttgatattgtcgtgtattgtaaaaagacataacgattcgctgtcgattgaaaggatgtcgtttctattaattcaatccgtttgcaactgatataagcgacaccggatgcgcagaggtagtcttggattcccttggaaacaagcaatccccgcaccacaccatcactcaccagatcggattgcatggacgacagcgcttcctcaatcccgtcttgctggtactcgaggtcttcgatggtcggctttataccggagaagtatagtagtttcttcatttgcttttcttagtccacgaataatatttgcgtttgggtgtgcgcgggtttaaagtcatatatcgcttgttgcaattgctcgcgccggtgttccggcagtccattgctgccaatactcaccgtaaagcagaaattccagaccagctcactggcacggtagacccgattctggcggtattcgacatagtcggttttaccggcatcctcttcggaaaagagatgcgtcagattgatttccgcttccagcggttgatcgttaatagacagcaaaatcattccctgcgggtcggcataactttcgacgatctcccggcagacaaaaccgtgcgattcaattaatgcctttaatcccggcttggtgccaatccaccggcaggtattcggccaatcggtgagccgaagagccagtgactcattcgattctaccggataacggcgagtcccgcgtccgagggcaatggtatcgagatcgctattacgttccggcaatgcgtaataaccatcgtccggctccactacctgcgcataccatgacaaccgaattctgcggatatcgcttttcgcatcgtcgagcacttctccaatcgccgagagtaacccgtacaaagcactattttctgtgtccttttgtttgcggataccgggcaacagcatccagaggaaatcgccgatcacactcatcagtagaaattctcccgcttgagtgccggaacggattcgccatcggtggtctcgactggttcgataatgataccagtgtcctggtaactgcgtcccttgaggaaatgctcgatagtaagcgctcccagttccaaaaattcagtgggaccacagagcagatcctgcgcaggcaagagtaatcggacgttgtacacgccatcgatattcagaatcgcttgcagcaagcgcgcaactaacaatccctcacccaacagcaatttgtcagtgtgaatttgaatcacttgacgcgctgtattatcgatggtttcacgatcggcatcagagaagcgccatacattgaccgatacgtcgatggtgcgcttgctgggacccacgacccgtacgtcactagtgagtggtttacgttgccgcagatagagcaatacatccgacaacaattgcgatgatggcatgccatcgacacccaagaccacaactccaaccgtcccgggtccaaagggaaaatcatcgaggatctgtaccgaccgaacacccgggactgacaatgcccattgctcgtaggcggcacggttaccaccgacaccgattgcctgccacgcaagttgggcacgcttgcgcaatgcaccatcagtctcgatgtcactcccctcgcgatagagggttgataccgttttcccatttgcgagtaaaaaatcgtcattgatgacactggtaattccggagatcgatgtcaccagtcgcgtaaccgttccactaccaatgttgtaagcagtgccaatcgcttccgcttccgccagcacccgaacgaatgattcatttgcaggaattgtcgccggttgtatcgtcgaaaaccggtattcattaccggatgaatcagctcggcttttgacaatattacctgccggaatcgtcaagggatttgctgatgccgtccgattgaatgtgatccagagttgcgctttattgccgggcaaccgttcgactccgcactcgcgtgcgcgcaggtcgagccattcaccggtggcgctcatcagaaagccctgttgtgccaccttgaatacaaagttgtacagcgatgcgatgacatacgcgaaaatctccagcagattgcggattccgctcgaggtcgagaaattggtgaatggtgttttacttgcaacccgttcaatcaattcatcgcgaatgtcagtgtacgatttcactttgttgcattccgtttcaaatcatcgatactctttattccataaccccaaacgagtgtatgggtgtcttcgtcaccgaccgcttgaaaacttgcccgaaacgatttctcaatactttcaaacgagatcgcttccacccgaatcgtcgaggcaacaacgcggggatcgcgctcgatggtctgtgtgatatagcgctgtgccagtgcccggttgagcggagtgtcgttgcatcctagcataccaagcaatccgcaaccgtattcaggatgcggaaatagttctcccggtagggtgcgcaatgcatcggcgagatcgtggagcagacagtcgcgtccggttacgagggcaaaatctccagtcgccgaaacgacaaggtcgccatcattatcgaatgctaaatcggtgccgagatgctcaaacataaaaaatcctacattattgctatacccattgttacccatatagacccattaaatttgcagtcgcggtacttattgggtataattggatataattgtgtatcaaattggattacccatgtctatcacactcactccccagattgtccgactcatcgctgaaatcgatgagttcaagggttactggcgcggagtttcttcattatcgaccgatgcgctgcgaaccctccggatgtttgcaaccatcgaatcgattggttcttcgacgcgaatcgaaggggcaaaactttccaattcagaagtggaaatgctcctgcgcggcatcgatattcattctttccgcaaccgtgacgaagaagaagtcgccggatacgctgatgcgatgcgattgataaccgagtcgtttgctgaaatcgacttgaccgaaaaccacgtgaagcaattgcataaaattttgcttgcgcattccagcaaggatcagtggcatctcggcgaatacaaacagcatcccaaccatgtctcggcattcgacgaaaccggtcacgaagtcggtgtgattttcgaaacatcttcaccgttggaaactccgcatttgatgcgcgaactaattgccgatatcggacaacgcttaagggcagaatcggaacacccgttattgacaatctccgagttcacggttcgttttctcgccattcatccctttcaagatggcaatggacgcgtctcgcgcgtgcttaccaacctattgttgttgcgtgccggatacgactatgtccagtacagttcactcgaacaacaaattgaactgcaaaagcaggactattatctggcgctacgaaagacccaattagacctctgcgatcccgcttggaatgagttcttcctgctcacactcaagcggcaaaaggatcgtttactcgagcgggtcgaatcgcaacgcgagcaacagtcgttaccgattcccgaagcaattatccgcctagtcaaagagcgtggtcgtattacgatgtcggatgttgtcagccattaccggttcaaccgcaacacgatcaaaaagcatttggaagccctcgttcgtagcggacaactgataccgcacggaaaaggacgtggtgtttattacaccattgtctaaagcgacaacaagacaatgaatcactccgtcttagcgacctgcgataacagcgagtcgctcattggttcgatcggtggtgacgtcggagaaccgagattgcctgtatgggtgtgggtgttgaaaaaagtcataaatgaatcacctaacacgactttctcctgcgcactcgcacccaactcgacatgcggtgacgacaacggtcctaacagatcggaagaacatgtgcagcatttttccatacgtttggtttcttcgatagttaggcggaatgacgtcagaacatgatccaacacacacctgtggtgcgcaccagaatttccgagacactgattcggaaattcgcctaactcttggctttctctacctgtcattgcacagaccatgttcagactaacacccgcgacactgccaggttctcaccagctcccaatgcccgtagaatagtgactctgcgattgagttcggcactgcgtcgttgtaactcttgtgttttcgcaccgacactgcgaccctctgcgatggtttgcgaaaattttccggcatgttcctactattcatcgggtagtatctccgccgatggacctaaaccgatcagagccggatcgattggcactggaactttgccgcctttcgagtacatccgtacttgctgaataatctcgaccgcatactcggcaggtgatttcggacctgccgcaccctcgccatcaaccacccgttggtcacggtttacacggattgccgcaaggtgccgcgtgaacgcgcgtgatagatcgtcgatagtcgaactggaagcatcgccccacaacgcacgcagcaaacggatataggtaatcgcggcaagttgcgcatgccgcaggtcgctcgccttattcagatcggggaagacctcgtacaaatcggcaaggaacaaatcgaacgctttcttttcgcgctcatcctgtagctccggtaaatacgcaccatgaataacagcattgcgatttcccggacgcgccatgatcgcgccttcgtatttgccaccatgaaaccggcacctgccattcgcctgtgctggttgtcggcattgagttcctttcttcgtgacgacaccacagacggtattaccattcagagtacctgtaacacctgagcgttcttgcgtatctggaaccagcgcagttagcgagcgcgccttgacgcggtgctttttactggaagtactgtcattattggatttcttcattaccggtttccattcgaatcatggtggtgaatgaaattctttttgttattctcttcagaccttttcgtacctgattcagaccttataacctgaggtctgtactcgcattcgctgtaggaatcggacgttgcgatggcgagcagacctctgcacaccttatcgtataacctgttctcacccgcgcgggcacaggcacgcacgctcgcaggaggggtacaatcgaggtctgctgaggtctgcatacgaccggaaaagcgcatccagtaaggattccggtgtgcagaccttgctgcatacatctgcagaccttgacggaatgacaagcatttacctgcgttcaaggtctgccgcacaaacggttgagtgcgctggttcatgcattctccggcgtgaggaaataaaaattgtagcggctctgactcaccccttcggtcgcctgccggatgcggtaaccggcgaagttgcggtcgaccattctgcgcagggcatgtcccagcttggtctgttgcgagcgggtcgtaccgtcgctgcgcaaggcagcgagcaattcattcgtttcgcagaattcattcaactcggaaatcttgactggtttttcccggtacttttcccaccatgccgagacaaattctcgccagatcgcatggtcgggatcggcagattcgtattgcgactgcagattaccgagaaaaccgggtatcccaaccacatcgagaatgccaccgatcatttgcgaccaatgctcgaacgaaccgagcggtttggtatagggcggcatgcccgcatcgacccatgcctgaatgagtactaggattgcgtgcaccaattcgcgtcgctgtttgcgtacccatagcggcaaatcggcatgtttaaatttctccctcagccacggttgctcgaggtgaggatcgatccggcagcgcaccatccgccggattaaatccagcgacatcttcagattgttgccggtcataagccagagtgcatgattgcgaatcgatattttagtggttgcccctagtaagcggtcagaccaaaccgttgaggtcaaaactgttgccagattggtactgttgagtgagcgctgctcgttaatattatcgagtaagattatggaatcgtctttcagcaattcggcagtgatcgctttgcggaactcgtcttcgtcattaggtattgtgcgggcaccggtaatactgccggtggcaatgagggaaataatgttacaaagcagccctttacccgaaccgggcaccggcgattcgatcaaatggagtggcgaacaaccttgtatcaagggtcggatgaatggttggaacaatgccgctaccgcatgcgcgcggtcgctgtcagtaacaaacggaaaatcgaccagtaactcatccagtaaataatcgcgcgccgatttaatttctttcggagagggatgcgatggcacagcaattccggtgagattgtccgggaggtgaacatagagatgttcctccggataataaccgggggtattgagtaaaataccattggcggcaaagaccggggtctggacaatatcgtcgaaccacggaatgcgctcatcgatttcccgcgtaatgtcgcgcgcaatgtcgtgcggtggttggctgtcggagattccggtttcggtcatacgaacccaacgggcacaccggaatagcagaccgaagatatcgacatcatcgaggatttgtggataagctttgtcttcggtagtattgattttgatgcggatgaggtgattcgttcgccgaaaaacgcgcggtggttgattcgcagcaatgagtgcgtcccaagcatcggacaagatcacagaaagttgccggttgttgacgacaatttccggcaaatcatttgcaggttctgtggtcgcttgccgcgttggtagcggtatacctgtttgccgggaaatccattggcaggaatcgcggaaatgtttcgctttaccaatccgaataaggaaatcgaagaccgagatcgtttcaccggtgagaaaggaatgaaacgatccacgctcgatagtaccggtgccggtcgccactcccgccgatggattgcggtcgccggtgggggaagccgggtcgcggcattccaaccattccgcaccggattgactgccagtcaataaatcaccataaacatcggtcagtgtgagtttctctagtgcagtagttcgccattcgtcccattccgatgtggtggtctttgtcgggtgtggcgacggtgtcgttgcggtgttccgacgggtgggtgccaattctggtgaattgcgatggtgtgccgttaatgtctgttccaactgtttcggggaaacggtatcgaattgttccggtagaaatggatcgagttttcccaacatggatgcgatataaaattcgttaccaccaggcgctgcttgatgccaccatgggagccatagcaaattgccatagccttcgggtttgattgttgcttgtttcggaaatacctcgatgccgcgattcactttagcatcggcagattcgccgttagcgagtcgtgcatcttccgggtaaagcgccagacccagttgtcttgccataaatgccggaaccattggttcgaataaaacccacaggtgccacccttgaccaccacccgagcgttcgatgtaagaaggaatcccaaaatcgtttgcgcatcgctgtgacaataatactgcttgtttgggatcgaccagtccattgggatgttccggtccgccatcgaaatcgatgcaaagccatttcgttaatccttcggcatttggtgtgtaggaaccaatgcgaaagtgtccagtaactttcgttgtcccccggctgtggatcgattcgatagttactttcggaagttccttaccgcgaacatgtgccgccagaagcgcggggagcaactcaccggcgagcgccggattcggtttgccagagccattgcgaaacgccactttgtcggtgcgcgagaagaaataatgctgcaataattcgacacaatggtcacgcatgattttgccttgcttcatgaatagttcccaattttcggatcagttcgcggtacaaatcgtcatcgactggtaacggcagttgttcgcggtacgcattcagaatcagtagcaatgcatctgcttcctccggcgtcaattcgatacaaatcgttgccgtcaattgcacattcggttttagctcactcattcgaaacaccctgcccgatccgcgacggagcaagttccttttcatcggtatcttcagatatgtgagaattggatagactcattttttactgctttccattttaatttctgtgatggcggtttgaatacgatcatgctcgcgttgcagacgttccagtcgtaaccgttccgcaaggacgaggtcgcgggtccgacgaattgattccaattcacgaatctgctccgcagccatatcgcggatttggatcagtcgcttagtctgttcaaacttttcgtccactccattgcaccagcacatttcgatttccctatttgtctgcgacgtaagaattgattcatcgcaagtgtccgaaacgactaaacgcaatcatcgtgccaagattgtccggaatgttgtaagtactggaagatgctaatggtgctggtttccgggagtcgttaatgtgaggaatatcataacccgctatgaaccggagcgcctattttgctcgtttttaggggtttatccaccgctcattttaggcactgtcaagcaggcattgagttagagaccgcttattttaggcggtggatatttttttcaccgctatgaagtgttactgattacagaacgaccgccgaaaatgaacgtttttaccaaaattcagcgctcattttgaacggtcgtcagacagggcttggctttgcgaccgcctattttaagcggtggataactcgttttgttttccgcagtaatacctcctcttgatttcctcgctacttaccgtttctgattacatcaattctgtcataaaaaaaactggcacgccggttgccttaatagagtgcagtattgattgatcggaaaaaggtaatgaaaaattcaaaaacattaactgcacacggaatacaacagaccgagataaaactcattgcgatgtatcgcactccgaacgaagaggaaatggaacgtcagcatctcgcgtttcgagtgttggcaaaatggtcattgtctacagcgttacagcgacagtctaatgcaggcgcacgcaatcctccggcagccggagcgcccgaccccgccttgacttcgacaccccttgattgcacccttccagcactcaataacgattcaactggaggagtacgataatggttctgagtaataacaactatcatccggcggtgggatacttgagacgttccaccgatcggcaggaacaatccatcggagatcaacgccgcaccatcgaaggttacgctctcaatcatgggattgagatattgaacttctacaccgacgatgcgattagcggagcatcgaccgatggacgaacagcattcttgaaattgatcgcggacgcgaaactgaaatcgtgtccgttcaagcaggtcctcgtgtacgatataaagcggtttggaagagtcgataatgacgaggcgggatactaccggcatcaactgaaaacacgtggtatcgagatcatatatgtgtcggagggattcaacggtgacgataccgacgatttactgcgtccggtcaagcaatggcaagcccggcaagagttgaaagacctgtcgaaagtaacgatacgcggattattgactcgcgccgaaggtgggtggtggctcggtggagttccaccattcggttacgatctggcgtattattctcgcaccaacgagtacctctgtactgtgcggtttatgtccgatggttcgcgtagcatattaaacgagcagggagaattggttcgtgcggttccgaaaggagactcactccaatttaccaagcgtgaccgttctcgattagttttgagttcacctgagcggattcaacttgtgaaaacgatgtacgattggtatgtcgtcgatggtatcgggttcaaaggtatcgcaaagcgtctcaaccagcaagagaccgaccgaccgtttggtaattttcgtgctccgaattttaaagacggatggggacaatcgtctatcgcggtgattctgaaaaacccgatctacaccggcgatatggtgtggaaccgcacatcgttcgccaagttccaccgtatctcaaatcatgccgccattccgatccgtaattttccgggacactctcctttgaagaatggggaggaagattggatcgtgacacgcgatgcgcatccggcaattatcacccggacccgatacgatgaatcccagaaacgtcgcgaatacacttccaagaatggaaatggcaatacatacaactgcggtcgcggagcacgttcgccatttttactcaccggcatgatacattgcgaacaatgcggtcacaattggatcggatacaccattcagaaaggacgcaaacgactcgatggatcgaatgtcaagactctgtattactgttgtaatggatacgtgaccaaggggcagaaagtatgtaaacggcatttaatcgggaaagaaaaattggagcaatgggtggttgagaaaatcgacgcgatgctccagaaacatttttgtacaccggagggcatccaaaatctgcggagcatggtcgagcgtatcgcgattgagatgacaccacaactcggcgacgaaatcgatcaggttcacaaccgtattcgtgagataaaaacgacaacaaataatctcatcgataatcttacctcggctaaccgggattacgtcgacgtccgattgcttgaattaaaacgggagctggcggtactcgagtcgaagcaattagaacttgcctccgccgggagtaaccggattgaagcgggacgcgtcatcgagcaggcaatcgagctggcgaagaatttcaagcaagtattcgagtcgggaacaatcgaggagaagcgattgtttattcgggcgttcgtggaaaagattcagagtgatccggtgagttcctcattcaccgccgattttgtactgatacccgggttgaaagagacagcgggtatggagagtgtagtagaaacggttattgggaatgtataaagaaaccgccccacgggctgtgaggcggtcaaatatattgttccgattacttactttaccattactgacttttgcgtggccgaaaacatccctgcattcatgtgtataaagtacacaccggaactgactttctgtccgcttgagttttttccatcccagtctataagatacttgcctgcttggaaatccttgtttgcaatcgtagctacctcacgcccaagacgatcatacacttccaaaacaacgtggtgattaactggaacactgaatttaattcttgttgtcgagttgaatggattgggatatggttttgccaatgaaaactcggtcgggagcgtcgggtcttgtttgtgcatcgactgatacgaccgctgattaatcagctgtgttaattgaagaacatgctcgcgatatgtttcaagtcgttcacttgaattacctaaactctgtgtggtattgccaccagaacgcatacctcgcaaaatattcgttaattcaatgttgagaacagcaactactgaatctgttaagcgtggtgcctgtacgcgagcgctatcgaattcccttaaagcactatcatacgagcgtgtatagtcgagacaccaactagcatttcgttcgagaactcgtcgatatgccgaactatgtaaaatagactccgttagtaaccattgtcgtaaactatcctgtgataacccagtttgattccaacattcacagagttgaccgattgcaaagtaaccatcagcagaatcagcatattctgaaattattgattggaaaattggaattgcctcgataaaacgtccggagtctttaagtgctaatgcattcatcaactcattgacatccaaaattcgatttggtaaggtatcgggtacaccccaattaaccaatgtatcatacgtggtgtggtttttctcatcggtaactgtttgaacgtcggaaccgaaatagttattacacacggatatctttgccgaattattgaataccgcaaacctgcaatcataaggctgaccaggtgtgcgtttatcgtaaatatccgcatgactttccttcatgagcgggtacgattctccggttaagagcagttctgcctgattgtaaggagaaccggttgttggcccgttgttcatgaagatgttgacagaagatccactcttgcgaatatcgggggacgcgccaagacagtaaaccccaggaaaacccaaagacccattattacgaatcacattgttcatcaataaggggttgcatacatatatgtataacccgtatccaccacagttttcgatacatgaattcgttaagtcgaaagccccattgtaaatctgacacccatggaagatcatatttcgaatagtatcagatttcattgaaacataactcccatatactacgactcccatttcgccatcactaattgtgacaaaattgggagaaataccgtatggtccgcttaaccaatcgaattccattcctgtgagtgcatggcgaattactacatgtccaaaaatagaatgttgtgcatcgaaatttccagaaaatatgatcccttgccagtattcgcccgaccagtcatttaagtgatatacatcgaaaaagattttaccatacgtactgccattgcagataattccacctttgacagtaaccgagtgcccttgatcgagaaacacatgaacaccagaaagaatagtcaatctggcattgttataaatgaaaagatcaccattaacatgtacatctcttgtaatcgttgtatcgtgcgtaatttgcccggaaataactgtaataaatgggcttcctccgactatgtcagaagggccgccacaattcagttttgcattcggcccaccacagcaaccaagatcattcctgggattattcgtttcaggatatagatcatggaaaaacgttaaagaatcgccttgatcgataccaggtgaatttgcggtaagaacaaaatcatgccaattccaacagagtggattcataaactcaggactactgattcgtgcaccagtaccacccggaatctgattaaaatgcagattgtctttctgttgataataggtgtatcgaacctgaaattgattaacaccacctaagcatttcaaatcgaattcaccgtttcgattccggacatacacacagttatcagttacaaattgattagcaactgtaggggtatcaattaatacagttgcatgcgcggaatcggcgagcatatctgctgacaaatagttgtgatacagaattgaattgctgagacgaattccaccagatctcgatgtaactcccgataactcggagcgatcaatcacacaattccatacccaaggcaaattgcaattcgttagcgagtcagggttactataactatcaccacctaaagcaactataccaatagaattattatatattcgattgcggagataagacccatacggatgattgtcgaaaaagagacctggtgaagactggattgtagttttgccatcgttacccggaatacgatgtaacatgaaatttgaatcaattaggcaatcgcgcaccagcggtgacgcacctgtcgagaccttgatgccgatagcattgtatcgaatatgacaagtatcaattgaaatacgcgagtgattttgtacccagatacctccgcctttcaaaccctgtagtaccacgccactgtcacaattgatcgaaacatcggcgctcgcattaggatttttgtaaatataacttcgagatacggcaacggagaaaaatgtattatcattgggtgtgagtgtatcgtgttgtgcgttgttgactgtatcgcagaaaaagatcataccccaaccgtatccgttagatggtttatggctttcaggtgaatacccatgcccgttacacgttgatgtacacgagtcgattaataaattatgaaccattcgaaaatgaaatccagcataaccattggtcgaatcgccgtaatctgcctgcgaacaacaggttgcataacaattcgagaatcgactcgaattcgtacgattaaccgaccatccatcttgttgaacaaacgcaacaaatgaagaactgtcgtaacaatgttgcgagctgtcaataaagactcctacaagcgaggtgatgtcggatggtgcagtaacaatactatcaaagctcatgaaaatgctgtcacaatgaacgatcgaaatgccgaatgaatcgaagtttgctatattattttcggtaattgtcattaactgagagttcgcaagcacgagtggataagtaacgatatattcagggttgcttatggaattcaagaggaactgacccgatctgtcacctgaacacatgacattgcacgacaaaaactgtgaattcgaaataagagcatttcttgaagtggttgaatgaatcgccactgtttgatcccctggcgtgtagggaccgttgttaccaaaaaaggagcaggaatcgattacaacattctttgtcgaatccaataaaatgagtgttttagcggacggtagattgttcaaattcggatagatcaaataatcatccggataattgatgctacagttattcaaatgcagaattgcagtatctaggttcgcttttacccggatgacgatgttcgaatcgaacgtacttggatatacatttagtgaatcatggctataaatatagcagtgctggagccagctggatgcgtgcggatgatcgaaattgaattgaatcatgtgtgcgtaacggcgactatcaataattccgttgaagagaataggcgatgatgaagttccattagcatgaatgctaccgccgtcgctgatcaaaatcacttttttctttcttagtgaatttgtttgattaaccagagtgcttgtatcacacagaatcttgacacctgcctgaatcgtcaaagtgctagttaccttgattgtatcggggtttctactatctccgacaatcacatatatactgtctggcactaatgttcgcgctgtcatgtcgacatttgcacgcaaaaatgagattggttgggcgtaagcgctgtgaaatactacacaaagcatcaaataaagaactacggaaaaagttgaaaaacgagacatcgaatcctcctcatgctcatttgagcaacaaaatcggaaatcgtgcattctccccgccaacctgtacaaagtataatccggtcggcagggtgtctgggcaccggattgtaaaagagtttttaccggcgataacatgcaaaaactggtgaagaatcgtttgtccaagacaattgtaaaaagtcaattccataccatttgcacgtgggctttgaatcgtaaccttgaacatcccgttggtcggattgggatagggcttcccaaccgaaaaagttgtcggtaaagctgttacggtttcttttactgctgagacagacgtatcaatttcccacggtccgatatcaggagcggagccaaggtagggcaagctatcaaaaacaccaccatttcgaatcggtgaatggagagcgaactgccaagggatggttgtggaatcggtgaacagaggattctgaaagaggtttccgaaaaagtcagttgaatcgccattccgattaattcttgtgagttgcccgaagcgtacatcttgtaattgatttgtgtcgcactgccaaaacaggcaaccgcgaacatcgtattgtggtacagcattattgtactgacgtaaaggtcgtatagtattcaagaataaagaattcacaactgtcacaggtgggaggggactgggtatagaattcacggttttcgtgatgacggattgagcacctatcagcaagtttcgttttagttgtatggtaacgcttccatcataagtttgaaaagagttgtaaaataccgaatgggttaccttaaccgaatcatcaagctcaataccagcattcataaacatacaactatcaattaagtaagaagcatgatggtagaaatcgtatatttctaaaaaacaacgaaaatggaattttgtacttattattgcaactgaatccgaatctgcaaagaattcgatgccaccataagtgtaataagggtatctaaagaactctgaactacgaagtaaatttgtgcctttcgtagaaagtaataacagaaccggtagtctcgaacttcgcaaaactaaactgccattacctctcttcgtcaagtaaaatccttctgtcgtatccaaattccaataatccgcgagtaaacttccccctgaatcgacaaccatacttccaatccaagcatgagcatcaaacggaaacacctgttgaaaacgaacactgtcattgggtgttccgttgatttgaagcgtcccgtatacttgccataccggttgtgtcccgggtgttaacgtatgatacaccgtgacgccagaatctattttaacggtatcaccgcgcggaattgttaccggacgacaaatccaataaggactgtgtgctctggtgagtactgtatcatgcagtatcgacggtaaactcggatagaaccggtaaccgatcgataccgtatccggcattgtcactccgttcgcaacaatcatacggtatgttccacttgctaatgaatcgccatttgcatgcagagctatttgcaatgtatcccaactccgaactggttgccggaaattgacgagcggtgttggacccaatgtcggaagtacctgtactgaaacactcggtaaggtatcccatagtgtcacgacataatttttaagcgtatcggaagtgaatacccaggattgtcttcttgttgtatcctgccatgcctcaattggatgaatcgcgcgatggtcgaacggtatcgcaccgcagtcggcgcaactgctgtcggcatcatgtggtaataaaggatctgcaccatcaattgctatcgaatagagtcgtagtgaatcgtttccagaacttatgttttgtaatcgtagccatccgattcgattcgtactgtctgctgtaacattgtaaaacggacgtggagattgaaatgcattataacgtagaatcggtggtgaagcgccatttccccgaacaataataggatgagtggcgtgatagagcacgctgttttggatggttaccggacgagtatttccttcgccaatttggatcaatgctgtatcgcggggaaaaaaccactggcgctgaacaattgtacagcggtcgataagggcttgtgtgttgctaaactgaagacaagcaaaaggagaaacatcggatgtgggagtttggttataaaaaacggaattccgaatggttgcctgcgagttattgatgagaatcaattcaagcgtcggcccccttgtcgaatcaatctgaacagtaagaccgttgccatttgacggccatactgcaacatataaccaagaatccaaaacacagtgattcacagtaatcgtactgccagaaccctcgtaccaaagttgacgcaattggcaatcaataaaggtgctgctatgtccaccattcgcatcggcgatccgtaccgaaggatggccggttacgcgggtaagagaaaccgatacactctcgccgccaagattaccaccagcggcaaaatgtacatctgtcattaccgtggggttaccactaactgaattcccatatacaaagagacagttcgtgtatgtacctgtaccaaagaattgaacgccatccaaactttcaatccgacagtttgtgagcgttccgctgccatcacagtaactacttacattgtcgataaaccaacaagaatccgctgtaatcgaactactatgacttgcgaaggaacaattgttgtcgaaaaagcagtgatgtaaatcaatcggtgagttgaccgcataaatcccatattgtgcgccgatgaacgaggcatatcgtatagtaggaagatgagtaccagaatgaaaattcaaacaccaccattgcacatttgccgactccggtgcaaagaaaactgaatcaccaagtgtgccgagaacttggagtgtgccgttaattgtaattatcatgtttcggcgaaaaagaatgttgacgcctgcttgaagcgtcaattgcgaatcggtggcaacccaacagctgtcggtaacgatataaggattaccgattcgggttaatgttccagataaggaaccggagagtaaagtttgagcttgcgccgtaggaattagtgcgacgaaaagaaggacaacacatacaactgcagaatatttaccgcagataaccatcaatttgtcttccacttgaaggaaagaatgattttcgagaatattaagctttacaaaatataaactcttgtgaatgtaatgtcaagcaaatctaggctgaattgttaagtaaaaacgtcatattaattctggatagacgaaaacctgcctctattttttgatctgcgaagtacgatccccaaaatcaaaggacaactggctgaggtgacacaactctttttacactgagtgtggaattggcggctttttctgagaagatgatatcttgaaacccagtcccggcgcgggttgtatttttgtctactgcgaggttatgacattcgtcacaaaatcgagcgcgatgcaccggttctgaatacattttttctgtcatcttttctgtccatatcgaccctatgattttcgtcacttttgaccggaaccgagaggcgagggcataaaaaaagacacaaggtaaataccttatgtcttctttaattatggtagcgggggtaggatttgaacctacgacctttgggttatgagcccaacgagctaccagactgctccaccccgcgccaaggtctcattagtgagaccagccgttaatatagaccgttcaagtcaattacgcaactcggccaaaattgaacccgaaactagcttctatcactacgctctgataagattcggaataaccgatatttatcagcatcccttatgtgtataattgagttgaaaactgtatctccactaatcattattcgaatttacagagtagttcggtgcttctttcgtaatgataatgtcgtgtggatgtgactcacgcaggccggcactggtaatccgaacaaatttagcattcgtaattaagtcatgtattgtaggtgtgccgcaatatcccatcgcagctcgaagtccgcccatcaattgatgtacagtgtcagccagtggcccgcgataaggaacacgcccctcgataccttccggtacaagtttctccggttccgtgccgtgttgaaagtaacgatccgaagaacctttcttcattgccgccaatgagcccataccatgatacactttaaacgaacgcccctcaaaaaggatatgctcaccgggcgattcttccaccccggcaaacagagaaccaatcatgactgtttcagcacctgctgcaagcgctttcgcgatatcaccggagtacttgatgccaccgtccgcaattaccggaatattatgtttcgcagcttcttcagcactttccaatactgcagtaatctgtgctgctccgacacctgcgacgacacgcgtggtgcaaatcgaaccgggaccaactccgatttttaccgcatccactcccgcagaaattaagtccgcgaccccttcctttgtaacaacattccctgcgactaaatcaattttcggaaacaattcgcgtaaagattcgaccgttttaattacaccgatgctgtgtccatgtgcagaatcgacaataatcacatcgcaacccgcttcaataagcaggcttgctcgttcgatagtagcgtcaccgacgccgactgccgcacctacccgcagacgtccatgtgaatctttacatgctatcgggaattgccgttttcggaggatgtcctttacggtgattaagccaacgagtttaccttcatcatctactaatggtaatttctcgacacggtgttgttgcaggatttccactgcgtcgtcaagcgacattcctggacgaccagtaattaatttccgtgtcatcaccttctttactttttcatcaaggcgtgtttcaaaccgtaaatcacgattagtcaacataccgactaacttgccatgatcgacgaccgggaagccagatacaccggtttccgccattaactgaagtgcctgagcgatggtcttttcaggggaaagtgtgataggttttgcgacaatcgcagattccgagcgtttcacccgatcaacttcaacagcttgttcctgcggggtcatatttttatgaattataccaattccaccctcgcgggcgatagcgatagctaacggagcagtagtaactgtgtccatcgctgcggaaacaatcggaaggtttaggcgaatatttttcgttagacgagtcgaaagctccacatcccgcggcacaacttccgatttagctggtataaggagtacatcgtcgaaagtaagtgtttcacctaagatttttttgtgtaaagtgctcatattatttccttttcttacaatatttccgaaatgcggaacgcatctttttctaccaaccggcggcacggaacgacatccataccataccaatcgcttttacctttaccaaccagtaccatacacctatactgctaccggccaacacgacaatcaataggaaagtagccgcccgcgttgaatttctaaatgcagttagtatagcggtaatgtcacggtacaaaccccatagcagaaagaagaatgccactaccaaccaaccgatactgatagaatgtgcagaaagttgtccgaccaaaatcaaactaagcggtagtaatagtaagtggttagcgaaaccccatgtgagatatgaaattgctttggtaagtgcaattctttgacgggtaaaaatcgaaacgaatgataatataattccaaagatgcctgcaattacggtaaagaaaactaatagaaacgcaatacaaatcgcaggattccagattatcaggttagcccagactttaacaatggggttaccgataagtgtagtaagaaatacatcgaacgagtaatcgtgccgtagcccaaaaatggttgcagcaccaagtgttgcagttattagtgaaattaacaaaccaatgattacagtttcaccaaattggaatatccgaccatcacggacatcagtaaagaaaccacctggatgtaaaagactccgtgtgacgtgcattcgcagtactttattttgaccgacggaaaatgcgaaaagcagtaacacaagcaaaccagagacgatgaaagttgccgcgctcgaggcgggtgcatcactgaccggtgtgggtttgaccggtataccgtttaaataatctcgcaatgtcacaaaagtcgtacgttcattgcgttgataagaaatcactccaaccggtaatgtgtatggtgattcatcaggtgttcgatttaaaagcggatactgggtttgatagtcatttaaaccgcctaacacaaagccagcgcaagaatgaacggcagtttggtcaagcgtttttatcaacgacaaggattgacgcaattcggaagcagcatcgtttcctttttgcgttagtgggtcgagtaaaatacctatggtacccgctaacaatggactagcaccttccggcaacgtgagattctgtgcagtcaggccgggtaatcgctcccatatctggaaatcggctattcttgtagttagcggttttggagttgaaagaaatactaaatgtccggtttcgtgacgaattttttgaaagatatctgcgtattcttcatctaaatcatcagttgggagtccaaacccgggactaacgccgagtatggatgggtggttgccagaatgatccgcgaattgacgtaaaatagagacgatgtactggcgaaattcttcaccacgtaggatgcgggcaggaggaagcgaaaccggtgtttccaccaataaatacaagccatagcggtcagccaggtgaattagataaggatggggaagttttccgattatgcgtagtgtattcagaccaagtgattttgctgcaaaaatgtcacgttcgagttgaaagggagttgctgaccaccccgtctcgggaaattcttcgacataattggcagctactatttttattggttgaccggagtgtgtaaaaaaaccggaaggtgtaacttcaatgtcccggaaaccgacatattcagtaatctcatgaagaagttgctcttggtcatataaccgcaaatttaaacgataaagattgggttgtaccggactccaagacagtacattcggaacagtatatgtcgcagtaccttgtttgatagagcgttgcggtaattcgatgtcgatgctattcgacgcaatcaattcgtcggaagagaaaggagttagcgtccagcgtaattgcaattgtgtgggcgtgccggcaggtagcgcatacgaaggtaatggtttagaatcgcgaattaaataagtcaattgcaaacgtccaccgccggttccagcgacagtattcaccgaataagattcgatgcggcgtaaaggtagggcaagaagatacgcgtcgcgaaatatacccgagtaacgttttggtgtatagaaaccagccgggaggggaaactcatctgaccggctcacttctgcttgcagttcaatgcttaaagtgttgtcggtatcgtaacggagttgattcgggggaatgtcgataaacatcgcatcagcgccacgtccgagcgccaagaactcaccgtttaatgtgacggaagcatcttgtccgatgccgaggaaaattaagcgaaattgataattagccagtcgagacggtacacgaaatatccgcgagattttgacgggatcggttccattgtaactgaacggaacgcggagggtagctggagtagagccaccgaaaatattccattcaccgtttaacgaaattattttcgtggaatcagttgtaccgtcgattccgattaaagcatcgaatggatgggtatccccgaatttaaattcttgcgcatttgcgatgaaaagcgtagtgaataggaggagaagtgtgataataaatctatacatggattgtttcagtgagattatcgaaaatgtgtagtaaagttacgaatatagagtaatcattaagatacgaaccaaagtaccagtattcctgctgctattcgataccaaccgaacggagaaagaccaccgcgttgaaggaatttgacaaaacctttgacggcaaaggcggcaactacggcgctggcaaccataccaacagtgaaaacgccgatactggcatgatggaagacttccttgtagctctttgccaattcaaatactgtcgcagctaagattacggggagtgcaagtaagaacgagtattccgcagccgccgcgagcgataaaccggcaagcatgccaccaagaattgtagccatagagcgggaagttcctggccaaagcgaagcaatctgcgctattcctataatcaaagccatcttccatgtcacttcaccaacactaacaccggatgttccactttttttacggtggatgcgctccaaaataatcatcaggataccgccaacgataagcgcaccagcgatagaggtcggattgaacaatttctctttgatagcgtggtgaaacaatacaccgacaaatgccgcgggacaaaaactgataaataggttcaaaatgagtttacgtccagccggatcggcatgaaccacaccattccacatttcagcgattcgttttcgatacagaccaataattgcgaggacagcggcaccctgaatgataacgttaaaatcatcgacggcatttttggcagattttgacattcccatccaatcggcagtcaggacaaggtgtccggtactggatacgggaagaaattcggtcaggccttcgacgataccgagaatcaatgcctgcaggtaggtgaattgatagactggttccgcaatgccagtatctactggggtttgcggggaaccagcgacggctaaaatgcaaatcggtagcaataacacggttataacgccaatactcagaccttttctcattttcacctttttatagataaatcaaggaaactattcccattccactgttgccggtggtttagatgtaatatcgtaaacaatacgattgacttgccggatttcattggtaatgcgattggcaacacgggcaaggaaatcccaagaaaaacgcgagaaatcggcagtcataaagtcgttggtgttgacgctccggatagcaacagcccgctcataggtgcggtaatcaccttgtacaccgacacttcggattggaagtagtacgacaaatgcctgtgaaacgtcgtggtacaatttatcgcgacgaagttcttcgatgaagatagcatcgcactcgcgcaaaatgtcaagcccctctttttcgacagcaccaagatagcgaacggccagaccggggccggggaaggggtgacggtcgacaaggtttgcgggtaaaccaagcgcacgacctacttttcggacttcatctttgaaaagctcgcggaggggctctaacaaaggaaaaggtagtatttcgggtaaaccaccaacgttatgatgggatttgatggtagcggaagggccgcgaacgggggaactttcgatgacatcggggtaaagggttccctgtgccagccatccgataccttcatgcttcttagcagcattggcaaaggtctcgatgaagacacggccgataattttacgtttcttttccggttcgctaactcccgctaactcgctcagaaattcatgttcggcgtttacgcgctcaattttcagacccaaatcgcggaatgccgcctcgacctgatccccttcattcttgcgtaagaggccgttatcgacaaaaatcggaaggagacggtcaccgatggcacgaccgagaagggcggcggtgactgacgaatcgacacctccggaaagaccgagtaaaacttttttatcgccgattcgttcggttaaatgccgcgtagcggtattgataaaggcttcagtcgtccaattccctttcgcgtggcagatatcatacaagaaattgtgcaggatagtgctaccaagcggagtgtgggttacttcagggtggaactgcacaccaaagcggtttttggcaatattttcgatgatacaatgggcggtactgccgctgctaccaatggtagtgtagccatcggggagttgcaggatgcggtcgccatggctcatccatacttcaaattcggctggaagcgaagtcaatagccgtgaggtgtgggtgtcagaaacaaaagcgcgaccaaattcacgatggtcgctgggttcgacctgaccgccggtctgatgggcaagcgcctgcaagccgtaacaaattcccaaaatcgggatatcccaatcgaggacgctaggatccagtaacggcgcaccattgtcatataccgatgcggggccgccggagagcaccaaaccgatgggttggcgggcagacagctcttcgcgggtgtaattgtggcgaacaatttcggaaaaaacgcctaattcgcggattcggcgggcgataagctgggtatattgcgagccgaaatcgaggacaagaatgcgctcgcccggttcggcaatggtttggatagcttcggattggtttgtgttcaagtgaaatcccggagtttctggtattacgtatggaacacaatctaatcggggaaggggggagataaaagtggcagcaccacgggcattttggggacgggggacgggggacaggggactggggtcggggaaaggaaggatattggattagagattcaggatttgggattcggttaggaaaagacgaaaaaaagaaaggttgaataatcaaaataatagaagtcgaaaaacggggaatttgttttgcgcgaaggagtcgcaataatggaaagaattgaataataaaagtttggaagggaaattggttgcgactaactcgcaataattggaaattgtatatataagatatatattttatattaaattgtggataactctcaaaaagttttcacaaacttttttgggacagagtacggaaaaggatggggggatagggaacaggtaatagggaatggggaaaagataaaaaaagaatggggcaatgagttcagggaagaacaaaaacaaaggagatgggaatgatacggaagaaattaatcaagttaggtggtagttatgctatcgttctcgataagtcgcttttgttgatgctgggcatcaaaccggagacgacattaaatgtcacgacggataactaccgtatcatgattgagtcaagtgagaatcggcgaaagcgactagcgagcgatgagtatctcaattcacttatgagccagcagggggtattgaaattgctcaatcgtgaggggctgaaggtagcggcaaaaaagaagtagggggaagatggttgccggtcgccagttaccggtaaaagatgtgggtgtactaagcttcaaaaatgactataaaaaaggctacaagcaaaagatcgtcacgtcatttcactacgtatctgcttcgcaggatacttcgtttcattcctcgcaaatctaattggacaggcaagagtgcctgtcctacgaatcgcctgacaagaatgtcggacgtactgttttaacgatgaccgtagtatattaggatgaataattggaaggatgtatgccgcgaattcgggtattgtcggaaatcgtagcgaaccgcatcgccgccggtgaagtggtcgagcgcccggcatcggtgctgaaagaactcgtcgaaaatgctatcgatgcggaatcgacgcgaatcgagattcagattcgaggtgcaggaaggaatctaattcaagttgtcgacaatggactcgggatggatcgcgaagatcttttattggcattcgaacgacacgcaacgagtaaaatccgccaatttgaagaccttgaagcactgttgacacttggtttccggggggaggcgctgccatccatcgcatcggtcgcacgagtggaagtgaagtcacgatccgcagatgaagagacgggatggtatcttgccatcgatgccgggcgtgtcgtacgaattgaacaaatcgcggtgccagtcggctcaacattcagcattaaaaatttgttttataatgttcccgcacgacgacgattcctcaaatcgaatgcaaccgaattcggacacattcacgtccggttcaaacgattcgcgttgtcacgccctgaaatagaatggaaatttaccaacgacgatgaagtgctctacacgctggctcccggtacattggaagagcgggttacacaggtattcggggaaaaagtcgcggcggatttgcgtcccatcggttgggaagagcaaggacttcgattgaccggaatggttggaacggcacctttactcaggatgcaacggggcgatcaacacctgtttctcaataaccggctcattcgctcaccgttcatcacgaatgccgtaacggcaggattgggacagattgcggaaccggggatgtttcccttctacattctgtttatcgagttgacgccgaaacaatttgatgtgaacgttcacccctcgaaagaagaagtaaagttcgataatgagccgttaattcgcagaattgtggtggatgcggtacgcgatgctttgcggagtggcgggttggaacaaccgacccaccggtttgaagaggagcacaccggaacaaaaacagtttcggaaaattacccggaaccgaatgtcgtacgtgagccgaacgcgccggtgaagcgaccttcggggttcttcgaccaaccacagggatatgtaccggtacggtatcgagaacgtccggcttcgcaatattcattactcgaaacaaaacgggattgggatactgcgacggggggcggcggggaactggcgagtgcggcggacgacacggcgttgcaacagctggcggcgggatttgagagaggcgaagcaagttcactgtggcagattcaagggaaatacatactcgtacaagtaccgtctgggttggtgattgtcgatcaacacgtcgcgcacgaacgaattttgtatgaacgggctgtgaaagagatgtcgagagatgggtggaaagttcaggagttgttgttcccggtagaaattacggcaagcccggatgatgtggcggtagcaggagaattgattgaggaatttgcgaagttgggatttcgaatcgcagtaaaagacgcaacgacattgattttgagcggcacaccgcaaggattgaagcacattacgcaagatgaagtgatggtaaaacagattttagatttgtaccgaagagattttgaagcgcgaccggaacagatggataggttagcggcaacatttgcatgcaaagcggcagtgaaagcgggaatgccgttggcaatatcggaaatgcagacgttattggaagaattgtttcggtgcgatttaccttacgtgtgtccacatggaagaccggttttaattcaactcacgatagatgaattagaccgacgttttgggcggtcgggcgggtgaaacgactgctgtgcatcgtgggaccgaccgggagcggaaagaccgcagtcggaatttgtgttgcggaaaaattgcatgcggaaattgtgtcggtagattcgcggcaagtgtatcgcggatttcggataggaacagcgcaaccgacgcaggaagaaaatgagcgagttgcgcatcacttagttgattttcaggatgcgaacatcccgtttacagcgggggcatatgcaaagctggcacgtgcgaaaataaacgaactgaagaaatatggaaagaatatcgttttggtcggaggatcgggactttattttcgcgcgttgttcgaagggttatttcaaggcccgccgattaatgaagcatatcgcagtgaactaagggaacgggcaaaaaaattcggcgtaccggcgttgcataacgaattgcttttactggacccaacgctcgcggtaaaaattcaaccgcatgactatccacgaatcgaacggggactggaagttttttatgcatcgggtacaccgctgtcgcaatggtgggaacagggttcagaaaggttcggtgatgagcctgtctatgtgggattgaagcgggaacggccgaatgtcattgaacgtatcgcacaacgaacacacgccatgttgcaagaggggtgggtggaagaagttgaggaactggtgcatgcggggtacggtgaagcgattgagcgggagaaatttcacgggtaccgggaactggcatcttacttgcgaaatgaagtgacgctggaagaagcggaaaacgcaatcaatattgtgacgcgacaatatgcaaagcggcaaatgagttggttcaggcatactgacggagtgcagtgggtggatgtaggtaaggatgatgcggcggaagttacggcggaaaaagttttagaaatttttcatcaaagagaagtagaatagaaatgaatctaattgaatgggtaatggaagcggcgaaagtggcgtcgttcagcagttacgaggagcgattgcatccactggtgaagagtgcggtggcgaagtgtccaggtgcgaagttggagattgtggcggataataatctgatggtgaccgtgccggggaagaagagtggagaagcaattgccgtaacggcacatttggataaaatcaatcatttcgggatggacaggacagacgaactctcggtagtgcgtgaagatgggaagttgacgggattattggatgatgcaaccggagtggggacgttgttgtatttgatacaagaatgttcgaagatggaaacaccgacgctgtactttttgttctcggaaatggaagaagggacggggctgaaacaagcgccgagtttgttgaagaacaatggtgaggggtactcacacgggatgggagcgcgacgtttggcggcaaatttagtgaaaacgaagcgattgccgaaagtcgtgattacggtggatacgacaccgtttttcaagggggagcggggtgtcgcattatatagccggcattgggaattcaatggactgacaccgacaacagaattaatagaaaaaacggctatgattgaagaatggttcgcgaaaatgtatccagatgttgtgcataggaacaatacaaacgattatctcgaatacggcaaaatattgaatgaaggtacaggacgagcgataccatcgattgcgattgaaccggcgatatttccgtaccattgcgcggacgaaggggttttcgaatcagatattgaacgggtagcggaaattgtaaccagtatgttgtatctttgattatcttataaccgataaattcacactacacccaatacctaaacttactttatggcaggaacacgtgagaattggggaagccggatcggcattattttggccgtcgccggtggcgccgcgggtctcggaaatttcctgcggttccccactcaagtcgtacaaaatggcggcggtgctttcatggtgccgtacttcatcgcgttcctttttttagggataccgattgcatttgccgaatggacactggggcgattcagcggtcagtacggacgtgggtcggcaccgggggtgttccatgtaattgcacgaaaaccgtgggcaaagtacgctggaattttcggattattcgttccactcgtcatcaacttctactacctcatcattgaatcgtggtgcctcgcatacgccgcgtttagtgtcatcggatggttgggaaatatcaccaatccggcagacatgaaagatttcctacaggaatttcaaggattgttaccaccgcgccagttggggacatttccgtgggcgttgatgtttttcggaataacgtttattgcgaattattggattgtgtcgagaggaattgttgcgggaatcgaacggttaaataaaatttgtatgccgttgcttttgatactcgcgatatttttgacagtgcgggtattcatgttagggacgccggacccggcatttccggaacagaatattgtcaatggacttggatttttgtggaacccgaactttcatgcactattgaatgtagatgtatgggtggcggcggcgggacagattttcttcacgctgtcagtaggtgtaggggcgatactcgcatactcgagttacttgaaaaagaatgacgatattgcgcattcagcgctctcatcggcggcaacgaatgaatttgtcgaagtgattttgagtggttcgattattattccggcggcattcgtttttcttggtgcggcaggggcgcaggatgtcgcgcaaagcggtgcattcaatcttggtttcgttacgatgccgctcattttcaataagcttcccataccgggcgtaatcgggtttgcgtggtttttgctgttgacgctggcgtcgtttacttcatcggttgcattgatacaaccggtattgacttttattcaagatgaactgggattgacgcggaagaaagcgacactcatcgtggggggattgacactggttgtttcactcttggtaaaagcgacactggcgtatggcacactggatgaacttgatttttggggagggacactgttcccggtgttgagtgcgttggtgctcgtaatcatgtttgcgtgggtattcggggcgaagcaggggttggaggagttgaatcggagtagttttatcagggtgccgaaatcattcg

SEQ ID NO: 530 - DNA, 65170 bp, Artificial Sequence
  Synthetic Oligonucleotide
aattagggcaaaccggccggagatccctgagcgggctaacacgatacccggcacggatctgcgacaaagggcgtaagtggtgcacatgagcttaatcctctgctgccttcccgtatgtccgtccgaagtcaaacccgcattacggcacaactcgccccgaaatgttctatgcacttccggcgggcaatgaggttccgctcgaaggcgttcacggaacctttcgaaccgccccttctggaaatacttctcctgaacggatttcatctgggtaaaagaggctttctgtcagaacctcggtaagccgccttttccgatagttgatttggagggcgtcacggtacgctgagatctggggcgagtcaaaaatcttcttcgaggcctcagagtaggaattccaaagcttattgatctctgcataaagaatgcaacggcttaggacaaaaaattagggaggttcgattgcaggatgcatccgcgcagtttctctggagaggttcgaattccgtggatcgagcggatgatatcgttcatcagctggtcaacgccgagtggggagccattggcaagttctcgtttcgccaaagaccaaagaccttaatcgggattgagttccggggcataggcgggaaagtgcggcacatggagacgcggatggcgatgaaggagttgcgccaagggttcaccgtgatgcgtggaggaattgtccagcaggacgacgaccgagccccggaggtgccgcagcagtttacggagaaaccggcacgagcagatcggggacccgactttggccgacagcattttcgaccgtctggtacacaacgcccatcgcatcgagatgcacgacgagtcgatccgcaaagagcgcggcgggaaaaaagcctgagccgaaaaaggaagataccacgggtcgagggagcgcccgatccttgatcgtgggccatccgggcgcaagattttagagaggaaggttgagattttggccccacacgtagaaacaagccctgcaggaaacaagaacagcctcccgatgaacttaccctgagcgtcgcttcgctcagacaacggcgagatgaaaagcgcggtggcggcggcatctatctctctgggaaggagaaaaaaccgtgaccaggatcggatttcagttgccccgtccccgtcacttcaagcaccataacaacgtcagcgtcgcttcgctccgattgtgatgattattacagaccggaataagccatcacgataaattcagaatcacccgttaccatcatcggaatacgcacttggctcaaggtttaagccgaacaatatttgaataacccgattggccagcctcattaagagcacgcacgcgataggccactggcactccgggagggcacgtggtgtcggtgaattggaggcggcttgctggaagaagctggattctccgccacagccccgcactcgcttggcgctccaccgccacttgatcggggtgacctccgtgcattttccagcgcaaatgaactcctgccactgtccgctccgcagtcaaggagctcggcacctcgggtagcactcgccagtcgaagtaactcgcgtcggcaatcgccatgacgctgtcgcggacagggagcacttcgagtgtgccgggcttgccttccttccaccggagctgtcggagactcccggaaaccacgtcaatcagcaccggatgcctgatcccgcttcctttcaccgtcagttcttcataaaaaggagggaaaatcttccccggcagactgtgcgcggccaaccagtaggcgacaatggccctgccgttatggttccgaaagccataggcataaaaagggtatcccgactttcgctcgagcgcaggaattcccggtcctgtcacctggattgaggcgtccaggcgggtatcggaaaaaagcgcattcgtattggctagcgcataaaagacagggcgtggcgtgaaatcatccggcaggttgcgcaggccatgaatcatcccgaaatcgtcatactcgttgccgtcagtggccgaggtgagtagccagacgaaggtcttgacaccagccgcccaattgtagaccaaaccccgaggaatgtacttagcctgcactgactcatccatccctgtccaggaagggatggaattaaattcatcatcccagaattggatatccggacgaatgccgggataatgtcgtacgaactgccgaagtttggcaggcgactctggcccataggccccgtagtccatcgattccgggttcatgttgatcccgtaacctgggtacgtgtgataagcaaagatgttgattcccgaagcacattggcaacggtccaaagcgcgttgggcgaaatcgcgcttgggttccgctagtcccccaaagatcactttcgcctccgggtccgtgctgtgcacggtcacgacaaaggctttcaggagacggccgtactcctcaggatttccccacgggttccaatagccgatgtcttcttcattccaaagcgcccaatagcggatgcggccccggaagtgctgtaccatccaacgcacgtagcgggagaaggccgcaatctgttcgggcgtgcgcggcggccaaaagaccgagtaaaggctgcggtcatcattatgaaacgaacccggctcgggaatgatagaatcgggcaggcggccggagggcgatgtatacatggggtttccgtaaagcaattgcgcttggatgtgcacgccattatcgaccagagaattgatgtagtcctcgagttcgggtttcacagcataccgcccccgccgctgttctacccagtcccaactggtaaagtcagagctgttttcatattgtccgatgcgaatccacttcactccagcatcaaacattcgagtccaccaccaacgatcccaagggaggtagggatcgcgcggcagatcagagttgatgcccaacccgtcagtgatctgcgaggagcgcttgggcggaacgtggtccggcaagccaggggaggagctttgccccgcaggaagggatgcgcagcacaagaccagggctggccagcaacatgccagtgcccatttcaatcccggtttccgttccatccgcaacacctcttcacttcggataaaagccttagcaacgccggcgcccagaattccatgcaggaacgtctaacaccccaggcaagccgtaattctttcattcctctaccgtgtatgcgcgctttgtgccgcatctccgcaggctctgccgcattggcttagacgcaacgtccagctcgagaaagcttggggaataatcaggccaaacgccgcacatgctccacgagttccctgtgctcgctctggtcgaggtgatatgcgggttcacggcaagaagccgtagaaaggatgccgcgcagcacaagcaattccttttcgcaggcaatcagcatttcgattgactgcatcatgaagttcagaagaggcagaagctcctagtggaggaagcgcgccccttcgtgtgcattcgccgcctgcagccgccagagctgaacaaaaacaaacgccagcgaggcactaggcatgcagccgtccacctgccacccagcatcgtggggcaattgcaaccccatgtatcctaccagagtttgtaggcgcccgccgggaggattctcttaaccgcgcaattagtcggccaggggggacgaggtctaccttgacatgagtgaaattcgggcagtcgcgcttcaaggtcaggaaatgctccccatcgagcgtgcgtcctgtctggagcggcgcatactggaccatcagcggcgaaggcgggtcctggggtccatgcaagggtgggcaagattccagaattctctgcccgagctcatttgagaaggcgcgtaagtaactatcgatcgtcgtaggtagttgcacagaaagtccttagagtccgaattcgaaggattggcaggcccaaggtcgcggtgaatttttaggccccggcggggtgcccggggagggaaatctggattcagatgcttacgaaactcatggttgaacgtctactatttttgatggtaggatatctcccatgaagaccagtaaacagacagcggaccgtctggagttgatgcaaggaacgctgaacatgctgatactgcgcacgctcttgctcggcccccttcacgggcacgccattgccaaacacatccggcgcaccacagatgacgtattgcaggttgaccacggctcgctttacccggcacttcatcggctcgaacgcaaagggtggatctcggccaaatgggaaatggcgaaggataggaaccgtgagttcaagtattaccgtctcacaccggccggcaggaagcaacttgccaccgagcactcgaaatggaagctattggtggcctccatcgggcgcgtcatggaacctgcagaggaaggatgagatgagcatctggtcccggttgaatctatgcgttccctggttccgtcggcgtgtccgcgtggctgatctggatcgcgaactgcggaaccacatggatttagaagcggaggagcagcgagaagcaggcgcatcacctgaagaggccacctatgccgctctgcgggccttgggcaacgcgacacagatcaaggaggacgttcgcatggcatgggggttccagtggctcgaaacgctgcttcaggacattcgctatggcttgcgccaactccgccgaaatcccggcttcacagccattgccttgatcaccctggccctcgggattggtgcgacgacggcgatattcagcattgtgaatggcgtgctactcaatcccctgccgtatcctcatgcacctcggcttatggcgttcgctgagaagctgccgccatttcaggattttgcaatttcctacccagactttctcgactgggtgaagatgaatcacacttttgaagctctcgccgcgtaccggcacaccgacatgaacttaacaggctcaggcgaagccgaacgcgttaaagtcacccaagtctctgccagcttctttccattgctcggcgtgaagccggtgatcggcagaaatttcgcgcccgcggaagaccggcgaggcgcggcctcggtagtgatcctgagtgagggattctggaaaagcaagtttggcggttcgtggcaaatactgggtaaagtgctgaaactcgatggaaagggctataccgtcgtcggcgtaattccgaagagcttttacttttgctgcgagaacgagaattttgtcctgggcgacgtctacactcccatcggctcctacgacaatcaatggatgtcggaccgcggcgctcatcccggaatttttgcatttggccgattgaggcgcggtgtaacactccagcgggcacgtgctgatatggatggaatcgcgcgagacctcgcctcggcatacccggactcagataagaacgtaggcatttcgcttactccgctcaaggagcgcatggtgggcaatgtcgagcccgtgctcctcgtcctgttggcggcggtgggattcgtgctcctgattgcctgtgcaaacgtcgcgaatctgcttctggcgcgtgcggcgggccgcaggcatgaattcgcgatccgtgcagctctgggcgcgagccgggcccgtgcgattcgccagcttctggccgaaagcgttctgctggcgctcgcgggcggcgggcttggacttcttcttgcatcttggggaacaaaggctgctgttgccatgcttccagaggcgttaccgcgggcaaatgatgtgcggctcgacccgcatgttctggcttttgcgctagttgtctcggtcctcgtaggcgtgctattcgggctcgctccggcgttacagagctcccgccccgatttacacgagggcctaaaggaaggcgcgcggggctcgatcggcaccagccaccgcacgcggcacgtgcttattgtaatggagatggcgatggcggttgtgctgttgattggcgcaggcctcacgattcgaagtctcgcacgcctctggcgcgccaaccccggattcaatccccataacgtgctgacgttcaacgtggcattgccaccttcgacgggaaaagaaacgcccgatcagattcgcgccagcttacgtcaattgacgggagccattgccgctgttcccggtgtgagggcggcggcgataactgatggcgccttcccgatgcaagggggcaatattgttgggttctgggctgagggacagccaaagccggcaacggaaagtgaaatgcccaacgccgtgaactatattgtgggcgagaattatttcaaggttatggggattccaatcctgcatggacgccttttcacccggaatgacgacatccattcgcgcttcgtcgccgtgatcgacgaggatttggcgcgaatctattttccgcatcaggacgctgtcggaaagtacattcacctcgcgggcctggccgaaccgttcgaaattgtaggtgtagtaggccacgtggaccagaacggactcgatgaggataaacgatcagcccgcttggttcagatctacattccggtcttacagattcccgaccagcttatttctttccttgcgaagacggagggtttcgtggttcgcacgcagtcaccggggtttgcgagcatagaagcgatccgcagggcagttgaaaggatgaatcgtgcgcaggtagcctatggatttgaatccatggaagaaattatcgcaacttctcttgcatcacggcgctttacgatgattctgttagccgtgtttgccgcactggccatcacgcttgcgagcatcggaatttatggcgtgatttcctacagtgtggctcggcagacacacgaaataggcgtccgcatggcgcttggggcacagccgctcgacgtgctgaagcagattgtgggacagggattcaagttgactctgatcggcgttgcaattggaattgttggcgcgttgggtctcacgcggttcttatcgagtcagctctacgctgtcaaagcaaccgatcctttgacctttatagttgtttcgctcgtcttgaccagtgtcgcgctgcttgcgtgctacattccagcacggcgagcgaccaaagtcgatccgatggtagcactgcgacacgaataggcggcatcgagcaaacttggcagccgtggccagcgtatgggcccgttgctctccggtaatttgatcgctccgccccggataccacgcgagatccaggtcaagaacctgcctgttgtcccggaaatcaaaaccggggagcaaccgattccgatgagtgaggtaattgctttccgtctccgcagttcagctgcagtaattgagcggcttggttcaagccatgttcccgggccatggctacggccagggtccacagcgtttcggggaggggtgaaaaacgcgggcgagtctcgcgccactgctcgaactgttggcgggcttgctccagcgtcgtcggaagggcggggatgttctgggtcgtcatcagtctcctcccggccctgatggggccacaagactgacgatactcacttctctcacctcaagtcacgcacgactaacttaagcgcacaatccggcacaccctggaggcgaaaattggcggaatttgactgcgcaaggggtattgtcgcaacgtggtcaaggggttgcagtagcgcgccccgtatatgaaaggctttaagccccgttagagcgacgcactgtaacgctcattgcgtgtgctgtgacaaccagttccgcgaacgccctgggttcgagtgcaaatcgcgctcccgcgtgcttccccatcacggcgtaggccgcgatcggatccaagcttaccttgatgaattcatctttcgccataatcgtcggaagcaaccgatggctgcattccaaaccctgctgggtctcggaaccgggcacaaatccgcgacccacaaggacctctacaacgggcggacgttctcaaaagcctatccaaggcagaccacaagctattggggtttgctgaaacaaccggataagcatgagtaccctattttcggaagccgctccctcgtggaccacttcttgcgaggccttcctgcagcgtaagaattggcgcaagctctgcgggggcaatgaacttctttttcactgttcccatcgccacgcctcctatgctaggagaaattcatacgtcattccacagggagttttttcttacaccgggtcccgtaccgctgtcgccccttctcttaatcggcagagcatcacagcaacttccaatcagggggtacacatctgctacaatgctcccacagttttaaggtcagaattgaggttcgcgtcggttcatgaacccagcggtgtcctgtgaaactccggagtgctgagtgcccgaagatcaggaactcgtcaagcgctgcctggccggtgatgatgtggcctgggaaacactcctcacgtttcatcaccgcaaaatttataatctgtgctatcggttcacaggaagcagcacggaggctgaggacttgacgcaggaagtgtttatcaaggtttttcagaccctgcggactttcgaccccttgcaggggcaattcgcaacctggttgaatcgtgtggcgaggaatcatctggtcgatcattatcgcaaggtcagccgggatcgggccacggcctcgctcgacgacgaagaagaagggcttcatccccgggcagctccctcggcggaacctaccaagcaggtcgaagatcgggagcggaaggaactgctgcaagcggcgctcgggcgtctttcaccggacatgcgggaagtggtcatcctgcgcgaccttcaggacctggactatgcggaaatcgcccaaatcctgggcgtccccgaaggcaccgtcaagtcaaggattaatcggggaagattggaacttggacgtatccttaaacgtatgttgaagtaaggagaggcgggtagaagaagcgatgacgcactgggaagtctccaatcttctgacggactattcggaaggcgcgcttgatcgggcgcgggcggcgcagatggaggagcatcttgcctcctgcgaggagtgccgtgcgatgctggaggatgtgcagtttgccctccgcaccctgcgcgccgcagaggacgtggaaccctccccctggctggttcgacgcattctccgggccacgatcggcgagcgcaaaccccaatggggggagcggttaccaggctggatgcagtgggcgcttcggccgcaggtggtctataccgtttcaatggctgtgttttcgctttcatttatcctgtatacctctcgcgtgaacctccaggcggtggaactgcggaagctcaatccaaccacatgggtctaccgcgcagatagccggggccatctgctggtagcccgagccgagaaattctattacgatctgcggtttgtttacgaacttgaatcgatccttcggcagttgaaacaacagccgtcatcgcagcctggatcgccgcagagtccgcaaaagccgggcggcggatcatcggatattcaatcgtccggcggtggacaactggctttggaatatcgacagaacgcgccgaccatccgattccaggagaccatgtgggaacggggaagaaggagccttataccatgaaatgcgcaaaccatccggaaatcgatgccgtcgcttattgcggccaatgtggccacgcactttgcgcggaatgcaagcgtgaggttcgcggaattgcttattgcgaaaactgcctggacgcgcgactccacaccacgagcttttcttcagggtttggtcagaatttcggcccccagccaggtttggcattgtttctgggattcattccaggtgtaggtgcgatttataacggtcagattctcaaagcgatcatccaagtcatctttttcggctgcctgatcgccctgagtcagcgatctgaaacgccgttcgacaccatttttggcctgggcgcggcagccttttatttctatatggtcatcgattcttaccagacagctcgccgaaagcagttgggccaacccgtcagcgagctgatgggagttggcgaattgcgaatgaacgctccagtgagcgcggtagttctgatcgcgctcggagtgttgttcctgctcgacaacatgggagtacacatctttcgggacatcggaaggttctggccagttcttctgatcgcgctcggagtgattctgcttcaaaggaagactcaaatgttcggaggccggcctccttcaggatcggaaacctctaatcccggatttgaagccaagaatcagcataatcggataggtggggagggaagggaatcgaaagagctctaacagaatgctgaagaactctttcggtctgtcattccaaggagctgaaggcggtcccgagtttgcgtgcgaggaatcccgcagcccctttattttcaggtgagattccccgttgggctcgacatgacaaacgtctttcagcagcccgacaggtcaggcaaagttcaatttttcaggagggtatcatgtctgcattggcgaatcctgggttagtcgttccgatcagtgcctttatcatggttgttttgattgtggctgttaattgcatcaagaccatgcgcacgcgagagcttcaagcgcatcaggaactccgtatgcgtgaaatggagcacgaacgaaagatgaaagagctcgaaatcgagaaggccaaaatcgagcttgaaaaggcgcgacttcccaagcccgtagggtcagtaccgcaatgaccgctcgcggtttcagcctggggcatgctcagatcgcgcctcctgctgagggacgcatgatgaaacgccttggtggttgctggaaggcctcataacctctcatccctagcagcccaaggcaaggaggaatctcgcggatcttttatttgcagagcgagacttctcgtttcgttcggaatcacaataccgagaatcgtttattggagttggaggaggattgttaacaatgaatccgggtgtgatggtacctctcgctttgtttggattggttgtgtttgtcatcgcgctgcagtgtgtggtgaacattcacagcaaggaggaagaagtcagacaaaaactgcttgctgaggagatgtctcaccgccaggcgatgcaggaactgaatctcaaactccagcgaatcaaagaaggactttcctgaagttccggtgtgcgttatggcgggtggcatcctgctagggggagcaccctccaaaatggacaggtgggtctgcggaaagttggaactcttgaaggctgaaaaacgtaatgtccgatgagcgaaatttcgggcgtatcttgagggatgcaacagggccggtgatgttgatcctggtgggtgccctgtttctcctgaaccaatacgttccgagcctgagcattgcccggacgtggccgatcattctgattgttttaggagtattttgggcgctgcgctcattcactcctcccagaccgccacgcgggccgcaaatcatggggaagccgtaacctgtcgcagggcgtgggagcggttttggctgctatcggtgccacttgtttcagttcaggagctggcaaaaggaacaacaggcatgagtccactctactatcgccgagggtccatcttttgggcgttaattttgatcgcagtcggtgtcatcttcctggtccccaatttctatcctaacctgcatccctggtatcttatcgcccggtattggccggttctgatcattatctggggcctgtcaaaacttgtcgattacgttcacgcgcatagccaccctgaagtctcatcaccgcctctattttctgcgacggaagttattcttctgctgctgattctggttgttggaactctgctttctcacatcatcctggctccctggcatgaatggagcagggaatggggaattcatctggaccagtcggattggaataatccttttctgaattcgtacaactatacgcaggatctttcacaaaaagttcaaccaggctccaagccaaaactcgtcgtggtcaatcgtcggggcgatgtcagcattcaaagctcggattcgcccgagatcagcgccgtcgtcaaagaaacgattcgaacgactagtgaggaagaggccaaaaagctttaccgccggctcaagcttcagcttgccgatgaaaatggacagtatatctttcagccggattggggatcgctcccgaacggcagcaacaacatacggttggatttaacctttcgtacccctaaaagcacttccacggagatttcgaccgatcacggagatatcctgctgaatggattgcagggcgatcaaagtcttacggcgagggcgggggatgtgcacgccgcaaagatcaacggcacggtccgagtggaaaaatccggaggggccacagagattcgcggggttcgtggcgatgtggaaatcagcgggcggggcggtgacgtgcaggtggcggatgtttcaggtgcggtcagcgtcaaaggcgaattcaacggctcagttcagttctccaatatccaccacaacctgagtttcaagtcctcaagaactgatttggcggcgcagaacctggccggcaagctcgatatggagctcggttcgcttgagatcgtgaatctctttggaccgttagaccttacaacgcgccagaaggatgtcagcattcagggcttcaaacagcgggtgaagattgaggatcggaatggaaacatcaaccttcacgctgattcacccccggcctatcccattgaggttgatttgaaaaacggggatattctccttgcccttccaccctcaagcagctttacgatcgacgcggcttcgcatcacggcgaagttgactcggactttgtggcgtcgtcgctggtcgtggagcgccagggtggtgagccctccatcaagggtgcttacgggaagggagggcccttgattcgcctgacgaccacttacggaaccattcacttggtgcgtgagacggcagaaaaccccacaccgtccaagtcacctacggcgggcgagacgcaggtgagtttgcaagggaagcttcatgtttccggaacgcagcggctcacaatggttcagtgacctgatgcaggatgtcaaagaattccgggaaggaaatgcccacacactcactgccccgaatgtcaacaccgccttcgctgagaagccccgccacagcaaatgccatcgcgatccgatgatcgccgtagctctcgacttccgcgctatgaagcttctgccggccttccactcgcagtccatccgggaattcttccacttttgctcccaagcggcgaagattttccgccacggttgccagccgatcgctttctttcactcgcagttcttgggctccgtggaaccagagtccctgttcggtttgtgtcccaagaacagccagcaccggaagttcgtcgatcaggtttggaaccagctcaacaggaatctcacctcccgtaagcgggttggagcgcacgcgaaggtcccccaccagctcgccgtttgaaacccagatgttttcttgatggatgttcgcttccatgtgattgaggatggtgagcaccgcagttcgtgtgggattcaagccgacatttcgaatcacgagatccgaccccggcgtaagcaaagccgctgccacaaagaatgcagcggaagagagatcgcccgggacctgcgctttaagggaatgcagccgcgcgggtcctcggacggagatggtcccattcgtgcgagtgatggcggctcccatctgttccagcgcgatttcagtgtgatcgcgcgtgggcaccggttcttccactccggtttctccttcggctatgagtccggcaaacagaacggctgttttcacctgcgcgctcgcagtcgacggccgatgataaatcggatggaggtcagcccccataatccgcagcggtgggagcccgccttgagaggattcaattcgcgcgcccatgcgcgtaagaggatctataatgcgtcgcatggggcggcgcgaaagcgaagcgtctccgacaaggcgggattcgaactgctgtccggcaagaataccggccagcattcgcatggttgagccggaattgccggcatcgagatcgcccgaaggccggcacaggccacgcagcccttgcccccgaattcggacgcgatcctcgtcgcgctcaatcggcacacccaatgcctgaaggcaatcgagcgtactctggcagtcagcgctggaggcgaagccgcgaatctcgcttgtgccttccgcaatagcgcccagcagcgcataacgatgcgagatggatttatcgcccggcaagtgtatgacccctgtcaaccggcgcgccggtgatacacgacgaatgttgggtgaagttggtgtcggcatggtatggttctgcgaaagcacattatccctgatagacagtataccccttatgtttcctcatgaatgatcttcaaaagccccagcagtgattcgcgcgagctttccacccggttgccgtcaggccgacgataatgagtttccagtgacatcgtgccatcgtaatgatgatcgtatacggctttgatctgacctttccagtctatgaatccgccccctacgggggcccactccagccgccccgtgacaggatctttcttcacatccttgatgtgcatgtgagcaaaaagcccttccacgtggcggtaaccatccgggtagggcacttcatgcagcatcgccgcattgcccggatcccaattgccgcgcagatggggtgaattgatatcttttaagagacgtccaagctcctggccggtgccgatgttgcactcgtgttcattctccagcaccagcagaatcccgttctgacccgccaaatgcgccgccttcgccagacgatcgcgcacgtaaggataggctttctcggggttttcaacccgccagtagctgaaaatccggactttggaagtgccaaaaaaacgggcaagctcaaaggattgcaacaggagtcggtcgctatcctgttctgtgaagtgagcgccgaattcgtcccgcgccgcaggccgtgcgggcatttccggcaggttccatttaaaaatgggagatccaatatcgctcacatgcatgttgtagtcattgatcatatgcttggcgcgatcgaggtcggcgtgcgaaagattcatgatgttcttgccccagatgtcgcgcaattcgcaataatgcagagagtaattggagatgaagtcgagggctgcatccagatcctcggtgatctcatccgtgatgacccctaacttgaaaggcattttccacctcggcgctgctgtaagcgatgaactgagtccgagtaaaggtgcggaaagcagggaagcgccgaggaattctctacgtgtccagctattaggcataatcagctccttggtagctaaaaccagcggtttgagatgttgacaaccaaaagccttcccgcagcacgcttgagcaggcccaagctaagcactggcccggaggctcttaacgctttcacgaatgaccaactccgttgacagaatgcgccgagtgtatggcggacccggatggtgtagcttctcaagcaagagtctcatgagtgcgtcgccaatctcttccttgtggactcgcacggtggtcagcggcggatccattagttttgcctcctcacgatcgtcaaagccgatcaggcttatgcgatcgggcacgcttacaccgctgcgaaggaaagcgcgccagatgccgtaggcgatttcatcgttgccagccatcacggccgtggcgacactcccgttcgccagcagccgcgtggcggcccactcaccatactccggaaaggccatcttccgccgcgcggttaaccccacgggagtgagtttattgaggcgcatcgcggaggcatatccacgatagcgttcctgaaaccacgggaaaaaggtgtcgccgacgaaaacaatctcgcgatgtccctggtcaatgagatattgagtcgcctccgcagtccctcgaaactcatcaaagctcacgagatcaaagtttcccaccccgtccgttgtcaacacgttgtttcccaatgcgacaaacgggatgtgaaggctctgaatccgccgcaaaaagttagcatacacgaaacctgccacgatcaatccatccacccagccacgctcctgaaggatcggaggtaaagggatttggtttgagggggtggtgggatcatactgcgccactgcataaataacgtgctgcttcagagcgctggcgcaattttccacgccctgcagaattcgggcgtggaaagagtgcataaaggggcggttgctgagcagaaagcagaccatgcccgaacgccgacgcaggatgcgccgcgcctgtgcatgcgggcgaaaatcaagccgccgcatcaccgccagcacgcgattgcgtgtcctggggctgacgttaacaccgccattcaaaactcgtgaaaccgtgcctacgccgacgcccgcttggcgcgccacgtctcgaatagtcttaactgatggaactggtttcatatctctcgacgctttggtttacaagaatgaacaaaacgaagccgaagttggtttcatgaagcaaagctttgtcatatccaaagggctgtctgcctttgggagcatagcacagcccaaagatcactcaaatagctatccctcaggactcttcgggaggatgattaaaaaatttacaaaaaactcctaactgggagattttgaatgatctctgtagcttcaggctgcctccgagttttcatgacgaatcccatcatactgcttacttagacgaatcgtatcgattaaaggtgacagcggctcatcgccgaagacaaaattgtcttgacagtcgcttcgcaggggagtaacgttctggaacgagttccaaataaacatggcaaattaacagaaagaacgatgaaaattttaaaggagagatggctgctgcttaggggcagcatttcgggaggcgaggccatggagagcaaaacgagagggttaaaagacagccttcataagggtaatgggcgtgtggcagaaggcacgagacgaattcatgccgtcaaggcctgcttgaggaaagtcacgtggattgcggccacggtggtgatggtttgcagtgccacaatactcctctacggacaggcagtcaatggcagcatcgtcggaacgattacggattcctctggcgccgtggtaccgggggcacgagtgaccgttactgaagtgaacaagaatgtcagcctttcgaccgaaaccaacagtagcggcaactattcgtttccagacgtgcctccgggcaattacgaggttacggtcgaaaagaccggatttgcccgggccgtccggagcggcatcatgctttttgtgaacagcacggcgcgcgtgaatctgacattgcgtccggggcagatgacgcagacggtgaacgtgaaaagtcagatcccgctgcttcaaaccgatagtgctcaaactggaggcacgctcacgagcctccaggcagagcggttgccgctcggcacaaatcgtaactttcagaaccttctgaatttgattcctggcgcgacgcgcactgaatacaaccattcgcatttcttcaatccgcagaacagcctgaacaaccaggtgaacggaacctccagcctgacgaacaactttcagatcgagggtgtgaatgacaacgagcgcactggtttgttgcaggtgtatatcccgcccgctgaagatattcaggaagtggatgtcaccaccagcaactatgacgctgaacagggcacggcgctcggtgctgtcaccaacgtgatcatgaagtcaggcacaaatcagttccatggcgaggcctatgagttttatcgcggccaggccctggatgcccgaagtttttttgatcgcggcccgcagggcgcacccttcgtgaaaccgcctttggtttataactattggggcgggaacgtggggggtcctatccgcaaggggaaaacgtttttcttcgcgggtttcttaagatcaacggaccacgaaggccagttccaacagctcagcgtccccacgcaagccatgcgcaacggcgacttcagcgacccggccctcaccgcggtttttgaccccgcgaccggagatgttgccgattgcctgccgggaggcaattccgccaaatgcggcaccggccgcacacagtttccaaacaatattattccacccaatcggattgacccgattgccgccaagctcctggcttttgtcccgctgccgaataataatctcaacgctccggggacacagaaatatcaacaaaatttcctcgaaacgacgcgatatatccaggacatcagttggttggacgttaaaattgaccaatatcaggggcgacacaaccatatttcgggccggctgggttatatgaggccgttcaccgagcagacgccggcttatggcctggcgggcggcccggtgggaggcggctttgaggccactggaacggacaacacttactccgccaatctcatttgggaccatattttttcccccactttgatcatgcagaaccgcattggtctgaaccgttaccggaatgtggcccagcaaaccgactatggcaccaacgcttccgctcaattgggcattccgggcgtgaacaccgaacctttcacgagcggaattaccaccattaacggatcgggcttttcaggcccgatgattggctattcggccagtctgccctggattcgcagcgagacggatttcgactatgtcagcaactggaacaaaatcatcagtaaccatacgcttaaatggggggccaaccttattcgcatccgcgacgaccttttgcaggaacagactttcagcccgcgtggggcctgggactttggctcgagccagacggcgctgaacggtgggccgaaaaccggctttgctaataactttgccagtttcctgcttgacgtcccgggtacggtgggccgcgatctgcccgtcgtcttcccggcttaccgcgcctggcagtttttcacctatttcaatgataagtggcaggttaaccccaagttgacgctgaacctgggcgtgcgctgggaattttatccgcccgccacgccgcatttcgctggcggcttttccaactacgatttcactaacaacacgctggttgtggcaggcgtgggcggcaatcctctgaatttaggcatgcaggaacgttatcatgatttcgctccgcgcgtcggtctggcctatcgcctgacgaatacgcaggttctgcgcgccggtttcggtatcagctacgagccgtttgaagacaatacgtatgcttataatttccccgtcaagcagaataattcattcaacagcgtgagcggttttggtcccgccatcctgcccgatggcactccggcgacctttgagaagggttttcctcctccgctcatcgccgcggtcccgtccaatggcatcatcccggccaacacaccgctgctgattaaccaggattacttcgtgatcaacaaacattacctggatccttatatccagtcatggaacttcacttacgagcgcgcgctgcccggacaatttaccttcgatctttcctacgtgggaaaccgcggcgtccatatccccattcagtacaatctcaacgccgtcgtggaccctgccttcctcggagcgggcccggcaggacagccgctctaccaggagtttggccgtaaggcgggcacgacgcttttctttgcgggtgaaccctcgaattacaattcgttgcaggtgaagtttgaccgccatttctcgcatggcctctccctgaccacatcttatacttacggcaaagcgctgggttaccaggaggagaacggagaaaactccaatggtgtgtcctattatgttgacttccggcgcaattatgcccgtacggattttgaccgaacacacattcttaaccagagctacgtctgggagttgccgatgggcaaagggcagcgcttttttaagagcggaccagccagcatgatcttgggcggttgggagcttagtggtatctgggagttcatgacgggtgggccgctcaacttcggttgcaattgcaagtcactcaatactcctggcaacggccagtctccctggatcagcggaccgttcacaaaactgaaggggatcgatacccagccctggtttgacaccttggtttttgcagatcccaccgtgctctttggcaaggcgacattcgggaatatgggtcgttacatgttcgctggccctaacttcttccaacttgatgccagtctcttccgacaagtgaagctgacggaaagattcaacctagagcttcgcaccgagtggttcagcgccaccaatacaccgaacttcagcaaccctgataccacgttgggagatgccaatttcggcctggtgaagggagcaggaggcgctcgcggcattgattttgctgccaagctgatgttttagggcgtggttgaaagatttttttcatcgggcattccgagtgtcagtcaaaaaaccgccgtatttcaactccgggtaaagtcagtgaggaacgacaacagccgcgctgagtgaacgaggttgatgtgccgacaagaaaagtgtggcgaagcgcagacctttttagacgtggagattttctacaatagggcctctaacaattcgcgtccaggctgaaagaggtggttctttttgtctccagcgctgctagaatgattcggctgatcaatcgatgcagtaactctgctgaaagattacgagaaaggggaagctcaatttttcatgccggactcttccgaaatcactcgtcgcgattttctgaaatccagcgccagggcaggaacagcaagtctggccgcgttgagcggagtcattctgatcacgcagcccgagcgcgtcttcggtgcaaacgaccgcgttcgcgtggcgatttgcggagttcgaggccgcggctttgatcatatccgcgaatatgcgcgtttgcccagggccgaaatcgccgcgctatgtgatgtggatgaaaatgtactcgaccgccggctgggcgatgtggaaaagcttggtaagcctagaccagagaggtatatcgattgccgcaaagtgatggacgataagtctatcgatgccgtttccatcgcgactcccgatcactggcacgccttgatcggcatttatgcctgccaggcaggaaaggacgtgtatatcgaaaagccctgctcgcacgcctggtgggatggctaccagttggtgcgcgcagcggagaaatataatcgcgtcgtgcagatgggcgctcaaagccggtcgaacagcgccgtccaggaggctatccggaaaatgcgggaaggcttgatcggcgaggtatatctcgcccgcgggctctgctataaatggcggcccactatcggccataccccggtttctcccgttcctcacggcgtgcattacgatttatggttaggtcccgcgcccgagcatccctttacccggaaccggttccattataactggcactggttttgggactacggcagcggggatctcggcaatcagggtattcatgaagtggatattgcccgctggggattaggcgtcgattggccgagcaagatttcggccattggcggtcattttatgtttgacgacgaccagcagacgcccaacgtcctcaactgcgcctacgaattcgatatgcctgatggttcccggaaaatgatggaatttgaagtccggggttggatcaccaatcatgaggcgggcatcggcacaggtgctttccgtagtcacggcgttccggcagcgggactcgcaacccattcgcacgctcacaaggccggtgcgggccttgggccagtttcaggtgcgccgcggacaattggcaatatcttttacggctcgaagggatacctggcgattgaaggctacgattcttatatgtcctggttgggtgaaagccaggaacccgggccgcgcgccaatgggattggaaatcattttgccaactttattgatgcggtcatcagccgcaggaaacaggaccttaccgcgcccattgaggaaggccacaagtctacaatgttggtcacgctggccaatgtctcttaccgtctcggacgaaccctccgctttgatggcaaaacacagaaagttatcggggatgatgaggctaatcgcatgctgcacggtacgttccgagcacctttcaccgtgcccgagaccgtttagaaagcctcctgaggacgcgacgtaccttgcctcgggaagccctatcgcccagctcttgtcgtcgctcgttgtggctttctgaatgctcgcggggtcagggtgcaaggcccggcgccaccaaacccacctcccgtcatcgctaaaatctctcaggagtgccgtggagcaatataaaaacctactgaaaacagcctaaagcaccggaatgctttgcagcgtcacgacaatagccgcatttccggtcgatgtgatagtttattcaagtggcttttatcgggagcgatcagagatgctgaaggcagcttattacgaaggtcatcggcgagtgcgagtgggtgaatgcaaaccggtagacccggcgcctgggcaagtacaaattaaagtttcgcactgtggcatctgcggcagcgacctgcacatgttccacggcgcgatggaccatcgtttccaggttccgcacgtattcgggcatgagatgtcgggcacggttcatgccgtcggcgaaggggttaagggctttgctccgggtgatcatgttaccgtccgccccctcgacccgtgcgggatatgccctgcatgccgcgctggttattcgcatgtctgccagcgcttgaaatttattggctttgacgcgccgggagccctccagaccctctggacagtgccagctcatacactccatcgattgcctgaatccttgccgcttgaaaaggcggccctgattgagccggtggccgtcgcttaccacgatgtgcgcctggcagaagttaaaagtggagaatacgcagtgattcagggcggaggccccatcggcatcctgatcgctcttgtagcccggcacgccggagcaagagtgacactgatggaagtaaatcctttccggttgaacctggcgcgtgaactgggtttcgatacgctgaatcccaaggaggttgatccggtcaaatatgtgaatgatcagacggaaacggcgggggctgacgtggtgtttgaggtttctggctctgccgcaggcgccgagactatgacccaactggcgcgggtacgggggcgaatagtcctcgtcgccattttcagcgccgcccccgaggttgaccttttccgctttttttggagggagttgcgcctgtggggggcacgggtttatgaaccgcaggatttcgagcaggccatcgcgctgaccgcttcgggagtgctgccgctcgacagattgatcagtgaggtctcgccgcttgaatcggtccagtccgcgcttgaacgtctggaatcgggcggagaggtcatgaagatcctcattcagtgtggtgaataacgcccaaaagatcgaaaaaccatgccgattttggacagattccgactggagggaaaaactgcgctggtaaccggctgccgtcgaggcattgggaaagctcttgctctggccctggcggaagccggagcggatatcgtaggcgtcagcaggtcgctggagtctgacggaagcgaagtggaacgggaagtcttgtctcggaagcgagccttcaaaggttactcctgcgattttgcaaatcgggccgctgtttatggttttatccagcgcctgaatttggatttcccgcacatcgatattctagtgaacaatgctggcagtatttttcgtaagcctgcggcagattatcccgatgaatattgggatcaattgatcgaggtgaacctcagtgcccaattcatcctagcgcgggaactgggcaagcgtatgatcgagcgccgttcaggaaagattatcttcattgcctcgttgctgacttttcagggtggcattaccgtgccggcttatgcagccagcaaaggcggcgtcggccaactgacgaaggcgttggcgaatgagtgggcggcgagaggtgttcaggtgaatgccatcgctccgggctacattgcgacggataacacggctgctctccgctctgacccggctcgcggccctgccatcctctcgcgcattcctgcggggcgctggggcacacccgaggatttgcagggtgcggccgttttcctggcgtcttctgcttccgattatgtcaatggagaaattctgacagtcgatggcggctggatggcccgataaggcttacctgagagttgaggggaacgataatcgcggcttcactcatgaagggtattcaatatgtgaccttctttatgctttgacgtcgtaatattgaataaacttcaaatctatttaaccaagtttcacttattgcaaaacggtgctttgtgaaactgagtgacagaaaatttatatttgcaaatgaaattgcttatcattagccaaatcttgggctataatgcattcctcttattgaatcgttgaaacgcgccaaaaacgccgattcaaatgcgcgtgaataggattgcggatgaatggatggagagcgacggcagtcaatcgaagggatctgtttcggttgatgggcgcgggagcagcagccgcgacgtgggttccatcgttggcgcaggcccactctcaggaaacgctaccccaggagtttggtgaggcatccggcacctggtcagcgggagttccgtttctcgagactcccgcagaagggctgcgatggttcaatgaggcgaaatttggcatgttcatccattgggggccatgttcactggccagcgtggaaatttcatggcccattatggttcctcgccctcaatggaacatcacacaggaagaatacgtaaatctctacaagcgctttaatccggtgaagtatgatccggatgagtggattgatctggcagaagccgccgggcaacgctacatgattcccgtgaccaagcatcatgacggattctgcatgtttgattcgtcgtttacggactataagattacgcgcacgccctacggcaaggacgtcatccggatgcttgcggatgcctgccatcgccgcggaatggcgctgggatattattattctccgcccgatatgcatcacccggattaccgtgatacctcgaagcctgccagcgaaaactggcatggcgagccgtggcgtccgcagtggacgatgtatctgcattatatggccttgcaggtgcgtgaactgatctggcgttacggccagccggttgaaatgtggtttgacggcctggatcatcaggaaaagtatgacggctattctttcctcgaaatgcttcgggccatgtcccctcacaccatggtgaataaccgcatcggcgttgcggcagattttgatacaccggaacagtatgtgcccaaacggattccggtgaagggaatcacgattcggggcgttaacgccgctgaggcggaaaagcttccacacggcattccgagcctccagaaattcaggccctgggaaacctgcatgacgattaataacacttgggcctacaataggaatgatcgcaattttaaatccacacgacagttgattcggacgctggtggatgtggcgagccgcggagggaactttctgctgaatgtcgggccgacgcccgagggaacgattcagcctgagttccaagagcgtttgcgagggcttggggaatggatgaggctgaacggcgattcaatttacggaaccacattcggtcccttgcaggagttaccctatggccgcacgacccgaaaggggaaaacggtttatttacacatcttcgattggccacaaagtgcgtccgtggaattggagggtttgccacggatagggagaatttctatactaagagatgggaggcctttaaagtttaaccaggattctcaacgactctcgattcatcttccggctcaggcgccggatgccgatgtcagcgtgctgaaaatcgagatgtcctaacggctttccgcgcgacctcccccctccccgcgcggagcccaccgttcatgcggcctgccgtcctcggcaggccgccggtggggaacgggccggaagcttatactgatccgaccacctgatttgtaagcgtaccgagcttttctacaataacacttacggtatcccccggtttgaggaacacctgtggcttgcggaaaacgcctacgcccggaggtgtgcctgtcgaaattaaatcacccggctcccaagtgatggattgcgaaagatagcttaccaggaagggaaccttgaagatcagatttgaggtgtttgagtcctgcatggtctcaccgttgagcgtgagcgaaatgcgcagattgtgagggtccggcacttcatccttggtaacaatccaaggtccagtaggcgcaaaagtgtcgcaactctttccccggaaccattgcttgtcgctgaactgaaggtcacgcgcactcacgtcgtgcaaaatcatgtaacctgcgacgtaatcgtatgctttgtcttccggaatgcggcttccccttttgcccagcaccaccgcaaattcagcttcatagtcaacttgcgtggagttgggaggaagaacaatcttgtcgccggggccgatgatggtgttgcaggacttcagaaaaaagataggtgctgggggcggctcctcgccttgctcgcgggcgtggtcagcgtagttaagccccacgcaagtgattttgccagggcggggaatgggcgcgcgcaagtggacggaatcgagcggcgcgatcagccctttcattgttctggcagctgaatttctggctgcctgctttcctgtcaattccctggccaaaccttttgtgacagtccccaaggccttgagccattcttcgccgcgcgtcaggacgccaagcatctcgcggggagctgcgcccgcctccgccagtgtctgcgctgcactcttgaatttggattcgctgtagagcgcgcgaggacctcgttttttggtggccaagtcaacagcaacgcggacatccaccacgttctgaccttcaaccacacccacccgcagctgtctcccggattggtatgtaactaatttcatgaataaaagctcctttgacaagaatatgtgtattgcccctggtcatgacgcggcgtgaagcttgcatcccagtctatcctccgattttgaatcgagggtaacaatagacttcactactcgcccgtcaacacaaaagcataatggcccgaacccacgcgaaacgtgacaccgtcatcggctgcctgagcgttttgaattccaggatcacccggcacatattgaccattttcccagacggtatggttgccctcatggacggtaactgttgtcatctcttcctccttgggcacgaggatcacggcgtctgcgcctacaggaatcgtgacgtccagcgtaatctttccaggtgaatggttccaggaagatgagaccgtgccgcgaatggtatgaagagtcccgctcgcccagtggaggtcctccaccagccgaggctcaattcgaatgtgctgataggccgccgtatccggctccatcctaataccggcaagcgcgcgataaaaccaggccccaacgctgccaaacattgcatgatcgtgtgaattcatcgaagggccggtcttatcctgccacagttcccagagggttgtagcgccctttttgaccatgtagccccaacttggatacgtcgtctgagtggcaagttcataggcaacatcaggatgaccgaacatggtgagcgcaggcatcagccacttgatgccaatgaagccggtggtgagatgggtgttgtggtagtaaacgatatcgtcatagaggtcgcgcatgataaggccgcgactcttggcggggggaaggttcaacgccagagccatggcgttagcggtctgcgtgccggttgcataaccacccgcatcgggatgaaagtatttgcggttgatcgcgtctttgatctggcttgccagttgggaataggtctgggcgtccgccgtgttgccaagcacgtgcgcaatccgggagagaatccaagtgtcatagtaataatacgccgcagaaacaaaatcccccggtgtgtgcacgatgggaacccagtcgccataatagctgtaggtcagcagattgcccggagctcggctgcgcagaaactccacatatttcttcaccccctcatagttttcctccaggatgcggcggtcaccgtattgctgccacatgtaccagacgagttgtggataagcggttccccaggctgggtctgccggccgcgagccataacggtgcggcaccgtatcggtcacagtgccatcggctccctgaacgtcatggatatcccggatgaaattggtgtagaaggcagccatatcgaagttcatcatggcttcctccgccgtcacctgcgcatcgcccatccatccctgacgctcgtcacgctggtcacagtcagttgggatgctgaatagattcgtaagctgcgaccagtggatgaggtgctgaatctgattcagaatctgtttggaagccacgaagttcccagcagattgaactgctgtgtgcaccacctcgccgcgaatagaatcaaggcccggagtgcccggaaagccggtgacctcgacatagcgaaagccgtgataagtgaagtgggcgtggtaggtttcccagcccccgcctttgaggatataaatatcacgcgattttgcagcgcgaatattggcacgattaatcatgccgttgggatagagcagttcggaatacctcatcattacgcgtgccccgcgcggcccgcggacgtgcagcttcgcccagccgctcaggttctggcccatgtcgaagacatagacgccaggctcaggattggtgatggaacgaggtataatctcgcccactcggcgaatcggaggcatcatctgcgaggaaatggctccgtctgtccccgggacaacctgtacatttgaccacgaagaatcgtcgtagccgggccggtcccatcccggcgtttcacgccgagcatcataaatctcgccgtcgtagacgctgtcactcacaataggcccctgggttgctttccaagagccgtccgaggccaggctgaagtgctgaccgttggctagttccacattcatttgcaacagcaaggcaggctcggaataatagccgtgaaacgaacgcccgtgcgaaagcgtggcccatccgccgcccagcatgacaccgatggcattcgcgccctggcgcaaaaacggggtgacgtcataagtcgagtaaagcacgcgcttgggataagtcgtgaatgctggatcgagaacgcgatggcccacacgctgtccattcagatgaagctcgtagtagcccagtgccgtggcatatacccaggcgcgtgttggctgcgacggcaactggaactccttgcgcaactcgttgcccccgctgatccatttcccttgccagtcatcgcgggaaagcagacccatcgcgaaacttgccggttcactgtaggcgctggctcggccctcgcgatcccagaaccgcacagcccagtagtagatgtgaccgctggcgagcggcttgcctgcgtaggacacttggattgaatgatccgaggctaccttaccgctgtcccactggtcgccctgttgtcgtgccagccgctgcggacttgttgccaccaaaatctggtaggctgattgaagctcgccgcggtcggaatcctccagcacccatgaaaatcgaggctggcgaacgtcaatccctacagggttcgtcaggtattcgcaacgcaaatcgaaaggcgcggaagggccgacctgactgtagctcagatgagtcgagcccgcgacactggcaacaaaaatgcataagaagagcaaacgaatgaacttgttaggctgcatgaagtccctcgcaaagatttggaatgattgaggtgttcctctgtgaatttcccgcttcccgtgcggtctggtctcctctcgcattgggttctccgccatggggacccccatgatcgccccttggtccattctcgggagagagggaattccttcctcgcttatggaggaggaaaagtatctgttttaaagaattggtcgagacaggatacctggtgtctgccctcttcggcattgtcaaagtctttgagtttcggactacatcaattttttccagcgttcccggaaggtttgaggtgcgagggcagggaagtctcgcccttcagtccagcgcgacatgggaaagagcggaaatttccggatccagccctggcgggcataaaatttttgtccccatcgtgccaccctgccgcccaaggcatagattcgcgggcgtttcatagcccaggcccatatttgcatggaggcacgctcgccccgaggcggtccgccggaaagggcgcgcgatgcctgcttctgtgcttcgctgcgcaggtgcagcagcaggtctggaatattgattctgaccgggcaaacttcgcgacacgcgccacacagcgaagaagcaaacggcaactcgcgcgccacgccgatgccgttgaactgaggcgtgatgagtgcgccgatcgggccgctgtaaacccagccataggcatggcccccaattttccgatagaccgggcaggcattcaagcacgccccgcagcgaatacaatagagagcttcgcgcattttttcatccgccaacgctgccgtgcgaccattatccacgagcaccacatgcatttcatccggcccgtcctcgctcgcgcgccgcggcccagtcagaagcgaagtgtaggccgttaacttctggcctgtgccggagcggcccaaaagcctaaggaaaacggccagatcctcaaatcgagggatgatcttctcaataccgatcagcgccacatgaacgcgcggagaggtcgtgcataaccgaatgttcccttcattttcagccagcaccaccgtaccggtctccgcgacggcgaagtttgcgccgctaacgcccatttccgcgcgcgcaaacgattcgcgcaacacgcgacgggcaatagcggtcaggcgctcaggttctgtagtgcgttccgcatgtaggtgctcgacaaacaggtcagacacatcctgccgcgttttgtgaatggcgggtgccacaatgtgcgccggacgatctccggcaagctgaataatcagctctcccagatcagtctcaatgccccggatgccggcggcttcgagggcctgattcaattccacttcttcacccaccatggttttggacttgacaaattctttgacgccagcctgctgcgcgatctcgcgcacgatcctgcaaacgtcttcagcagtctccgcccagtgaactttcccgcccaggcgctcgacttgatcagcaaattgcgccaggtattcatccaggtgctcaatcacttcccgcttcaatgctcgcgcccggtcgcgtaatgcctcgaagccgggcacttcgctgatggcttgcagacggtgcgtgtagagccgcagggttgaggagcgataagcctcctgcaagcttggcttctgaaataattctttggcccgctcgtgaatatgcgcgctttgaacgccggtttcaggcatgaaaagaccaaaaagttaagatgaacagccggtcagtcacctgctggtttgctttccgttgccaggcgtgtgcgatctgccgtttcttcagtctgcgccaacaattgcgccaaatgcagggttttaatgggcagaccccggcggtgaatcacacccgcaagatgcatcaggcatccggaatcattcgccaccagatattcagctccggcttccatggcggcccgcaccttatcttcccccatagccacggaaacttcagggaattttacgctgaacgtgccgccaaagccacagcacaactggaagtcctgcatttccaccagatcaaggccgcgcaccgcacgaattaatttgcgcggttcttctgaaatacccagttcgcgcagaaggtggcaggagtcgtgatacgtaacgcggtgtggaaaactcgcgcccacatcttcaaccttcagcaccttgaccagaaattccgagaactcgtaaaaacggtttcggagctgccgggccttttgcagacgcacagggtcattcaggaacaactcggaataaaagatccgcaccatcgtggagcaggaaccggagggagccacgacatagtctgcgtcatcgaagagatcgagcacgcgcgcagccacttctcttgcttcatcgcgatatccggtgttgaaagccggctggccgcaacacgtttgcgcgggattgaaaatgacctctgcccctacgcgacgcaggactttgacggcacactcgcccacctcgggaaaaaactgatcgcccagacaggtgacgaaaaacgcgacacgaggtttggaaatggtcatcgagatgcaaaaattttcggaatgggccgggccttggtggtttttacaaattgaaatcgtgcaccagccaaaagctttaatacggtaatgtaggccgctcgacgcgcgaagtcaagaaaatgcgatacgtggcccagctctgcttgaaggttcttttcggctgtgttaggcttgccccagatgggatttaaatccggcgaggaggtaactctcccatgggcaattccaccgcggccatccgggagcaattgatggtcaataacaaagaatatcaacgcctttatgaagagcatgagcgctacgacgctcaattaatgcaactggaaagcaaaaaattcctcactgagcaagaacaggtagaggaagtccgccttaagaaattaaagctacgcgccaaagaccagatggagcaactggtccaccgagcgatgggagcttgatcacactgatctattgaacccagggatttaccaggaacctcaggccacattggcgtcaggagtagaggggtaaatctgacctttcgtggcccctcccaagacgttgaacatcccccagagaacacttttggcactgcccgcggatttatggtaaaggaaggatacggatacggacttccccttttgcttatcagcggcgcgctttttggccttcatatctatatccccgcaatcgtttttctgatcgttgcactgtttgttttaaattttttccgggatcctgaccgaattgttcctgccgatgcgggggccatcgtctcccccgcggatggccgcgtggtgcagatcacggaagaggagtttgaagggcaacgaatgcagaggctgagcattttcatgtcccctctggatgttcatgtcaatcgctcccccattgccgggacggtgcggaaagtgcgttacacgccgggagcttttcgagtggcttcgcgggcggaagcgtccgtggagaatgagcagaatacttttaccattgaaggcgagcaggggactattcacgtgaagcaaattgctggcgctttggcgcgtcgcatcgtattctggaaacgtccgggcgatcaactggccaggggcgagcgcgtggggcttatcaaattcggttcgcgggttgacgtgctggttgaagttggaactgagtggcgggttcaggttggagattctgttaaagcggggagcaccatccttggattcacaaaaccaggggcgtgaggttcgcgccaacaaaacgcaaagacgcggcatctatattctgcccagcttattcaccgtcggcacgctgatttgcggatacatcgccattatttccacgcttcgtggcgctcagtttctggctgctggcgccggctccggcatcgcgttggcagcgtttgatgacgcggccaaaaagattggatgggccatcgtttttgacgggctggatggccgcatcgctcgactcacaaattccgcctccaatttcggcaaagagtttgactcgctggcggatgtcatcactttcggcattgcgcctgcctttttggcctacgcctggggcattcaagcaatccattcacaatatgaccatcgtctcgttttttatatcgaaaaggcggggtggctagtgggattcgctttcgtgatttgcggggcggccaggttggcgcgcttcaacatcgatcgcggctcgacgagcgaccggcgcttctttgtgggcttgcccatcccggccgccgccggtgtggtagcggccattgtccattgggcgaaatatccgattcaggattggttgattggcatcgtctggctattgattgtggcctgttcggcgtttctgatggtcagccgggtgcgttattacagttttaaagcgatggatctgcgaaagcgatattcctatctttttattattctcctggggctcattgtctgggccatctggtcctattccgagcccgttctcctggctctggcgatggtttatttccttcacggcccggtgatgcggctgatttcaaggacacgttctcatccgcccgcacagaaagccgagcgcgcgcccaagcaggaggttcaggccacatgaaatccgcgtctcgggattatcgcgtggccatgctgggcgctgaatcgctgctggggagggaaatcctgacggtcctcaaggaaaaaaacttcccagcctcccaagtcattaaactcaacgcgcaaggcagtcagccggaaatccctatcgtggatttcgaggatgaacctttgccgctgatggaaagtgaggacagcgggggagaggaatacgattttatatttcttgctgcttgtccagaacgagcccgtggggcttccgaggcgccggacgatcgtgaggagttcctatccagcgcttcgaacctgggtagctgggtgattgatgtgagtcacgtccctcataccacacagaatcccgtactgagcattccctatctcgatcccagccaggatgtcctggccaaggcagtcgccggaggcgagcgatttttcattgcgccgcacgctgcagtgattgccctcagccatcttctgttgcgactggccagcaactttgaaattgaacgcgcgacagtccagattttcagctccgcctcagaacttgggccggaagccattgaggaactccagaagcaaacctccaacctgctgagctttcagccgacgcctcagagtttttttggcgctcccatcgctttcaacatcctgcctcgtgtgagcggcaaggggggtgcgagtttttcaaggcttgaagaacgcattcgtaccgaaacgcgccaattcctggctggccgggctccaatccccgctttgcgcctggttcaggcaccgattttttactctctcgctttttcgctctatgtggagctgcgggcggctgcgtcggtcgtgaagatcgaacaggcgcttgccgacgagcgcatccgtatattcgggaaaacgcaaagcgctccgtctcccgtcgaagtacaaggctctccggttatgttggtggatccaatcagaatggatgacgagcgcccgggcggtttttggctgtggggaatggttgataatctgcgcctggctgcggaaaatgcggttgagattgccgagactttgcatcagttgagcttcaaacaatgaatctttggagtcacattggctgcagaattcctggggagggacagctgggcccgcggagtgtttgcacgcttatgatgctgcttgcgatcgggttcgccgggctggcctcatcgtgcggctatcatgaaggcgggcgcggcgcgcttttgcctccagacatcaagacgattgctgttcccattttcatcaatcaaacccctcaatttcgcatcgagcagcaattgacagcggcagtcactcaggaattcatcgagcgcacatcctatcggatcacgcagaatcccacccaggcagatgccgtgctgcgcggcaccgtcaaacaaatccgccagggtgttgtcactttcaatccgcaaaccggcagtgccacaacactccagattgaggtggttgccggggtcgagctcaccgacctccacactaagaaagtgattttctcgaatcctgactacatcttccgcgagcagtatcaagtgagccccacggcctcgacgctgatcgaagaggaccgtcctgctttagaccggctttctcaggaattcgcccgcaccctcgtcactgatattctggaaaatttctgaaaccgtttctgacaaagaagcttttgttagcgtctgtttttcacggccgtgatattttgcctaaaatcaccgcgtgtcgcgctcccgtaacagcaggcaggtttcccggcaggccctgcagggttcgatcggccaacagggcaaaagcgatagcttctttagcgtccacgggaagaccgtactcatccgacaggtgaaaatcaagcttaggtaacaaatctctgattcgatcaatcagaaatcggttgtgcgctccgccgccggaaatgatcaaccggtgaatttgggctcggggaaagacaaaacggcgaagagaatcagcaattgagcgtgccgagagttctgttgccgtacagatcaaatccgcaggttgtgccttgcgctgcgaaagaaaataacgcgaaagaaatgtgctgccaaattgttcccgtcccgcgctcttgggtggaggctgatgaaaaaagggcagccgtaggattctgttgagtaaaggctccaggagcttgccttttgcagcccacttcccacttttatcataagttctgcgcgctcgtgtgaggtggcgcattaagccatcaatcagcatgtttccagggccggtatcaaacccaaaaacctcttgcgacgccgcaccagcgggaatcacggtgacattggcgatgccgccgatattcagcgctacggaacccagttccttgtgacgaagcagcagataatcaaccagcgggacaagcggtgcaccttgtccaccggcagccatatccgccacacgaaagtcagccacgacaggaacgccgactctttccgcgatcaccgcagcttcaccaagctgaagggtgctcgaacggaaagaatactcctgccgtttgttccgtgtcccgcttgaggagcctagatgaaatacggtttgcccatgcgagccaatgaccgtgagttttccaggcgacacgccgccttggccacacacggcaagggctgcatgagcgaacatttcacccaacgcaaaattcagcgtgctgatttcctgcgcggatgtggctgagccgcccgccacgcgcaggagtcgattacggattgcgggaggatagggaagagtctggaatgcttgtagtcggacgttgagttgattccccaggccttcaatttgcaccagtgcggcatcaatgccatccatcgacgtgcctgagatcagccccacagcccagcgcactctggggatcgtcatgattggagctgccttttgagttccgccaggagattcagcgcctcaatcggcttcagatgatcaaggtcggtttcttcgatggcgcgaacgatttcagaatcgagcggcgtaaaaatggtgagttggagggggcccgcgtgaacttcgctcgggcgggcggcaaggcgttcgctcagacgatgctcagtctgttcgtgccgcgcgagaatctcgcgcgctctttcgatgaccaaaggtggcagcccagccagccgcgccacctcaacgccgtaactcttatcagcgctgcccgcttcaaccttacgcaagaagatgatgttcgagccggactctttcaccgccacatggtaattccgaacgcccggcagaagttccgccagttccgtcagttcgtgataatgggtggcaaagagcgtcttcgcgccggtatgagattgcagatattcgaccactgcccaggcgatggccaagccgtcaaaagtagaagtgccgcggcccacttcgtcaagcagcacgagactcttgggcgtggccgtattcaaaatggcggctgcctcggtcatctccaccataaacgtcgagcgaccctgggcaagattatcggaagcaccgatgcgcgtaaaaatacggtcgagaatcggcaacttggcgcgttcagcaggaacaaagcatcccgcctgcgccatcagacaaatcagggccgtctggcgtaagtaggtggacttcccacccatgttggggccggtaatgatcaggatgcggtcagtcgtggaattctgatagaggtcgttgggaataaaaggtccggtctgattttgcgaactgatgcactcgataaccggatggcgtccttgaatgatcatcagttcctcatcatcggaaatctgcggcgcgtgatagttacgctccgccgccagccaggcaaagcaggcgaggacatccagttcagcgagtgcagcggctgtcgcgcggatgcggcgcgcctccgcgcccacccgtcggcgaatctcaatgaagagatcgcgctcaagctcctggcgcttttcctccgcttcaaggattctgacttcgagttccttgagttcaggcgttgtaaagcgctcagcgttcaccagtgtctgcttgcgttcatagtcggagggtgcgagatgtaggttggacttcgagatctcgatatagtagccaaaaatattgttgaatcgcaccttcaggctcgaaatgccggtccgctcacgctcacgggcctcgatttgagcgatcagttgtttgctgttgcggctgagtgcgcggagtgcatcaagttcggcatgataaccgggacggatcaggtctccctccgtcaacactgccggaggctccgggtggatggaactttccagcagttctcgtacgtcgctgagttcgtcaagtttttcgcgcaactcgatcagcctggatgcctgaaagggatgaagggaagctttgacgaagggcaactgcgcaagcgaaaatttcattgcgaggagatcacgagcgttggccgtctcgagcgtgattttgctcaacagccgttcgaggtcctggacctttcccagcgtgcgccttaattcctcgcgcgcaatggtgtgggcaaggagatcgctcaccgcctcccaacggctctcaatttccctacgatcaacaaaaggtcgaagaagacgttgcttcaggagccgcgctccgaaagtggtcatgcagtaatcaagcgcagcaagcaaagtggaatcctgactcccgctgaagagcggttcgaccacttccagattccgaagcgtggtgggatcgaggatgagaaattcctgctgctggtaataacgaatcctgtcgagatgcaggagcgaaccgcgttgcgtttcacggacgtaatggagaatagctcccgcagcggcgacggcctgcggatgatcctccaggccgtatccggccagggtagcgactcgaaagtgttcgcgcaacaggcggttgccatagtcttcgctgaaaatccattcttcaagagacgtctgggttgccggcggcgaagaaagcgcgtgaaggatttgggacaaggattgcgacccgttggaggtccagcccgtagagacatggcgagttgctttgatcgaactgtcttcggccggcaacaggatttcactgggccgcatccgctcaaattcctcgcgcaatcgactcctggcttcttcgcctcgaaactccgtggcgcagaaatcgccggtggaaagatcggcaaaggccaggccgatactgccgtctttctcaacggctgaagccagataattgttggcacgcggttcaagcgcttcggtgtgaatcgaagtgccgggactcacgatgcgcgtcacctcgcgcttcaccaactttttggcaaagcgcgggtcttccatctggtcacagatggccacgcggaaacccttgcgcaccaggcgcgcaatataggcctcggcggcgtggtaaggaacaccgcacatcgggatggcctggcccttctccttattccgcgaggtgagcgtgatctgaagctctttggaagcaacgatagcatcctcaaaaaagagttcgtagaaatcgcccaggcgaaagaagagcagcgcttgcggatggcgctctttaatcgaactgtactgccgcatcagcggcgtcgaaaactctgtcataacgtgaatcggtgagaaattgattatgcggttgggcgcggcgttttgtaaaccggggcaaagtggcgggaggtttgctattctggcatgagatggaatcaagttgtctatccatcaaactgatgaaagatcgagctgatgaaagatcgagcggtgttcacccgtttttatgaagtcccgatttgtgctacgatagcgaagaaaaggcgaataggccggcttcagaatgaacctcgaagagaaactttgccagctcaggaatgcggcgaatagaaccgatcgtgatcggtcacttgaacagcagcttgaaagtttgcgcaggttggagctgagaaggaccactccctcgtcctcgtcaacgaatatcacattgggctcgaattgggacggcgcttcgcacgctccctatcgcgtggaggattgcattgagggtcagatcgagcaggacgagttgggccaattcttttttgcccgccagtctctgcctttcggtcgaccttatgggaagttccgcatcggggatatttctttggctaatctgagccctctgaatcttttcctgggtcacgcgaccctgcctgatccagcgcgtctggtcttcctggatacggagaccacgggcctggctgtggatggcagcgcctacgcgtttctgattgggattgggttgattgagggcacgcggtttgtggttcgtcagtattttttgcgtgactatactgatgagaaagcggcgctttcttctcttgcgaaggcactcgaaagctatgagggactaatcaccttcaatggcaggatatttgacattccgcttcttgaggctcgttacgccgcttgttgtctccgttcacccttcggccggcttgtccatttggacattcttcatcccgcgcggcaactctggaagctgcgcctggaaaagtgccgtcttacagacctggaaagacacgtgcttggcatcgccagagatggcgatgttcccggatcagaaattcctggaatctacttcgactatcttcgtacgggggatccacgccgccttcaacccatcttttttcataatgcgcttgacatcatctcgctggctgcgcttaccgttgagttgtccgaagtcatgaaatctgctcgggaagggaagtgtaccctccatggtttggatctcttcagcttgagccgtatctttgagcgtgcgggagcgttggagctctcagcctcaatctgcgatcaggcgctgagtgccggcctgccggaagctttggagcctcgagctttgtggcatctggccaaacaatgcaagcggttgggacgcttcgatgccgctgtggaaatctggctgaaccttgcccgccgcgatagttcctatgtcatcgatgcgcaccgagaactgatcatccactatgagcgtcgccagcgcgatctgcggagggctctggaatttatcgaagcggctctcgcgctgttgcgcccggattcacttacgtcgccagcccgtcgcatcgccgcaagccagatggaacgcctcatgcgccgtcgctctcggttgcaaagacgactgaccacagctaaatctgaatcctcctaatcatgagctttttccacgcacgattttttaccggagtcccgctgtttaaagacttcatcggcaattaacaggccctcccagcaggcagggaaacccgcgtaaggcgccatatgaaggagggtctccagaatttcctgttctgtggcgccgttattcagggccatttcgatgttcaaacgcaagccgtttggtcggcccagggctgtcatggcggcaactgttatcaggcttcgggttttcagattgaggcctggccgcgcccagatgtcgcccgccaggaaatccgtcacgtagcgtgcaaagtcaggtgaaagcttttcccacgccgtgcgcacctcctgagcacgacgctcgcccagcatccgctgtagcatttcaagccctttttcgttcatggaaagcctgcctcgctacattcccgggtaaagaccatacccggcgctcacgtcaattacctggccggtaatgttccgtgctgcgtccgaacagagaaacaaaaccgtttggctgatatcccgcggcgtgaccatgcggcgaagcgctgccggtcgcatgaattgttctcgcattttctcaatcgaaattccaagagcgcgagcccgagcggccagtacggtttcaatggcatctcccgccacagggccagggcagacagcgtttacctgaacattgacttcgcctgcctcctgtgcaagcgtcagcgtgagactgaggagaccggcttttgaggcggcataggaagcccgcaacgggtaagcccagtgtcctactaccgaagcgatgttgacgatgcggccttcgcggcgccgagccatatgtttcaaggactcacgcgaaaggagaaaagggccggtaaggtttgtgtccatcacttcctgccagtcccgcaagcgtaatcgagtgatgggcgttgtcgggccgcgggctccggcattatttaccaggatatcaatacgcccaaagcggcgaagcgtcgcgcgaatcgcgcggcgaacgtctctctccctgcgaatatcagcacggatggcgagagagcgcccttgatctgtcgttgtcttttggagacatgcttcaagcgagcgcttttgtctccccactccgaccacacaagcgcccgctgccagcaggtccgcagcgatcacggagccgatatctcccgcggcacctgtgacaatcgcaaccttgccagagacaccctcaagattcagaagcgtattcataagcaatgatcagcaaagccatgaaaacgacaaatggcgactgacaaaaactccagcagccgggccttcccagcatcgaaggtggtcccgagcttgccagggaggagtcccgtcagtggtcctttttcagagcgagattcctcctcatcgcttcgctcggggttgaaatgacagcattcagaatcgttctcttatcgccagtcattgtggtggcccttcgttttttcccatggacttcaggacaacttgttgcgtttgcactttgcgctcgccggtcaccgaattttccgtgatgatctgaagctcgccgaccaaacgcagataatcaggatcacccggcttgctccccgcgccgcgctcgaccttgccctgaaagcgataatacttctcatggattttgcgagtcctgaattccaccaggttgccatgacgtgaaccaatcgtgatgggatagctcagaatgacatccgattcgttctcacccggatagacgtcgatgtaacctttcagaagatcttcctcctgaaggatagccagcgtatcctgtggtccgagaaaatgatagcgaccggtcatccggggaacgctctgcgaggcgtcctgtgggtaggctgagacagcaaaaagcgccaggagagaaatgcataaaaaattgattttccttttaagcatcgtcggtcttttccagtctattccttccccgcagccgccacaaggaatcctgagggtggtgtagcaacgtagaaattgttttcattacagatccaatcccgccgagggcatgcgctcctcgggattcgccgattgttgctcgaggatgtcacgttaaagcacgacgaaccttcaggacgctcgtcaatctttgccgatacgaccaagttttccttgcgcagtgtccttcgactgtacactcccaaacttataatttactacctatctcactgtgagaagacttttatggctgcgacgaaaatgtttgattgggctgggatcgtgaactatgcaaaacgcttcgacgccgccgccacggctcggcttaacataccaccctgcatctcgtcattcctcaccaagaggaggaatcccgctctgccaataaaacccttgctatactcctcgccacttggggttcctcggaatgacaggttgcaagagtttttagcgcctcgctgatatctgatacctaaaacctacaaattgagacctgtcacctacagattaagtcgctttcgcgccaggacgacggctccgagcgctccggcattgtcgccgagggcgcccggaacaatcttgatttttttggcagcggggggatgcaggaagtattcataagcggtcttgcgaattggagcgacaaaatcatcacccagccgttccgcgatgcctccgccgatcaccacccgcgccgggtcaagcacgttgacggcattagccaccagaatccccaggtaatactccgcccgcttcatgacttcctgcatcacctgatcttttcttgccagggcttcctgaatcacgctgctggtgatccggtccttattcttttctttcatgatctgcggcaccaggcttttctgtcccgccttgatggcatttcgcacatccctttcgagggccgtgcggctggccaacgcctcggcgcagccgcgatgtccgcaactgcagacggggccatccacgagtaaaactgtgtgaccaatctccccggcccagccgttgctcccttcgtagagttcgccgccggaaataattccaccaccgattccggtgcctacaaagattcctaccaactcttccacctgctcgccggcgcccaaggcgtgctcgccgatcaccccgacattcacatcgttgtccaccaccaccggcacgccgcccagcagggatttcaaagtgtctgagagaggaacatttttccagccaagatttggcgcttcattgacaatgccacgccggacgtcaatagcccccggagcaccgatgctcacggccgcgagcgtcttcaccttgcagcccgcacttttagccacactttcgaccactccggcaatttccctgatcaggactttgggttttacggctgcttccgtctttttcttttccgttgccagaatcttgttttttccattgaccgcgatggccttgatgctggtgccacccagatcaactcccaccataatctcctttttatgcggcataggtctcctcgcttggcgtccgctcgaaaggcgcggcagtttcgcgccgccagagatgattgagaacttccctgtagtgacacgcaggcggtcgcagcggtcggcgcctgcccaaagcacgctactcttccaccatcaaaagcgagtgcggagccaggcgcagcatcgagccgtccgcagaaagcgaggctccggggctggcgaagactggtcgcagcctgtcactcgcgctgccctggcttgccagatggcacgccacaggtagctcggtgaaattcatcactccgacacgcccgctgcccattggaaatatggcgacgcgcggcggcgcgtctaaagaggtcggaacctgagttgccaccttctcccgccactcacgaagggcaagtcgtagggctggtgtaagctgctcgatacgattcccggcatccacaaaagcaagtcgcggcaaggcatctgagaatatcaccatttcgccctgtttttccttgacggtcttcaaatattccccttcattcaagccaattccatcgggcaccggcagacgcgggtcgccgttcagtcggtgggcaaggtcttcgctgacaaaagctgtgccgctctgagcaaagaattgcacaagtttcgtaacgaattgagcatctgtcagcgcatgatctgtgaaaagcgccatcttggctccttttggaaactcggccaccggcagtaaaggaatccccagcatgccaatttcatcgaagatgtaaggttctgatcctgggtcgctggaaggaggcttgtaggccggaatgccgcgccatccgcccacaagcttcgcaagtgcggcgagattttcctgacgggccatcagcgcttctgcctgagcctgataatgtgtggaatcaagatcaccgaagttgaagagcagaatttccggcgccccagccactacggaaacataagcctgatcgagataaaaggtggcgtcagttccatatggatcaaaccaggcgccgccggtcttggcgccgcccacatccgtgagccatcggtagagaaaaaagccctcatactgctgcttatggccccagtggctggaactggggtcgcgcaactcggtgcccacccagatgcggtcgtaaagcgcagtttcggcagacacacggtagcctcgcgcctgatattggtcgtaccactgcgggtatttcagaatgatttttacgtgcggattcacctgtcgcgccgggcccagcacgtcatggcggctgacaccgagcatcaggttctttcgatattgctgccagctcaggctgcctttcgcggctgcgcactccgagcattgacaatccgtgaagaaaaaatcatcgatgatgatttcattgaaaaggccggcggcatcgcggaagatgtggcccagatgcatgcggttggctcggtcggtgtaacacgccacaatcttccatcccgtcgagggtttgcccagtcgggtggtggcgaccgctccggaaacctggaagcccgcgcgctggaaaaaatccctcgcagccttcagggttgtgggatcggcctcatacccgtcgcggaagacttcgatatagactttgctcaaatgcaggcgccgacaaaaggccagagcttcctcgcggccttggggcgtcgaaagccggtcgcgaaccgtctgagcggtgaagatcgtagaccattgcgtagaaagtgccgtctgaggaaaaatcgcggtgaaaatgactcccaagatcatcacagccggcgccagcctgagcttttctctcagatcggatgttttgtaaggctttctcacttctacactctccatattcaatcttcaacggattgcgcccggggcggaaaaccaacgacgtcaatatatcccaatgtaatatttttgaactttgaatctatcggctccctgaaagcttgccgcccgtgcgataaaagatataaaaagccaagtacgttttgcttaaacagtacacctcccggaccaatccttgaaagatggctgtgtcttacccttcactcatgggaacagcctcgttacaaatcctgcagaaaaggattcaattcgcgctcttcgcccagtgtggtcgaaggaccgtggcctgggaagaccggcgtttcatccgcaaaacacaacagcttactgcggatggaggcgaggatttggtgataatccccaccccagagatcggtccggccaatactgcctttgaagagtgtgtctccgctgaaaattttctgcccttctccagatgaaagcaatgagatgctgccaggggaatgacccggcgtcgagagtacctccagggaagatgatcctactcgcagtacatctccctcctttaaaaagtcttttaattgcactgtgccgggcaactcgacgcccaaccaggcggcctgagccgcgagattctggtagagaggaaggtctgccgcatgcatcaggactggcgcacccgttgcttcctgaagcttctgaaggccacccacgtgatcgatgtgggcatgagtggccacaatgtatttcacttgaagctggtgctgctgaaggatcgcgcggacgcgatcaatttcatctcccggatcaatgacaatagcctcgtgagtggcctcgtcacccagaatcgagcaattgcaagccagcataccaacaggaagaatgtggtgaatcatcaagaatacctgtctttacaaaaagacttctttcgcccgagctgaaacagaatcagagatccctggggatgctatggtccgctgcccgggcggaaatgcccccactattttatttccaacgaacgatcactgcggcaaagaatccgtccatccggccgccgcctggccaagtataaaaatagcctgaatccctgaaaagcggggacagatggggaaactcttgtcctaattctgtagcactgagcgcacggaacccttgagatttacccaccacactggaaacgacatcttcattttcttccggttcaagcgaacacgtcgaataaaccaaccttccacttaaggcgagagccgcaagtccctgctgtaagattgagcgttgtatcgcggcaagccggggaatatcctccggttggagtcgccacttgatttcaggattgcgtgccagcgtgccggtacctgaacaagggacgtcaacaagaattcggtcaaaggttggggtgagtggaagaggttgggcagcgtcgagcagcacccgatgtaattgaacgccttccggccaccggcgtgaaagagttttccgaagcgcgcgcattcgccgcaggctgcggtcgcaggccacaatagaaccctgacccatctcatcggctatttgccaggttttgattccgggagcggcgcaaaggtccaaggcccggtttcctcgttgcggagccaggagttcagggaccagttgcgacgcttcgtcctgaattaccacgcgaccttcacgccaggctcgggttttgatgaccctaccggattccacccacaatgcccgcttcccgaagtttccaaggtgcgtctggatgtgatcagccagaagttcatcacgcattttttgccggtcagagcagggacccgtaacgcgaaggtgggtgagcgggatcgcctggctagccgtaatcaaggcacgtgcggcttcactgccgaagtttttctcccagcgcttatgaagccaagcaggaatcgagcggcgtgcgctttcaagatattcctcattcgcagcgtcgggcgggtcacttgcgttgaaggatgctttctcgcatcgccgcaatactgcattgaccaaccccgcggccgacttcttgcgggcagctttcactaattcgaccgattcattcactgcagcggagcggggaatggaactcaaaagacggatttggtatacacccatacggagcgcctcaagaacttcgcggtcaaagtattggatcggttttccagagagtttctcgatcgtgaaatcgagatcacctcgccagcggaggactcccatgaccagatctgtaaccaacctccggtctacttcttttagacgcgaaatggccggtcggtgcaacaagtccactgcgtaatttcgcttttcatccaactgacaaagaatctggaaagcggctagacgagcggatgagatgggcatgtagggtgtggtctatcgtacggataacagaaattccccgcgcctcataaaagactccagcaagggatctgtaaggggccgagggcggagattaggactatttacctttaaataactacgaaattgtggtatgagtaaaaggccgaattgcagacaacccgactcggatcaacaaaaattataggggctctctgcaatgggatcgcgtttggcgcgaatttgactcacttcgggaaaggagaagtatcatgaatcagactcacaattctgtagaagcttccatccgcaaggccttcgagctcctcattcaaattcgagggcatcggcaagctgaccgtctgctggctcttgccaacggttacctgcgcacgctcttgcattccacccccgagagcaccccgatcatggtttccatccgcgcggtcaggatccgcgagccttaagcacgcgagcggctgcggattacagactcattcagcctgaatcgcgggggcgccgctcgcaacttctgacggttgggctctttcggccttcaattgggcaacctggcgctgaagctcagacgccagatcctccagaatgcgtagttgctccgagcggcgctcaatggcgctttccagccgcgctatttgctggcggagccgggcattttcccgttgcagcatttgggaaccggtgtcgggaagtcctcgcttcacaccggcattccgcacgcgcgcttcgggcgcaccggcaacccgctcctgaatctgccggataacagcatccacctccttgcgttcggccccgggagggcagatgctgcgcaagagaaggagccgcgccaaatcaggctggttgcgcccacgttcccaatgttgaatagcccctttggtggcgttcaatcgccgcgataaaccttcctggctaaggcccaggcgctgccgtacccggcggattactttcggaatgtcaagcgttgtggccataaaattcctcccatgcgaaatagtacttgacaagagctatggtactaggctagactttgaaatgttcccgcttccatagctgtcgtctgatcttcagaagtcggctggaagaagagaacgacgctttttccgcaggttttgaacgctccacgagtataccagcggggcggcctcctgcggcgcgccttgtgacttgccatgccttgtgcatggctttttctggtatatgttagttactctttgtataataatcacgaatataacgccttcaaagagcactggttgcgtggtcccttgccactcaggaatgtggcttggtgcgccgataactgcacggcatggttcattgttcattcttctctcaattcgggcacaaaatatcgttagacaaacggctcgcaagctacaccgattcctgtttatagattacaggcccccgctcatctgctggaggatgttcaagagttcattctgttctcgagcctgccgatctttcaggcgcctcctcagcaagaacttccagagggtcaaagctgccgcatggagattccgccttcgatcacagctagcctacatcacaagacctctcgggtcaagagaggatttatttctagcctacactagggtgggtaccggctggcagccatgccgctgcaagggcttgttttcaaggcaaagtgaacgctgctcgcagcgcttgatctcgtgctcgcccctctcaagagttcgccttataagaaatcaagaagggcagcttcaatctttgaatcatatcccctcgcgcactcttagtttcagatcccctcgcaaatttaaaacatggatcagccgctgtgcggagaggagattagacgatgcaacctgtcactcatgcccccggcatgttgaatcaatccgggatgttaaaaacaaccacccacccgatccccgcgtcactcgtccttgcgccacccggggaactccggtggaagccctccaacccgggagaggcggaaatagccgtcccacttccctcaaatccgcgatgcgcagaaaggggctgcgtttttcccgctgctcctgatacggcagggatgtgccttcatcattaccggcaaatccaggaaccgatcctatttgcctctcaccaacccacacgagcagttgtggaacgcgggaggtttggcatcccagagcatgaagttgacacatcccgactgagagaccgccgtcggctggcagccttgcgggaggcttttttggaagatgaatttactcgttaagcgagccctgtgaactgaggtgaaagatggcagcacctttacaatcctggacacaaaatgtcacttctccctctgctgggaggacgactggcgggagcagccacgcccccttgctcacagcttccagcgcatggcttgctcttcagggtcgaaccgggatcccgattggccgcgccacattctatcgatggcttagcaacggaaaaatcttctccgttcggattgggaccaagatgtatattccactttccgtgatcgaggagattgtccggcgctgccagtcgggcgacggactatagtgtctgcttcttgctcgttcctttgaagctaagtttaacgcgtcagcagatgttcaagagctgattgcaattccggaaatcggaatgggtagccggaggctttcagacgggcagggtcagcgcgctggctggccagaagcacttcatcggccatttccccaaaggcaagtcgcgtcgcaaacgccggcattctcagcaaggtgggacgcttcagaatcctgcccagcgtctcaatgaattcgctgtttcttaccggatggggagaagccagaatcaccgggccgctcagttcagtgttagcgaggcaatgctgaatggctccgatagcatcatccagcgcaatccaactcatgtattgccttccgcttccaatccgcccacccaatccttttcggaaaaccggaagcattcgagcgagcgctccaccttccgcgcttaacaccatactatttctcagaatgacggtgcgaatacctttttcagcggctggcgctgcggcttcttcccattcgcggcagacttgcgctaaaaatcccgacccggccggcgtttcttcccgcagaatctcatctccacgattcccgtaatatccaattgcagacgcgcttaccagtgtcttcggaggatttgaaagcctggtgagagactcacagagcaatcgggttcctgccacgcgactttcccggattctggccttttgttccggggtccatcgacgcgcggcgatattttcacctgcaagatgaattacggcatcaatttcctggtcagaaagcgcaggaggaaggttagactcgggatcccacaggatggcgtcgtgagccacgtgggttctcgaacgtaccaggcgaacggtctgatgcccggcggctgtaagctctctgagtagcgctgagccaatcagtccgcttgaccctgtgatgaggactcgcatggaaccccgaaatgagggtgttatagcgtcatcatagcacaggcctggcaatggaattttaccttgcgctacctcagaacaaatggacgcggttggcaaggagaacgtatgaattggggggtatctggacaccgtttatcgatccgccgctttggtcaaaaaacagaagaccccgaacttgcaactggggggaagggatgaggccggcaagcccattcacattaataaattgggtttgcggattagtgatgacgtaaatattctgcccctgaaaaagcgtaaaacatgggatgaaacggaaggcaccgctcacgttatcagctcctgccgtgaggagggaagagaagttacccgaaaccgtttgaagcggaatgtaaatattactggcgtcaacggttgaagggggtgttgttgccggaggagtcgctgccaccggagcggtatatgttccatgcaccacaagttgctggccgacatttagaaatgttgaatccggggtaaggtttggaaaattaacggccggagcggaaaaatggaagccggttgaagtggagacgttgacgatgacgggcggggtatccagggggactgagttcccggttccggcagaggtattcggttcctgatcgtgaacatagagctgaaattgggtgagatttcccgaagaatctttagtgacagagatcacatagcccagaaaagctgttcggtcgttatcaagatcggtttgatcttcgattaccacggtattggcaataaaatttccctgagaatccacgtaaccattgatttccacaaagttcccggtcgtaatctgattaagcgccgcggcgccgatcagttgagagttcttagtcagattgacggtgatagcggggccagcgccttccagggatgaagtgacgttaaatcccggcaaagtttggaccacgaaactgccaataaaatttgagttagtgcttgtgttattgacgctgaggatgtagccatggaaatcatccagagtaccaaatccctgcccccctgaagctgtcagcgtcgtggcattcaccaccggcgttaccttgacggtcagggatcctggagacccggtgacattcacctggccctgagtcgtcaactcaattgattgaggcaggttgaaatcgatgttcatggcggcggcctgacaaggcgtcgtggaggtggacgagcaggccttgatcaccagtggcggattgatcgtaaagttaacgttttccgaactgagggttggagtgattacgtcaatggggggattcacagcagggtcgaaaagcgccatgctggaagcgctgaactgaacctggcctccagtataagttcccggagagacggagacgacatcggcgagggcggcggtgtcctttagagctgcaaagtccaggggaatgaaggtattggccgccagaacggaaacagaaccaccccctccctgtggagtcagcgtcagtgaagcaatatttgttcggaaagagaggaggttacacagcggaacgtcaccggcaaaaatgatcagagtccctttctcgttgcttgtggatgcagggtttgagctgcacccttctgttccaaaagcgagagctgttaggatcaagccccaaaggagtaagtgtctaaacattctcctcctcacgaaatcattcggtgaacgcttttctgcgctcagccgccgcttcttccggcgcggcttgctgcctcattgcgagtcggggtccatcaacgctagtgcaaaatggatttagcgggtgcgtaagcttgatgcaataagcttgcttctgctacagctttctcttgacgtccccttcgttcccttgcctgaacgtgaactttatgagattcgacaaaacacttaaaaaaattcagaataacacacgtcttttcagcgatgccagcttttcgatcacgcttgaaaatatcattcctctcctgtacactcacagcatcagtcatttcaaaaatcatcaactttgacaaattcagaccgccttgggacctagaggaaagggtagggtcgctatggccagtggaaaaatttttattaattatcgccgggatgacagccgggcagattcaggccgattgtatgatcgcctcaaggctcgttatccgaatcatgtctttcgcgatattgggtcccttgaaccgggtgtcgagtggcaggaagctatcgagaaggtgttgggttcaagcgatgcagtcgtggtggtgatcggcaaaagctggctgacggtgacgaattcggcgggcacccgacgacttgacgacccgaaggatacggttcgtcaggagatcttgactgctctccggcgaggcgtgcgggtgtttccagtgctggtgggtggagcccgcatgccgtcggaagaagagcttccagcagaccttcaatcgcttgcgcggcgcaacgctctcgaaattaccgagcaagactgggatgaaggcttcgagaaactcgcagaggcgcttgaccacgccttgggcgtacggggaaggacgccgaaacagcggcgccgcttcaggccgggtgtggctgccgttgcgcttcttggcgcgacaatcattgcagccgtcgtggtcacgatttatcactcagcgcagaactcgcccgtgtccgtcgtgcgcgaagacgccggccctcagaaagacgccatgcctaatgctgctgacagggcgccaacaaacggagcgggagcggagtcgaatgctggcatacgctcattgaaaacctctgtcgctccgccgcgagaacaggctagccgcacatcgtcagggccaaccaaggcttccgcaccagcgcgaataacctctgctccggtatctcccccgccggctgaaatcagctctgctcattttgttggcaactggcgggcaatagtgacaggttccggtcagcaactcatcgagagcgttgatctctacccggatttcagctttggtgtcacactgaaccgttcgtctgccgccgttggaggatggcaatacaacgccgcagatgacgttctgaatttttcaaatggcacaaattttctcaacaacggagttaagtttgcctgcaaattgaaaggcactgacggaacacacgccaactttggcgggccttgccttgacctgatgcagatgagctggaatgtggcgctgactcgtgagggaaatctttccgaggtggtttacaacgtgccgaaggttgacctttcggccctgacgatggctgaaaaagccgcctttaccgaagcgttatcgcaaggcttctgcacttgcggttgcgggatgacgatccttaattgtctgcgcaatgaccgcacctgcctggtaagccccaacctggcgcgcgcggaactggtggtgttgatgcaatacaggcgccgatgagggggtagccttgagcctgaactatcagcaagactcccttttacgacggatcaggcatcctttgtctttgtggcctgctcctgccccgccgcccacttggcgtgctcctgcgaaaccaacgactcaattctttccgccaagagtgtatggggattgatggcagcagcgtaaggaccagccccggctaaatagagatatttttcgtgcttcagggattcgcaagtggaacggtaagtgatccagttgtaatgatattgattgagttggagcacgccttccaaaattgcgatcagcgccccaaggcttcccgccacccacggcaatttgaaaccagaaaataacggaaccaggcccgccgcaccaatctcaatcaccttcatccacttgaaagtgcgctggttgaaattactcttgtgatcgtaccaaccaatttgatcttcgaggcgttcaagcgtcgggtcagcatcaggcatgtctcacctcgtctatcggagtgcctaagattctagcctaatctgcgtcaaggtctacactcagaatattcttgctggccgcataaggcattggaacaggcttgattggaacccgaaaataggttggcggagggagagggattcgaacccccgagcccctttcggggctaacggttttcaagaccgccggtttcaaccactcacccatccctccgggaagtccacttcaacggtatgaagcaatcggctttattttagcagaacaagcgccggctgaagaaccggttgcggagccttttgccccggggtcgaacttgggggagcgtgctcgcatgaaattcaccaaacatcagtattctcggccgaaggatggcttgttcgttaaagccttccacaaaaaaccccctgcatttctcgaaaaattttcgtaaaatgtgaagccttccggtgaacctccggcaaagaggaggggggcatgagctacaacctacttgaggaagattggattccagttctatggaagactggaaagctcactcgcgtcaacctcattcaggtgctcactgaagcacactgcatccgccagattgccgccaccaatcccatggaccgcgtggccaccctgcgttttctgctcgcactgctttattggtgcgtaggggatccaccgcgcgatccaacctcgggtggcaccttttccgaagcatggtttaccaaactctatgaaaacaaggaatgcttcaatttgctgggagacggaatccggttctatcagtaccgtccaggctcgggaaaagacaaaaagctttccgtcaactatctcattcatgaagtgccgacggggtccaatgtacggcatttccggcattccgcggacggagttaacggcctttgtcgggcgtgttgtgccacagggttgttgcggctacctgtattcaccacccaaggggggaaaggaaaatcaccaggcatcaatggcaaaccccccgtctacgtcatacctctcggacgatccctgtgtgagaccttgtggctctcttggcgaccacagtcgaatttgggtacgcctgcatgggagaagcctgacatggcactgcccaagactggcgaagtccccctcctgaccgggctcacatggctgccgcgacgcgtttggctggacgaccccatggaacccgaagtcccttgtatttgttgcgggcgaaaagagcttctgattcggcagtgcatatttgccggcatcggtagcggcaaggcggatggccgagtttggaacgacccgcacgtcgttcgtgacaaaaatgtggtgatgacaccaagtaatgcccttgccgattccgataaagcggctgacgattgggcaaagataactgcggcgatcctcatcgataccaagcacacttccagacgccgattctgggttgttggtttcgcaagtaaacaggacaagtacctggaagcgaaggaatttgagattttccttcaacctaccacggaaagtgctcagattcaagatgccatcaaggagatcgagagatggcaaagagaagcagcggggctggcaaaaagagttgtcagagtggtgaagaacaagaaatcctcgcgaaaacatgttgagatcgacgccctggtaaaagccattcggcctcatatcgaagccagtgcctctgtgaaattgaaccgcctcatttccgacggccacccggcatgggagggggcggccaactactatgaagggatgatggttgccatctctagatcaatttctccggattttacggccacagcgctacgacagcggcaggaaattgcgcgcgttaaaccagacatgcggttaaaaacagagaaggcagggaatctgaccgcaagagaggcgataagtgactccaacagaacagtacatcaaacgcctgacacacctgaagaccggtgacctcggattgctgcgcacccacgcggggcaggagctcgatgagaaggtagagggcttcgacctgtttacgggcctatggtggccgctgcgtcaaaggaactcgcgggcaccccgccgtgacgtggcatggctcgtcgccaagctctatgccttccggccactcgagtattcggcggaagagacgctagctttccttcttgggcaatgccaaccagaagttggcaagcgggagaagttcatccagcggtttgataggatgctgactctgcccatccgcaaaatcgaacctgcgttgcaatgggcgcttgacgtgctcaattcaaagggcatgggactcgactggataaaactcacggatgatctttcggtttgggaacgagaatccacccgtctcgaatgggcaaaggaatttttgaagtctctaggaggaggataaatgctgatccagattcacgctattcaaaatcacgctccggccaatttgaaccgagatgacttgggcgcgcccaaagcctgctatttcggcggtgtgctgcgctcgcgcatctccagccaatgcctcaagcgcagcatccgtagaagcgacgagttcaggcagttgctaggcggtgttcgtacgcggcaattagcgaaattgatagctgacaagattcccgagaaagatgtgaggaagcgtgcggagaagattcttgaaatatgcggattcaagccctggagatcggaaggcgagtccgaaaattctgagaagagcaaaatgcttgtctatactaccaaacaggctgttgaagagatggcgaacctcctccgaaacagcgatggaaaggctgagagtgaactggcggaggggttcgccggacttattgcggagcgcacggcagttccggacatggccttgtcgggccgcatgctggagccggacaaatcttctacggtttgggagaagcgtgatactaaggtggaagcagcacttcaagtggcccatgcaatctccacccatgaggcccgccccgaggtggattactacgtcgctgccgatgacatccccggcgaggacgcgggtgccggctttgtggacgaggctatgtttgcctcggcctgtttttacaaatatttctcaatccactgggagcaattggtgaaaaacctcatggggtttggggaagaacatgaaaagctggccgcacatacggtgggcgcattcattcggggggctgcgatggtgaaccccactggaaaacagaacagtttcgccgcgcataatcctcccgatggcatgctggttgagatcagggacacccctctcagctacgccaacgcttttgcgaaacccgcggttgctcagggtgaacgtgacctcatcgcccagagcatcgcgcagcttggccaatacatccacgacatggacaccgggtacggtaagccaacggagcgattctggttctcgcctaattcccgccatcctctgctggcttacatcgaggaagaacaagatggaaaaaagaaacgacgtgagattgcgcttaccgacaataatctcagttcgctcgatatcttaattcaaaaggtcatcgagaaaatcggccacaattggcatgaggttcagaaaattactgtgaacgcagaggtggtttgatgagggccaacaccttatttcttcgcttggagggtcttcttcaagcctggggagaccaccagtcaaagtttgtcatccgacggacggcggaagctccgaccaagtctggcgttgtcgggatgctgtgcgccgccctgggggttagcagatgtaaagcctctaatgaatggcttcgaaagctgggctcgctttgtatgggggcgcgcattgatgcgccgggtgtccgctggtgggactatcagacggtcggagccaaggtcggaatacccagggcagatggtgctggcgctaagagaacggccgcgacgggggaaattgaaactctcatcacgcgtcgcgaatatctctgcgacgcatccttcctgatcgctttgcagggtgaggccgacctgatagcgcagttggagaccgcagtaggagcgcccaagtggacgctctatcttggtagaaaatgctgccctccgtcacgccctttgctggaaaaacccgcaagcggtgagtttcccgatttactctcagcccttaagtcgattccttggcgcaaacggatgaaggaggatcaaccgcccaaaacggttgactgcctgctcgattggcagcccacggcagatcagcctgaagcgcctgatgatgccttcgtctggtatgatgtgccccgcacctttgaaccaccctcgcacgaaccccgattcgtgctccggcgtcaattgccagtggccatcgagggcggcgtgggcgtcgcaggccagccggcgcagaccgaaactccgccgccgccccgcccgcgggccgattacaccaactccgcctacaggaacaagcgcctggagcggcttgcccgcgaccagcagctttgcgttttttgcaaggcgccagccacaacggtacaacacatcacctatcggcgcgccggaggcaatgaaagcttggaagatctgcgttcgctctgccgtttgtgtcatgacgccgtgaccatgatcgagtatggtttaaacatgggtctggatcggatcaatcccgaagagccacgttggcgcgaccagattattgccaagcggaacgagatcatcgccttccgctcgctcgaaacgcgtcggcgacgcctcgctccagaggaggtggaatagccatgtggatttcgtgtctcctgatcgacgtcggtgacaatcccgaccgcccccgccccgggcgccaatggctgcgaaacctctatcgcgttcaccagcgcctttgcatggcgtttccctccgaccgcagaaagcagtacgacccagagtttttaaagccctaccagccagaggattttgggaacggccatgttcatgttgagcgcgggccgaccgctggctttctcttccgccttgatcccgaggaacgatgttgccgcgaagcatcacaggctcggcattccggcagtcgggtggtaattctggtacagtctgcaccaaaacctgactgggaatacgcctttcacaacgcctgttatctgctggccgccccgccggaagtaaagccattcaacccgtgctacacaacgggtcagcggcttcgattccgcctccttgcgaatcctacccgccgcctcacggaacactcgcttggagccgacggacagctcgtcaagaaatgggcgaatacggataagaaagggatgcgcgtgcctgtgccgacggatcaactcctcgattggatcaatcggcgagctgaaaaggcggggttttctatcgagaaggattccatcaatgttttgccgggttatgtgttcgccaacaaaagaggggacaggcatggaattcgcctgcgctctgtccgttatgacgggcttctcagcgttaccgagcccgcactgtttcggcaagcgattatacaaggcatcgggccaggcaaagctttcggcttcgggctgctttcggtagcgccgtgttgtaccggaggtctatgaccgccatttttgacctcctgccccgtttgattctttacagtggagaccacaccatcgccacacttaccactaccgggcccttcctcagcgaagagggtaattccccgccttggttaaggaggggataaggggtggttggtgtaaagaacgggctgagagaggacgccagccgcctcgatcatcgatggggcgcagctacaaaaacatgaaagacctccatctgttgcccaaagtccgcgatagttccagtttcctttacgtcgagcattgcaagatcgaccaggagggcaaagcgatcgccattcacgacgcgaagggccgagtgccagtaccctgcgcgtcattgctggtgctgatgctcggtcccggcaccagcatcacgcacgcggctgtgcgatctcttgctgacaatggctgcaccatcctctggacgggcgaagagggcgtccgaacctacgctcagggcatgggagaaacgcgctcttccgaacgcctgctgcatcagtcacgcctctgctctgcgcccgaattgcgcttcatagtggttaaaaggctttacaagatgcgtttcccggagaagctggacccctccctgaccatccagcaattgcgcggcatggagggtgtccgggtgcgcgacgcatacttccgcgccagccgcgaggcgggcattccgtggtccggccgatcctacaaaaccgataactggcaggccgccgatgccgtcaatcgcgccctttcggtggccaacagttgcctctacggcgtctgccacgccgccattgtttccgtcggttattcaccggccttgggatttattcacaccggaaagatgctctcctttgtctacgatgttgccgacctgtataaaaccgaagtcaccattcccctcgcctttcgggccgcagccgaaggaatgggctttcaggaaagccacgtaagaaggaaatgtcgcgacgcgtttgtggaaagccgcttattacagagaattatccccgatatcgaccgcgctctcgattggggttcttcggaaggtgggcagggggatgccagactggatgcccaaccagcggctccagggtggctctgggatcccgaagtgggggcggtggagggaggcatcaaccgcggagatgatgctgaaggaggtgacaagccacggtcgtgatggtgctcgaaaatgcccctcccagcgtgcgcggggaactgacacgatggatgctggaattgcatgctggcgtttttgtgggaaacatttccgcgctggtgcgggaaaagctctggcaggaagtctgccgcaaattggcgggtggggctggaattctggtctacaatgctgccaacgagcaggggtttgatatccgcttttggggatcgccctctcggcgggtcgaaaacttcgagggacttcttctagttcgcgggccataagccctttaaatcgcagcgtcgtccccacgcgtgtgggggtgaaccgttcatcggcgcccggccaatcaagattacgcggtcgtccccacgcgtgtgggggtgaaccatgatctgaatcgcttccgtaatcggccttcttgtcgtccccacgcgtgtgggggtgaaccgccccgcggacggccaacgaagggcgtgagacagtcgtccccacgcgtgtgggggtgaaccgcttcgccgttccgcgagactgcaggcttggatgtcgtccccacgcgtgtgggggtgaaccgcttaaccctatcccctatcccaaacccttcccgtcgtccccacgcgtgtgggggtgaaccgacaactcgcgcgataacagccagttacggaccgtcgtccccacgcgtgtgggggtgaaccgtccccaacgacggggacaatctgcgggaagctgtcgtccccacgcgtgtgggggtgaaccgtgtccggtttgtgccaaaattttaagcaaggcgtcgtccccacgcgtgtgggggtgaaccgtccgtgtggaacgttgtcatggtacttcgttcgtcgtccccacgcgtgtgggggtgaaccgctgccgctgaaggatgggatttggcagcggtcgtcgtccccacgcgtgtgggggtgaaccgcgccatgttggggtgggatgtgtcgtaggcccgtcgtccccacgcgtgtgggggtgaaccggacgccagcctcgatgagaaaaccatcaccgcgtcgtccccacgcgtgtgggggtgaaccgctggctgcggtgcttgaggccaatgtcacactgtcgtccccacgcgtgtgggggtgaaccgcctccctcttttccaccgaccttcccgcctgcgtcgtccccacgcgtgtgggggtgaaccgattctggctggattaaaagcagcggaccggcagtcgtccccacgcgtgtgggggtgaaccgcgtaccatgaatctgacaaaccctttcctgacgtcgtccccacgcgtgtgggggtgaaccgtcttgacttggagtgatcagggtgatatggaagtcgtccccacgcgtgtgggggtgaaccgtcttgacttggagtgatcagggtgatatggaagtcgtccccacgcgtgtgggggtgaaccgcgatgcgagagtttgaagaaaagaccaatgccgtcgtccccacgcgtgtgggggtgaaccgaaggagctgctggccgatgctgacggcgaaccgtcgtccccacgcgtgtgggggtgaaccgatcctcgcgagtgtgttagtccgttctgtggcagtcgtccccacgcgtgtgggggtgaaccgatgtgcccgcgaagctcctgatgacgcgcgacgtcgtccccacgcgtgtgggggtgaaccgagcaagaaaattggcactcttgaagagctaacgtcgtccccacgcgtgtgggggtgaaccgttggcgcggagaatcttttctcggtccgtaaagtcgtccccacgcgtgtgggggtgaaccgataatgccgcccgactttcaggaggtgcggatgtcgtccccacgcgtgtgggggtgaaccgctgaaggaattgaaagacgaaaaatcgctgaggccatcccccgcacgcccggagggtgaaccggctaatgtcaaatctcagtgtcgaaattgcgaataggcagaggtaaaccggggtttgtaatttaagatttcagattcccgtccccgcacggcccatgcctaattctc

SEQ ID NO: 531 - DNA, 63461 bp, Artificial Sequence
  Synthetic Oligonucleotide
cccatttactatttggtgaaaagcatcatgcgcaaaagaaaaagttttgcgcatggcacacttggtagtgggtagaatcatctaataacatgtataaaccgtttccatgtcgagccagttcggcccggctttgacgtctgccggaagttcgacggatagagcgccccaatcgcggcccgctgcttccattgctctgcgggttttctccgccgtgtccgccactttttcggcaggcgtttcaagcacgatttcgtcatgaacctgaaggagcattttagcgtccatctcgcccgcgagtatcatcttgtgaacgtcgatcatggcgagtttcataatgtccgccgcagagccttgaatgcgggtgttgaaagccgcgcgcaatcccgcttcgcgctcctgccggttggaagacctcagttccggcacgcggcggcggcgtccgaacagcgtctctgcgaaaccgtcttcgaggagtttttcgtttgttttctctatgaagtcgcgaacgccggggaaccgcgagaaataagtttctatgaagtcggcggcctgctgccgggagatgccaagctcctgtgaaagcctgaactcgcgcatcccgtatatgaggccgaagttgattgtcttcgcgtatctgcgctggtcctgcgtcacttccgagacggggactccgaacacctgagcggcgacggacgcgtgaatgtcttcccggttgcggaacgcttcgagcagggaagggtcgccggacatctcggcgaggagccgtatctcgatctgggagtagtcggcggagacaagggcgaggcctttggagccggggatgaacgcgcgcctgatctcgcgcccatcctcggagcgcaccgggatgttctgcatgttagggttgctgcttgacaatctgcctgacgcggccagcgtctggttgaagctcgtgtggactctgcccgtgcgcgggtttatcagcgcgggcagagcgtctatgtatgtgccgcgaagcttgctcgcctgccggaactttattatcagcgggaccgccgggtggtcgcatttaagctgttcgaggacggctatgtcggtggattctttcttgacttttctgaggccgagttttacgaacagcaactcggccacctgtttcggggaattcaggttgacatccgccccggcaagctccgccaccgccgcgctcagcgcccgctctcttgcggcgaagtcttcggacatccccgcgagcgcggacgcgtccagagccactccgttccactccatctcggccaataccgggataaggggcatctcgattttcctgaacacgcggtcgaggccgtctgcggccagccgcctcgaaagctccggctcgatcctcaacgcggcgtccacgtcagcgcaggcgtaatccaccgcgtcccttatcttgacctcagagaatttcttctgagattttcccttgccgaccatatcctcgtatgttttcaggcccgctcccagcaggttcgccgcgaccgttttcagcccgtatctgcggccgtccgggtctataaggtaagcggcgatgaatgagtcgtaagcgatgttggcaagagacacgccagccgcgcgaagcatctgcgcgtcgaatttgaggttgtggccgattttttctatgtcagggttttccagatacggtttcaacaaagcgattgcgcggtccgggtctatctgtttttcagcgtccgggtcggagtcgtcttcatcgtccgagccgtcgccgccgccgaaaaggtcgccgccgccgcgtttcacggtggagccgtgtcgaatggggatgtagatggcgtcgccggcctcggaagccagagcgatgcccactatggggtcggcgaaggtgtccagcccgtcggtttcgaggtctacgcaaagcctgccgcgcgaggcggcgcgctcaagcgcttcgatgacttcggcttcgtcgaagacagccttataaaccgagtcgaactgaacggcggcggggcggggcggggcggccgcctcctctttcattccaagctccgatatgaaacttctcatttcatatttctcgaagaacgccgcaagcttttcgttgtcgaccgccgggagtttgtacgcgccgatttcaaatgggagcggcgcgtgtttctctatcgtgccgagccttctgctcagttccgcaagttccctgttagccgccagtttttcccgcagccctttcttgtcaatctgttcaagagagtcgaacacggcgtccatatctccgaattgttcgagcagagacaccgctgttttggggccgacgcccggcactccggggatgttgtccgaactgtcgccttcaagccctttgaggtcgggtatgcgttccggataaacgcccattttttctttaaccgcctcgcggtcgaacttctcaagctctgaggagcctttcagcgacatcagcactgatacgctgtcgttcaccaactggaacatatctctatcgcctgtaagaatatcgacctcaaggccgtgttccgcgcccgcccgcgccagagtgccgatcacatcgtccgcctcgtacccgtcgagcttggccggagttataccgaaagcggagataagctcgttgatggccggaatctgttcccgcaactcgtccggcattctgtccctgtgagctttgtaggcggcatattcggcatgcctgaaagtgggtgtctcggactccatcgccaccaccagatagtcgggcttattatctttaaaaatcttcagcagcgcgcgcgccatgccgaacaccgccccggtgggaattccctccgccgtcttcatcttgggcatggtgtgatagaacctgtatataaggccgaacgtgtcaatcaacaacaatttgtctttggtcataatcccggcgtctccccgcgaggcgcggctgcccgccgcccgcgttgaatattatagcgcaggcgcgccgctcacgcgcgcggaagcggcatgagcgaaagattcttgcggggaagaaaaagggaaaacttttgaaacgtttcgtcacgagtatgcatagaagaagccgctaacgattataggctttattataaagcttatttatttcacagacagcttgattgtttttacagaaaccattactgtcagaaggcgggtcattaataactgtcgggttgcgcgcctcatttgtcagcataaagcgcgcgaccgacccatttccgcatgagtcgtttcgtatgacataaattaattcatgtcccaaatcgctctccaaaacgccaaagcggccatcgctgtcgcctgaatcagtcttttcacaccgtgacagtcacaacggtgtaaacgctattgaaaccagtgtgaatcccgttaaaacacgttaaaaaacctgttaaaaccgcgtttgtaaaaacaaacgaaaaacgccccttttgcggcccttttcggggttaaaaaacgactgaaaaccatgccggaaacgccccgtttcaagcgcgtttgacaagaattaatttatgtcaatttgaatgaaacgacaccgcagaacgcctcccgcgctgccgcgcaaatgctcaaatatgcctttatataatgatgtttatgattgcgttcgaacttcagataatgcgtattatccgcagttacgccctgccgcgcccgtcaacaaccttttgtttatcgcgcttttttcgcaccgccttttccgttcggaccgtattatctgaagtcttttccgcgtttacttgaaacatcccgctgcatagggtcctccaaagacatcgagaggaacgtaaaaaatacattttttgtcgaaaatgaaacgctatgggcaattcgggccgctttggaaatgcaaagagctttcgaagaattaaaacgcgactggccgccggagttgaaaaaactgggaatcggcatagggataaactacggcgaggcggttgtcggaaacataggaactgaagaaacaatggattacacgatcataggcgacgtcgtgaacaccgcacagagggtagagtcaatagcgcgcgccggacaaatcctaatcacaaagaatgctttgctgcgggttgaaggaaaaataacgttacgcgcattagcgccggttcaactcaaaggaaagtcgtttcctgttgaaatatttgaggttgcaaatatcggacagtaggatcaactaatcaatacaacattcgactctcgctagccaatatggttacaacaacaagccataagagttaatcaagaatgcttttccgccgatatcattggcttctgatatttcagataatttatgcatagagaataacaaaaggcgaagggatatgtatcgccgacaattatgaaagatttcatgaaaatgtttatcatcaatatctttaagagtcgacgtgcttatcttttgtttagtttaattctgatcggtatagtaattgcgggatgcggaggaaccggaaaatggaacccgccgcctgtaacagacaccgccgcgcccgctgtgactgccgttgttccattaaacaacgcctccggcgtggcaatcaatacgaaagtaatcaccgccgccttcagcgaggcgatggatcccgccacaatcaccacggcaacatttaccctgatgcagggagtaacggaaattccgggttctgtggcgtacgtcgatgtaacagcgacttttacgcctgacagcgctctcgatgaattgaccacttacaccgccacgatcaaaacaggccccgccggagccaaggatgtggccggcaatgagttggtcggcaactaaaggatttcttatattgcccgatgcgggcaacagggagtcagaagtttagaaacatcgtctatgtgtctttgataaagtgaaatgtttgcaatacacaaaacatggaagaatattatgaaacattctattagaagaataatcaattccgttcacaggggcagccgcaaggccgggcgctgcggcgccgtcaaagccctcattttcatagcgatgtttgccgtggtcgctcagttcgcatccgtggttgcgtcggcgtctgattacacgtgggaatttacaaccgcggatataacgccgcctgttcagagcgcttgggatcctgcgaaagattcgacgcttgcaacccactcgccgacgattacgttcaacacgaatgagaacgctgattgcaaatggtcgcttgccgatcaggcatacggagacatggccgacgactgcgacggcgacggcacaatgagccagagctgcgcaacgtcgggtctcgcatcgggcgctgtaactgtctatattgcctgccgcgacacatcgctcaacgcggacgacatcgcaacgaatacgcatgtgaattatcttatcaacatagcgccggtcgccgatgcgggggcggatcaaacgctcattctgccgtgcgttcccgccgcggtcgctctcgacggaagcgccagcgcggatgcggatggcaaccccctcacttacgagtggacgcagtccggcggcccggcggttgcattgtcgagcggcacagtgcagacgcctacattcactccgacttccactggaatatacgctttcgacctgatagttaatgacggaataataaacagcgccaccgacacggttacgattgccatgcaactcactccgggcgcagttccgcttggttcgacctgcgctttcggagtcatggcagccgccaccatcaccaacaccggcgcaaccactatagatggaaatgtttcattgagtccgggcgcatcaataaccggaagtccgacagtgaccggcacgacgcacattaacgatgcggtgtcagttctagcaaaacaagacttattggacgcgtataacttcgctataggtatgacgccagacgcagacgttggaactgcggatttgggcgcgctgacacttccaccgggcgtctatagctccgccagcacaatgaacataagcacagaccttgttctcgacggcgggggcgacccgaatgccgtctgggtattcttgatcggctcctcgctgactgcaaacgctggaaatgtttcggtgaccaacagcgcgcaggccgggaacgtgttttgggttgcctccgcatccgcgactattggagccggcgctaacttcactggaaacatactggccggcgtaagcgtcacttgtgtttccggctccagaatagacggcagagtattggccggagcgacgagcgacaccggcgcggttactttggacacaaacactatcatcgttcctctcccgtaggctgatggagctaattcccgggcgaggaagtcatagcgcataaggaaagaatattacgaaccgataatgataaaccaaaataaaaggagacggaaaactatgagcaacaagaaaagcatcggggaacgtgttgacaaagctgtgaataaagtgtcgaaaaaggctgataaagtaaaggaagccgtagttgacacagcgcacgacattaaaaagaacgtgaagaaagctgtcaagtgattctggcgaggccgctttagatttgggccacacaaaaacgacggcgcatgcaacatgttgtctatgcagcggttttcagacgcatgcgtcgtctgtctttgtgctttagtattcaatcggattgctaaccgcattttcgccaacgcgggccgacgcatcaataataatcggaggatacgaatatggaaaatgttgtaaaagagactgaaacaacacaaatcggcgacgcaagcgctgtgacgactccaactgaaaagaaggcaaccggttatcagacgggcggatattcagtctattacttctttggcgctttggaaatacttttggttttccgcctcgttcttaagttgatgggagccaacctttctagcggctttgtgaaattcatttatggattaaccggatttttcattgtgccttttgaaaacatattccgcagggggctttcagaaggcatagaaacgacttcggtttttgagccgtcaacggtagtcgcaattattgtgtactctgttgtggcttggggtattgttaagctaatacgaataatctcaaaagagcaacagccctcatagtttgtttaatatgtttggtttgggagcgtgttggagtattgcgatatttcgaaattaaaggagacgaaaaagcatgagtgacaaaagaaccatcgaaaaacgcgcgggtaatgtgtcgaaaaaggttgcaagaagcaagggtaagatcgacacagaaaaagagaatctctctgggattttgcatgacatttcagaaagagacgagaatgcggtcgatttgagcccacagattgcaaagcgcgcctatgaactatacgaactgcgaggccgacaagagggcctatctgttcaggactggggacaggcggaacgagatattcggaaacaagaactctattaaccggcatttttcgccaacgcaggttaacattgggagcgacggatgaaagtgctcatgataggcggttcgggatatctaggaaaacttctggccgtgaggatgcgcgaggagtggggcgaagacattaacattgtcaacgttgacatctgcgtggacgacgacagacaggagaagtggctgggtgtaaagcgcatttacggagacgcgcgaaaaaagcgcatcgaggatgtgtttaaaaacgagggaaccatagacgccgtggcgcatctcgccctcggccatggcgagagcctgactactgatgaacggatgatgacgaacgtttacgggacgttccacatgatcggccttgcgcgcaaatacggggtcaagcagttcatatatccaagctccaccatcgtttacggcgcaaggcaggacaacccggcggttattctcgaaagccgtcctctgcttggcaaccgagacatcctcagcatcagagaccgcatcgaggcggacatgatttgccaaacgcacgcggaaagctccgacagcctcagagtgatcatcctgcggatggttcccatctggcgagattcaggagccagcattctaggcgcttatatgaaaggcaaacttgttcccacgcttcttgggttcgaccccatgttccagattatttacgaggacgaaatgctggacgctttcattcgagttctgcgcagcccgaacgctcacggcgcgtacaacatcagagggcgcgcacacctgccgttaagcgaggttatccgctcgttcggaaagacgccggcgccgcttcctgaatttctcgcgcgccgtttaggcaggttcatgtggtcgaacaatctgaaattcgatctcaattacataaagtatccgttcacagtggacggcgcgcgcgcgttcgaggaactgggatacgacccctccggatttgagaaaatccgcgcggaaaggaaaaagaaaggcgctgcggcgcatcgaatcagacttcgccgcgcccagagctaggatgaggatgattaaactatcgcaatcaggggaaatcgacttgtgaacacaatggacgactacagaaaacttaaattcaagcatttcttcgacggcacagcgaccgaatatatgagaaaccgcatactgatgtcggacatacagtttgacccaagcggatacgacgagttcggaaccagcctgaatgtcacatccaaagcgggagcggcggcgctgttcatgtacatgaattactttcgcgtggacgcgcacggcgcgcagaacatccccgccgaaggagtcggcctgatagtgtccaaccacgcgccgatactcccattcgacgccgtgatgatatggaccgccgggctggtggagcttgagaagccacgattcatcagaacaataatccacagggcgctttcaggcatccccggcggctccatcctcttgaaccggtgcggccagatagtcggctgcgacgaaaacgtaatgaaaatcttcgagaacgaaaacctcattgttgtgtttcccaccggcgcggagagcgacttccacaccatcttcaacaaatacaaagtggacgcgttcccccccggattcatggaatacgcgattgagtaccgcgctccaatcatcccggcatgcgtcaccggctcggaggaatccgctatgacaattggcaaactcgacatgaaagtgatggggttcaaacatctgccgataacgccgatatttccgtggctgggcttgctcggacttttgccgtttccgtcaaagttcgacttgcacttcgacacgccaatacattattacgaagattgccacgacgtcgagcccgatacggagcgcgtacgctccctcgttgacggtctccacgatcatatacagaaaatgctcaacgacagactcggcctgcatcaagcgcatgtattccgtgaatctaatgcgtaacttcgacaaatttgtgttatttccgactactggttatggtttttcagctagcctgctcggctatgcccccggcaatcgcttccaccgacaagaacccagcccactcgcaaaaggcaaattatggcgccgctttacgcgacgaaataaagcggcatatttcaatctcttccgcagattaaacgggcgtctttcacattccggcgaagtatattttccaattcacgcgcgagttagtttcaagtgagttacaattaaagaaaagagcctcttcgttgagtctgagaaccacatctttgcgcaacatggaaagcgccacaggattcacttctgtcaaaccgaatccttttctgggattaaggcgcggttattctacggctgaatctcgaggcgcaatttgcagcaaaagagacttaactcggatttttcacaggaaaaatcaggctaaggttctcgcttaaaaaatgcgacgtcaacaaagcatctcgccgttatgaaatttgccgaagatttgccggctctatcggccaatccgactagtcaggagactgttttatgcctagaaagataaaaaccgatgttaaggcccccgctgaatcgcccaagaagacgcttgtggatgaggtttccgcagacaatggaaaacaagacctcccaaaggatttccccatcgtcggaatcggcgcgtcggcaggagggcttgcggcgttcgaggcttttttttcaggcatgcccgcgaacgccaacccggatatggcttttgtcctcgtgcagcatcttgctccggatcacaagagcatcctcaccgagttggtcaaacgctatactcgaatgaaggtattagaagttaaagacgggatggtggtggagccaaactgcgcatacatcatccctcccggtcgcgacatggcttttatcggcggcacgcttgaactgttggagccggccgcgccgcgaggccagcggcttcccattgatttttttttccgctctcttgcgcaggatcagcgcgagcgagctatctgcatagtgctctccggcacgggcagcgacggcgctctgggagtgcgggcgatcaagggcgagggcggcatggttatggcgcagaacccggaatccactgaatacgacggaatgcctagaaacgccatcgcaaccggtctggtggattatgttctgccgcccgccgaaatgccgccgcaactaatcgcttacgccgcccatgcgttcggcaaaacaacgcgcccggccgcaggctctctccctaaaccggaagatatgctgaaaaaggttttaatcctgttgcgcaaccagaccggacatgacttttcccaatataagcccaataccatccatcggcggatcgagcgccggatggccgtcaaccagatagacaagatagaggaatacataaaatatcttcagcggtcaaaggacgaggtggacgccctgtttcgagacctgctgattggagttaccagttttttccgagaccaagaggcgttcaaagcgctggagaaacaggctctgccgcttctcttcgcaggcaagcccgcaggcgccgcgctgcgcgtctggtcgctgggatgctcaaccggcgaagaggcttattccatcgccatgttgctgcaggagcgacttgaggaacagaaacaaaatttcaaattgcaggtgttcgccacagatattgatggccacgccatcgacactgccagaacaggcctatatccggccagcatcgccgccgacgtctcgcctgagaggctggagcgtttttttgaggccgaacccggcggcggctcctatcggattcgcaaaagccttcgcgatattttgattttctccgaacagaatgtaatcaaagaccctcccttttcaaaaatcgacctcatcagttgccgcaacctgctaatctatatgggcggagaccttcagaaaaagctcattcccctcttccattacgcgttgaatccgaacggatttctttttctcggcacatccgagacaatcggcgatttcgcgagcctttttgcctccgtggaccacaaagcaaaactatatcggcgcaaagatgacattcaaggcgcgcagcgcgcgtccctcagccgctttcttccgagttcggcgacggaagaagcctcgtcccgccaaaaaagaaaaacaacggatgaatataaaatgcctcttcgagagttggctgagaaggcgctgcttcaacacgcggcaatgaccggcataatagtcaacagcggcggcgacatcttgtacatacatggacgagccggccattttctggaaccttcgcccggcgtcgcaggcgtcgccaatgtgttgaagatggcccgcgagggattgggccgcgaactaacaacggctttgcacaaaaccgccgtctcaaaggaagccgtgcgccatgacggcctgcgcgtcaaaacaaacggcgacttcacgacggtaaatctgacggtaaaacccattccggcgcccactggcgcggaaacagcgcaagagcttttcattgtcatcattgaagagcctcggatatcagacagtgaaaagcgagaaatcgccgccgacacagacggcgctttcgacaacgcaacagacatcggctcgcgcttggaggcgatgaggaaagaattgcgcgccaaggatgagtatcttcagaccaccaccgagcaacttcagacatccaacgaagagctaaggtcttcgaacgaagaaatgcagtcgataaatgaggagcttcagtcaacaaacgaagaactcgagacgtccaaagaagaactgcaatcggtgaacgaggaacttgcgacagtcaacgccgaactccagcagaaagtcatcgacctttcgagagccaacaacgacatgaacaacctgctggcaggcacgggaatcggcacagtattcgttgacgaccaactgcgaatcatgcgattcactccgaccgccacccagattatcaacctgatacccagcgatgtggggcgtcccgtcgggcatatcgtctcgaaccttgagggatacgacgggctggtcgccgacgcgcgagatgtgttgaacacgctgatcccaaaagagcgcgaagtgaagaccctgaagggcgattcgtacaccatgcgaatcatgccgtaccgaaccatggaaaatgttatcgagggcgtggttgtcacatttgtcagaataaccgcgcgcgggaaatgtgtccggtctgaatccggcgaagaaaaaacatcgccgaaaaagaacgggggcgacaatgtgcgatgacaatagccggggaaaagcggacgcagaccttcgcgcgcgggccgagaataaagcgcttgaaaacgccgcatccggcgctcctgttaatcttgacgagttgtcccccggtgaaacaaaacgcctgctccacgaactgcgcgtgcatcaaattgagcttgagatgcagaacgaagagctgcgccgcgcgcaggcggaacttgaagcgtcgcgggcgcggtatttcgacctgtacgaccttgctcctgtcggctacgttacaatcagcgagaaggggcttattctggaggcgaatctcaccgccgccggactgctgggcatgtctcgaagctcgctgttgaaaaagccgctgactggattcattctctccgaagatcaggatatttactacagacaccgcaaggaattgtttgaaacaggcgacccgcaggtatgcgaaataagaatagcggggaaaaaccgcgacttcttctgggcgcgaatccatgcgattgtggcgcacgaagcggatggcgcgcaggtgtgccgagccgcgctcagcgacatcacggaacaaaagaatcacgaagacgcaaggagaaagtatctcgaacaggataaaatggcggccatcggccagcttgcgggacggatggcgcacgatttcaacaacgttctaaccatcatcttgggaacgagcgaattgctcctgacccaagacttgccgccggacgtgaaatcagatgtcgaaaccattctggaaaccgcaaacagaggaggcgggctggcaaggaacttattgttctttgccaaggatcagcagcttaaactaagccgatttagccttaacgacaagatagacatgattatcaagacgctgagaggcaatttgaagaatatcgatgtggtcgtcgattacggagcgggtttggatggcgtgattgcggacgccgggcttctcgaaaacgccttgatcaaccttatcaataatgcgacacaagctatgagcaaaaccgaaaaaccggtgttgcgcataaaaacgcgcgcggaaaacaacatcatccgaatcgaacttgccgacaatggctgcggcattcctcgtgaatggaaagacaagatgtttgatcccttgttctcgttgaaaggcagcggggatatgaccggagcttacccgccggacgtaaaaggcaccggatacggcctttcaaatgttaagcgttgcatggacaagcacgggggaaccgtcgagtgcgaaagcgaagcggacaagggcgcgattttcagaataacgctgccgataatcacagaagctgcccgcggcgacaggaaggcggttgccagcgaaaataaagatgcgaaagggaaaaacgtgcttgttgttgaagacgaaccgcaactgggaagaattctatgtttgcttcttgaaaaactcggtcattatccgaccctagctgttgacgcgaaaacggctctggagcgacacggcatgaattctttcgacgccatcagccttgatttcgtcctgccggatatgaacggaatggaggtgtacgaaagaatcagggaaacagactccgaaatcccgataattttcgtgtctgggaacttcgagtatttgcagtccatgatggaattagagacgagggatccgaaaatggatcacttggccaaacctttcagcaatatggaatacataagcatgattcaaaagtggctgacataaacgatgcaattcaattgtaagcgattgaaacagggtatcgacaataatgtctgacagagaagacaagagggccgccccggcggatgacctgcgcaagcgcgcggaggatagccgcagcggcggctgaattgcataaggagaaatgattatgaacgataacaaacgcgaagaggagaagttagctgttcttcgcaaaaaagccgaggtcgaagccgataaaaacgctgagcgcgctcatgagcgtctggaattaatgtccaccgacgaaataagaaaactgctccatgagttgcgcgttcaccagattgaactcgagatgcagaacgaggaactgcgtcgcgcgcaggatgaattagagatgtcgcaggcgcaatattacgacctttacgacatggccccggtcggatatttatcagtcagcgaaaagggaataattcttcaggcgaacctcgccgtttcaaatctgctacaagtcgctagaagcgaactggtgggaaaaccgttttcggcgtttatttctaaagaatatcaggacgcgcactaccttcgccgcaagaaactactggagacaaaagagccgcaggcgtacgagataatggcgaagcgggcggacggttccctgttgtgggcgcaagtagaaacctccgtgacgcgcgacgcgcaaacgcccgttgtttatcgggctgttttgagcgacataacagaccgcaagaaggcgcaagccagccttgcgaaaagggagttgatgtttctatcccgcagaatgattcaatcgcaggaagaagagcgcaaacaagtggcgcgcgaacttcacgactccatcggacagaaaatcatctccatgcaacttgagatcgaatggctgaggaaccgcgaatgcgcatgctcggatgtgagtgtttacaataatttgattaagcagacgatagaagcgtcggaagaacttcaacagatatgtctcggtcttcgccctttgattatggatagaatggggtttaacgccgctatgaaaacattgattgcggatttggaaaacgccagcgatatcttcatagaatctaggataacgcccgtcgacgagtctcgcgtcagtcctgacaacgccatcaatctgtacaggatacttcaagaggctctggcgaatattgtccgccattcaggctccaaaaccgcgttgatatctttgaaggaaactgattctgaaatcgttcttcaggtgaaggacagcggttgcggaattgaagaagacagcgagcagggcagatacaatttcggcatccttggaatgagggagcgggcgaacatgatgggggggcggtttgaaatatgttccgcgcccggaagaggaacacacataaaagtggctattcctttcaatgtgaagaaagagattggcggtccgatatgagaggaaaaagagggaggaagcgatatgcccggcaaaaaagcaaaaaagaaatcaaaacccgcaaacgcggcggtagaaacaattaaggttcacaagcccgttggaggggctaaaaagatgataagagttttggttgcggacgaccacggagtggtgcgcgccggattgtgcaggctgattgacggagaaaaagacatggagattgtcggagaagcctcggacgggcgcgaggctgttcagaagtgcggcgagctgaaacccgatgtggttgtgctggattacgaaatgccggttgttgacggactggaagccacaaaacagatcgtcgagttgaaactgaacacaaaaattctaattcttacgatatacgacagaaaagagtttgcaataagttttattaagagcggagcggccggctatttgtgcaagaaaatctcagccatggaactatgcgcggccataagaaaaatcgcggcgggagacatctatttctcggcttcaaatggagccgtaacgaatcaaaacgaccatgacaaagaaggcgacctgctttcccagctttcaaagagagagtatcagatattcatcaggatggcgcgcggaatgacaatgagcgaagtcgccgacgaacttgacgtgtcctacagcacggtgaaaaccttcaagtatcgcatcatggggaagcttgacatgaaaaaagattcggacatgacgtttttcgccattaataaaggactaatcgaaaaatcataatatcaggcgcgcgcgcgcgtctgtattaatcgctcgattgcaataaaaggattcgctgaagaactggcgagtcggaacgctttatcacataggcgaactgcttcgttggcgccgcatttattcctatgtatgggcggggttgccccgctcgaaatgtcgctttcatcaggaaacaggcgatgaatcgcgcattccaaatcacgcgtttcttatgactgataccaacttgctgccattcactcaagtatgcagggtggcacccagaaccatcgccgcactccaaattgtgccttttcactggctgagtattcgagcgaaaaacggggacaggcaacgcgtcttttgcggctgcctgtccccgcttttcgccgttccgggaataaagtgtcaagttttttaacaatccctgaatattaacgatgctcaagcacaaggttgtgagtggcgcccgatctgacatttgaaaatatcaacgccttttttcgaaccacatttacggctcagaggggcgcggcgtttattagccggaatggctataaatgaatgccgtaatagttaataaagattgcttttttgccgatactcccggattccaatcaatcgtatcattaatgtgttgacatacatcttcatgggacgaattgtcgtcgtgtttctttcggcaaggtatttgttgcgcaataacaaatatgctctgcgcggcgggatatcaggaggatgctatggttgaacaatttagaataatgatagaaatattcattataggcatgtgctttagaaatcaaaaagggagaaaagaaatgaacatccaaacagaacgatattaacgcgcagaagaggactaatgtgtggcgcgctttgataggcttcggagcgggagcgatagcgggggccggagcggcgcttcttctagcgcctgcaagcggcaaagaaactactgccgccatcagggaataatgggacgatgtgtctgacaaggtctgcgacgtttgcggcgaagcaaaaagcatggtctcgcatgcgcacgataaaacagccgccgctgtcggcaatgctaaagagcggtttgccgcaaaaaaagacgcttcagaaaaagactgaacggcaacgcgaaactcgggctgaaggagaaaatcatgccgacgccttcaatattcatggactacctcaaagtgcaagacatgagggaatacggaggacttgccgtattccctctgacgttggtttcgcccgccttcgaggcgaaagagcttttcaccgtcataggcgcgggagaactcggcgacggcataaaagcgatggaaacaggcaaaatgaattcggtaagcatagagaacagcggcgacacgcccgcgctggcgctggacggggcaatcctgatcggaggagcggctaacagaatgctgacggcgagcgcggttattcgaccgggtgaaagcgttgttttacccgctgtcagcgtcgaggcgagccgctgggaatgcgaggcgctctctgggggagcttcgagaataacggcgaccgaccccgctttttaccgctcggatttcgctccggcgagcctccggcgagagcgccttgagaagtcgtttccgacgatgatcaaagaaggcgcgtcgagggtggatcaaaatatggtatggaagcatatcgaaggcctttttgagcggtcgtctataaagaccgaaaactacgatatctgcgcgctatacgcggagagggatatccttcacgatgagtacgtctcgcgcatagagtttacggaggcgcaggtcggctgggttgttttcatcgaccgcacatggtggtatcttgatttattttacaatcacggcgtgtttgcggatatctttccgaatctgcttaaatcttacgcgatggaagcggtgttgacgagggtcgtcctagacgaggaacaggatagacggcgaccgcccgaactgacgcttgcgcaagacgcgttcgcaaagataaaactgattaaaatcaatccgattaaatcgaccgggggcaaaggcgaaggagccggtttcttcgcttccgtgaaatccggcggaatcatactgagcgaaggcgcggccctgatgcacatggcggcatgttcgagagacgatttcgtttttcggccgcctaaagcaagcgctaagaacgaagccgtgacagtcggcgaaaagacggaagctacaactgcggggcttctacttaaacaatagcagccgcgggccttgatcgagaccggccgcttgacgttcgaaaaaaggagaatcctatgggagatcagttcacccgcacgctcggctctgattcaatcgacagcgtagatagaatcgatcagacttcgaccgtcagcccggtctcgcgcgtagtgggaaaaaaagtggggcgcaaaaccggaatcgccgccgacggcgacagttttctgtatcgcaatacaggcttgccgctgccagcccggccaaaatcagcgctctggaacacggcgctggacgcagtgtcgaagttcaatgaaagcatgatcgagcgcaaacagcctttctctgtcagagtgtgggcaaagaacagcggatttcgcatacagcttatcggcgagaaaaaagggattgttatcaagcaaacagaagacattccgtttctggacgtgaccggggaagacctgaataaaatcattaattcgcttgcggcggaggaaggagtcgttgtggacattgagggataagctccgcgtccgcaaaaaaggagaacgcatgacaggaaaaaacgacataaagcaagcgcaagacgcggaaaacgccatagccgaggctaagcttgaggcgacgccgcaacgcagacgtttctgggaaaacatctggttcatgctcggcacggttgttttgacaatcagcgtcattctcgcgcttgtcaacaataccgacaccacgataaatcttctggtggcgactatgagcgtgaaactgcctctgctgattattggcagtggtattctcggagtcgcggttgaatattttatatttctcggaccgagagcggacgcccgcgcggaaaaccgcagtcttcgcaagcaagtcgcagaccttagagggttgtcatcacaagtatagttcgccgcgactgtggcgccgctcggcgcgcaggccgcagtccgcaactagaaattctggaggttatgacaatgaatcgctcgcgcattatgttgttggctagcctaacggcaacagccgtgctggcggcgtatacgctcgcgcgagccggcgcaatcggcgagaatccggtgatggatgtttaccggatacacatgaatgacgagatggagatatcggtttacggcaatgaagaccttttaaaaacagtgaccggcaggcccgacggcatgatatcgtttccgctgatagaagacatgtacgcgctcggaaagacaacggagcaaatacgcgcggaactggaacagacgattgccgcgcgcataaaagacccgaaggtttcgttgcttgtgacgaggtttcacaagccgcaagtttatatccttggcgaaatcacagcgccggggccttacgaactcacagacccgtatatgatgtacaaactcctcgcgcaggcgcggctcgcgcatcctagaatggatgaacgcaaagtattcgtcgtcagaagcggcgtgtccatgccggtggcgctgaaacgaggctcgatatcgccgccgagcgcggaaacttttcaactcatagacggcgacgccatttatgtttcatatcatggaacgacttcagtgtaggtgctgggagatgttccggagccgggtttctacccgattccggaaaacgcagccaacttaatcggacttctagccgcggcgaaggcccttgacgcgcagatattctcatcggaagtgacattgatacgacaaggcgagatgagttcggtttcagtcagaaatcctccggacggattcgagcttcttcctaacgatgtcgtgcttgtaaagcccgcgaagaaagagtccataactgtgacgggatatatcaacactcccggaatttatccttatgtcgaggggcagacgattctagacatcataacgcgctcaggcgggtttgcggcgaacgccgccgacagcggggtgacgataacgcgaaactaccctgaacgacctgagataatcgaggcggggaatctgaaccggacgacgggggacatcccgtcgctgcgtcccggcgatgtcatcaacgttcctaagcgaaaagccacattgaaggaatttttcatgaaaaaagctgtgccggttatccgcgatataacaatcatatacaaagtcttgaatgattagacatcacattatcgcgcaaactccggcaggtcgcattcttcagagattcatttaacattggatattgaaaaatgctatcttatgaacgcatcataatgaaggccgctgtctcgacggtcccgcactggtattcaagcgagcatgcgaatcatgcgttcgaattgacaatgggcgctcacacagtcgtattttgctctcacaatccgttaaccccgaatttgagatcgctaatatcatatattcagaacaatctcgatatctggagagcaaggatgccagtcgtgccgaccccacgctcactgcaacaggtcgaagaggatatcgcggtgcgatggcttgagatattcgacgcgggcgttaactggaacaagtttatcgcatacatcgaggatgtcaggttcagaacctacgagaacaatcgggtgatgactaacatcgtgatcggggagggagagggcgcgttgtcgctgtctgacgcttcgattcaaaagattgtagatcctcttgcgtcgagcatgcaagtctattttcgcgtggacagagaactgaggtttttagactatcaggaaatcttgtggaaggatgtcagcgagtcttttgagccgaagtttattcccgagtttcttgagccattcgcctcaatcctgaaaagcggagaattctcagttcatctgcgacagcgtggagacatcttcataatggactcgcgcggacttcttgccgcgaataggaagggacgatggcgcgtgtatgacgcccaaacgttcaaaaacagcgtgtgcgacattatgggcgacatcaacgtcggaagaaatcttttcgagctgatgtttgacctcagttacatgcgtcacggagctttgctagtgtacgatcctgaccataaagttatcgaacacgtggttaataaacagtcgataataggaggaatcgcgcccacgcccgacacggcgcgcgctatgctctccccggtaatacgagatatccgcctcggcatgaacgcgcggttgacgagcaggaaaaatctgtttcttgaaatcgccggtcttgacggggctgtgatatttgacggcgatgagttgatagccgtaggcgctatgataaaacagcatcccgatctcggaagctatctcggagcgcgcaccatagccgcccaatccgcgcgccgctacggcggcatcccgataatgattagcgccgacggcgagatgaagatacttttcgaaagcagcgacgcgcaacaccaaaaaagcgacgccgaactatctttcatgtgagcaaatattaaagtgttgtttgagcgcaattttgctcattccgctcgttagcctaaaaggctacaaaataatgccacattggttatgaaataatgcctttttgccgatagcgcgtatatttccccaactatatatttattaaggatgaaaaacattggcgaacatgggggatagttgatgcgactgataaaagattacatgtttctcgcggtctgttgtgcgacattaacgctggcggcgtccgcattgtgctatgcggaagacggttcaaaaacgcatgaatatacgatggccgatccatatattgacggcgagatgataccgaacggtccgtctatcgcagggccgacagggcttgtaaagaatcccagcgcgtatgtgctcgccccgtgggattacgacgtcagcgttgacgtggttggatggaaggattatgtgaaagccaacgtcgggctacctcgtcgctttgaagcaggcgtgacattcgttgaaaaagttcaacaggaaggctctttgaaccttaaatggaattttgttcctgaagcgcaagagcatcctgctgtaagcgcgggattgttagacctcgcctccacaaacagaactaaatacgcggtggtcagcaagaactttacttccggtaaaaagctccgttcaaaacatcggatcgacaaaattgcgctgagatatcaagtaggatacagaacctccgacatcgacgactccctgttctacggactcgaagcaagattccttatatcaaagaaatcgccgttcatgaaggccctgaaaaaaaccactttcatggaagagtatgacggagaccacttcaatttcggcatgagatacgatctgtccgaatccgccaaattgcatttcggcattctgagcgtggaagatataagcgtgggcatcagttatagaaagaatctgtagtcatatatccgctttatcggcacgaggcgctcaaattaaaacggcgaataggtcctccttgggaccatgtgcaaataaccctcttttatagagggcttttttatttgtcgtcttacaactgcgatctgcaatctccgcaacaagaaggattgcgtttgtgtcgtaagaattgacgcgaaagttgttttgcatgtttattcatgtcgcaatagacgaaaaagctataaataaaagacttaatagttaatagtaaatgctctcgcgccgatagcgcctaaagtattgctgtttatgattaataaagacgtcaaagtcgcgaatatcgtgtttttatcggcaaatagcatataaacgaagcatctcaaaggagacgattgtcatgacagaaaaagtagataacataaagcttgtcgaacaagaaattgataaagtgtcaaaaagcggcgagaaaaccagcaagaataacgataacacacataacctagaagctggcaaatcagacgccgatgtgaaagtatctatattccgacaacatgcgcaaccgtatttcgaaattaaggcagactctggaaatagattgcctgctatgcctgacaatgaaattcgacaaattatgagcaaggacgcaaaaggctcgcaagctccattaataaagaagcatttcgcaaaaagaaagatatccaacagcttaaacaatgcgccaatattgccgaaataagaaaagcgcggagttttatatgcgccgcgcaacgcaaaagccttcaataatgactcgactcataacatgcggtcaactctgataggttctaagaaaaaagcgaatgtgcgcattagtcagagaaaagcatcgcgcgggcgaagaaaagggggagacaatgtttacgtatcgaatattcaatgaatatgaatacatcatggtttgccctgaaggagaactgggatacgatgtgtgcgatgaattcggagagattgtcacaagctgtatgagtccgggcatgcgcttgttgttcaacatgagaaaagtgtcattcctcgacagcgccggcgttgggcttttgttaagcatgaagaagttggctgagtcttggaatggctcctttgaaataagaaacatgtccaaacgcgttaaggctccctttgataagctgtctcttaatgaagcgctaaatgtggcgagcatataagttccggcgcagccacaaacgctatttattgcgcggcgcagcttcatctgagtttagctaaaacagttacaaatatatgccgcatgagctaataaagattgcttttttgccgatagcgcaacccgcttgagagcaatatgatgtatgcaacggaatatttctaaaacgaggggtgtaaagatgagaaggatattaattttggcgctgatattggttttgttcgcgatgactgtcgcgacaaaagagaccatgtgcgaatcgttagcggggagcgcggtcaacagagccgcggacgccgcctccgacagttttatgaattcgataagcgagtattttgccgttccgaagacggaagttgcgaatgtcaggcaacgaaacatcgcggaagaagatattccggttgtgttttttatttcgcggaaagccaatgtggctcctaagatcgtctcagactatcggctaaaaggccaaacgtggcaacaaatatcaaaccgatacgggttcggggcggaatcgtatcatgtgccgctcagagagggcgcggcggcagggcctccttatggaaaggcctacgggtattataaaaacaagccgcaaaaagattggaacaagataaaactcgccgatgacgacatcgtaaatctagtaaatttaaggtttatgtcaggacattataactacccggcagagaaaataatggaaatgcgcaagcagaataaaggcttcaaagcgataggggcggacatcgagaagcagagagacgccaacaaagctaaagccaaatccgcttctgataaaaagaagaaggacgcctcagcggcggccgccaagaaaaagcagtcagaacagaaaccaaaggaattgacgggagtaaagaaacaaatcaacaagttcaaacagtatttcaataagaaagaacgaaaaaccaagaagtacatgaatgacaaaggatgacaagcggcgcaagttgaaattgcgcggctgagggggaagcctatgacaaggttgttgatagcggaagacaacacaagcgtggccgaactctaccgcgaggaattcgaaacagagggatacgcagtggaggtggtggataacggagcgtcggcgatagagcgagcgcgcgaatggcagccggacatagtggttctagacatcgggatgccggagatgagcgggcttgaggcgctctccgatttgtgcgcaggcggcaggacggtgatagtgaacaccgcatatccgctgtttcgcaaagatttcagggcgtatcttgcgaaagcatgggtgaccaaatcgtcggacatagaaccgctcttggaagttgttcgccagaccctcgatggattgaggataacagacgaatgtgcggctctcattcagtctgcgacatagatgaatgcaatcaggcgcaattaacttgagcctgagaataatattcaaaaacaaaaggagaaaagattatgagcgacaaaaagacaatcggggaacgcgttgacaaggcggtggataaggcttcagacaaagtcgacaagacgaaagataaacttgaatcggcaaaaaaagacgtctctaaagttggaagagaaatttccaaaagcgttaaaagagccgtggaagacaccggcgacgctatttcagacctagttaaatcgaagaaatgacggcgcgttgttccgcgcggctatgcgcgcgctctgattaagcggctcacgcgcgcataatctaatgtcatctccaagggcatgtcacgagcaggccggcggcgttactcacgctgaaacatggaaagcgacgctcggcctcgctttgaacttcttggattgcggcaaggtctcaactgtttaattcattaaagcgcgcggacagtgtccctttaatgttgagcgcaaacaaaacaagcgcgaaaaggaggctttgccgtggcatcaagaataatattgatagcggacgccgataagctttatcgacagaaactgcgagagttatttttagcgaaagatgatttcgcggttttcgatgtgggaagcggcgaaacagccgtaaccttcgcgaccgaaaaaaaacctaacgtggttttgctcgatattatgctgcctgacatgaacggaatcgaagtctgtcgcaagataaaaatgaacgaccaatcgaaatacatgccgataatcattcatacggcaaagacagggatgcatgagaggttgagggcatttttagcgggcgcaaacaggtatatagaaaagccatgcgaattcgacgttgtttatgactgtttgcaaggcgttataacgccttattgttacgatcataatctgtcacagaatgatgttttcaaccggatgacgctttgactaagcgcggcgcgcgcggcgtcagaaacgattgataccgggggattgctcatgctggagtcgattgcattaatactcgcaattttgtggttgctggggatagttagcggatatacgatgggaagcttcattcacattctgcttgtcatcgcagtcgtagttgtattggtgagagtcattaaggggcgaagaatcgtttaactggaggctactgtgttttgaaaggacatgcgaaacaatgtttagttgcgatatagttaatgagaatgaaaccacattgatattagccgagggtgaactggcttacgatgtatgccaaagacttaaagaccttgtgttcgagtatatgcgtcagggagtgtccctttcgtttgacatggcgggagtgacttttcttgactgcgccggcgcggggcttttggcgcaattaagaacgcttactgacagatggagcggctcattcgaattgcaatgcttgcaggcgaatgtgatgcgaatgcttaaattgttgtctctaacggattatctgaacgcgaacgcgcccgaaacgcctcgtctccgcgaagcctgcgcttcaaactaaaataaataatgttttcctgttcaatcttgttgcctgagacagccttgcggcggcggttgtcgcctcttgacggcagagcgagcattagtgtccggcgcaatccgtcatcaagtcagcttcgtgttcatccgttagtcgatgtggctaaatatataaaccgcgatggttacaaacatatgctttttagccgatagcgattgttaagcgagcgacgtatcattgacgcagcaaacaaatacaaaggagaaacaaaacatgaatgaaaagaaaacgatcggcgaacacatcgacaacgttgtcgataaaagcaagagcgacaagggaacgctaggcgagcgcgttgacaaggctatggataaaatgtcggacaacgttgaaaaagccatagacaagatcgctgctcgaaaagaggatgtcgccgacacggcgcgcgatattaccaagagcatgaaaaaggcgatggatgaatccggcgatgcggtggcggacctgattcacacgaaaaagcaagagactgaagcttaaccgacatcgctagacgcaaggaattagaaagaggctgagctaatgcgttttgctcgaacaagagacgacttgttaaaaagcgcatttgtgcaaatagcgctgttattacagaaaagcgcggaggaatataatgaaacattacaagaagatagaagcaatgaacattctgagatgcttgtgttgcgcaaagggttcaagccgaggcgcggcgggacgcaacatcgttgccgcgacgattcttgcgttttcattgctggcaagcgcggttgctgaggcatcggtggaaaaaggagacagggcgatggcgagcgaaaattaccgcgccgccatcgcgcactatgaaacgcatttgcaaagcaatccgagagacgggaacgttataacaaaagcggcccgggcgtacgagggcgcgaaatggtggggcaaagcggctcagtggtgggattattacataacgatgtaccccgaaggctggaggatagaagatgtaaaaaagcgcgccgcagattgccgccgctggcttggagcaaacacatatataacaggcgggtattactggatggcggttgaagaactcgagaaatcattattgcttgatccgaaactggcggacgcgtacgtctggctcgccactatttaccagaatgaaggcatgtacgacgaggcgctggctattctggataaagggatcaaagaggctccggaagacgaagttcttctgatgatgcggaaagacgccgcgaactatagagagaacggaggcaacgcgtatgtggcgcaccggagcggcattgcccgatatcagggtggcgacatatccggagctcttgacatgttcagagaggcgatgaccgcaagcgaggattttgcggccgcgcatctatggacggctcgcatactgttcgaacaggggcgcttcgcggactcgattcctgaatggcgcgaagctcttcgaatacgtcccgacaacgaacacgctttcttttatctgcaactggctcagcgcaatgtcgccgccgcaaaataaaagcgatctcagcctaatgttgagcaatggcgcgcaacgcgacgggcagaatacattctgagtctttgcgcatgaaaacgatgtcgaggcccgcgcctaaaaagcgtttccggcatgaacaggagagcgactatgacggaagcattccgcgaagacgtggaaaaacttattgataaagaaaagacatatctgtggtctcgcgccttgcagatagcaagcaatgcggaagacgcggaagacctgctgcaggaaacgcttctcaaagcttgcgaaggttacggcggttttgcgcctgacacgaatttccgggcatggaccagcagaatcatgattaacacgcatatcaacaaagtaaaaagaaggaaagagcaagaaatctcttttgacgatagaaaacacgacaaaagcaaattggcattgaaagttgcgcgacgaatatcgcacatggactcgcctgacacggtgttttttcacaaccatataaatgaagagataatgaggcgttattattcgttgcctgagatgtacaggctggtgttttcaatgtttcatttcaacggatacacatattcagaaatatcatcagccatgaagattccgaccggcacagtcaaatcaagaattcacagagcaaaagagcgcctgtcggaacaaatgcgtgaagagcgttattctgagaacgctttgaactaggcttgcgacttccatctatcccggatttttcattaaaaaaatccgaaaaaacgaataaagggcgatctacggcgttgaatcatcgactcgaactcggtcacatacgaaacagtagacgttgagttcgtcagcaacgtatatcttgagagcgaagcctatgcgatccagtgcaacatccgcgacatctctgagcgcaagcgcgtggagcatgagcttaaacaataccgggaatgcctcgaagaagtcatagaggaacggaccgaagagcttttgcgcgcgcaagaacaactgatacagtctcaaaagatggacgcggtaggccggcttgcagggggcatatctcatgactttaacaacatcctcgctgttattatcggaacatcggaagtcgttttaggctcgatgtcgccggaagacccgaaccaagctcgcatgcgacgcataattaagtccgcaatgcgggcgaaaaacataacaagccgactccttacgttcgcaagaaaggaaaaactggaaataagcgacgcttcggctcgcgatatcctgattgacacagtggacatattgcgtgtcagcgtcctcaacaatatcgaaataacgacgccggaatgcgatatcctgattcgcggggacgcaaatcaactcggacaggcttttctcaacatttgcgcaaacgcgtgcgacgcgatgaaggagggtggcaaactagagattggggcggctcctgtttatctggacaatgaattttgcagttctcgcagagggattaaacccggagaatattgtcttatcgacatacgagacgaaggcggcgggattccggcggatatgctcgaacaaatattcgagccgtttttcaccacaaaagacaagggcgcgggcacggggctggggctgtcggtgaccaagagcatagttgagacgcacaacggactgatagaggtggaaagcaaaccgggcgaaggaacgaaagtgaaggtgtatctgccatgcgcgaaggaagcgccaacggcctacaagccggaagcggacgaaacattgcggaagggcaaaaaagaaacaatacttatcgtggacgatgaaaaagacttcacagatatgatgtcggattttcttattgagcaaggatacagttcaatcgccgccaacggaggcaaagaggctctcgatttgttcaagaagaatcaagccgatgtcagactggtgattctcgacatgatgatgccgagaatggacggagccgaaacgtttgcggctttgcggcaaatacggaatgacgtcaaagtcatcctgtgttcaggattcagcgtcgcagggaaagccatgcgattaatgaacgacggagcgcgcgcgtttgttcagaaaccattcatcggcgaagttttgttgaaaacaatctccgagacgctggccaaatgaactcggattcgcagatagagaaggcgaaacgcgggcaattatcacagcggcgctctgcctcggtctctctgaataattgaagcaggggcgccgaaatatcgcctttacagggcgaggaaaccgcgtccctatttcaaaaatgaggctcgcgcctcgcgaactatccgctcagcgcatcgctcccaaattcgtcatttgattcttttagcaatcacttcaaagccatgttcaaagcgcgctggtttcactgagttgaaacccccatccgaacgcgcacccggtgtttgaccaattctccatcgagatgaatctctgtgttcttcagacgttggccgtccatctccacccatgcgacgcctcggttaactccgtcggggttctcgatttcaatttcataaacggcttcttcatgccggattatgacgcttgctctgtcccattctgatggaagaaccggatcaaagagcagtttgccggcggcgatttttattcccagcacatcctctatccatgcccggtacatccagccggcggcgccagtgtaccacgtccaaccgcctcgtcctgttctaccgggaagtcggtagacatcagccgcgacaacataaggttcgacagcataacgggcgaccgcttccggttcgcgagcgtgttctatcgggttcaacattttgaggatagaggcggcgcggtttccgtcgccgattctggcaaacgccatggcgagccacaccgccgcgtgagtgtattgcccgccgttttccctgactcccggcggatacgccttgatatatccggggtccttcggcccggcgtcgaaaggaggggtaaacagcagaaccatattctcgtctttgagcgcgaggcgctctgcggcggattcgagcgcgcgcagggcgcgcgcagggtcagccgcgccgctcagcgcggcccacgactgcggcagcgaatcaatcatcgcttcctcattcttcgatgagccgatgggagagccgtcgtcgaaccacgcgcgcttataccagtcgccgtcccaggcatgtttctcgacggccttcgcaagacgcttcgctctctcaaggtatcgctccgccgcaaccggcgcgtctttaaccatctccgtgagcgcggcgaactgtttgagcgcgtccacaaggaaccatgcgagccacacgctttcgcctttgccatttattccgacgcgattcatgccgtcgttccaatctccagtcccgatgagaggaagccctcgcgggccggatgtcgagccgcgctcaatcgccaaacggcaatgttcatacagcgtggcgctctcgatcgactcaaccggattcccaaaggcttcgtattcttcctcgtcaagcgtccggccatcaatgaatctgatgttttctttgagtatttccgcgtcccctgtgatgcgcacatactgcgccgtcgcgtgcggcagccacagcaggtcgtcggagcatcgcgtcctgacgcccgccccgctctgcgggtgccaccagtgttgaacgtctccctctctgaactgccggcctgcggcgcgaagcagatgttccctagcaagcttgggagcggcgtacagcagggacatgacatcctgaagctgatctctgaatccgaaggctcctcccgactgatagaaacccgatctgccccacagccggcagcttatggtttgatagaggagccagcggttgagcaacaggtttaccgaatgagatggcgtgttgacgctgacggcgccaagcgttttgtcccaccacgcggcggtttgctcaagcgctttcgcgacggagccgccgtcgcgatatttattaaccagagcggccgcctcggtcgcgttgtcggcttcgccgagcagacagatgatttcgcctctttcgccgggcgcaagctcaattttcacctgaagcgcggcgcaaggatcaaatccggcgccagctcttccggacaatccggctcgcttgagcgccgcgggcgcggacaggcttccgttccgtcctatgaattccgcgcggtcgcctgtgtgcgcgctcgccgcagggattgtcgcggcgaaggcgactccttcgctgtaatccgcgcggtagcgattgcgcgccaatatcatttttgagccgcggtcatactcggcgacgacatgcgcctgcatattctctcgatgctcgcccaacgtccattccacgtagaaagtcacggacagccgccttgcgcgggacgagtcgttgcggagcttaagcctgcgcgcgcagacggggtccccgccgtcgtcgttgaccggcacaaacatcgtaagctcctgttctatcgcgtggctgttgtgctcaaagacgctgtagcccgcgccgtgtcttgagcggtaagcgtcgcgttcgcgaatcggcagaggagtcggcgtccagactgcgcccgtgtcttcgtctcgaatgtaaacgacttccgaaggagggtcgcaaaccgggtcgttagaccatccggtaagcctgttctgctggctgtttccgcgccatgtgaagcctgagccggactcgctgacaagagttccgaaagaggggttggcgattacgttcacccatggggcgggcgtctgttgttcggggccgaggaagatggcgtattccctgccgtctgaagtgaagccgcccagtccgttgaagtacggcagttcgatgaacgggagttgcgcggagggctcttccttgatggctttaacggcgagcggggggagcgttctgagggtctcggcgggaatgctgagttgttgggccagaggcccgcgcgcggcgacgagcgacacatgagacgccgccaacataaggttgatgtcttccgggggaatctgacttgctgtccttaggaaaacgccgccccgcacgtccacgcccgtgttcatcgaatggctgaagacaagccgcttcagttgttcgttcagaggctgttcatatcccgcggattcctcgtttatgataaggaggtccgccttgaggccgcgcagccgccaatagctgtgggcctgcagcgcttggcgcgccaagtcgatgtccgcgtcctgtttaataactacaacggcgattggaaggtcgccggatattccataaggccataggcgagactgcccaagtttgttctgtttcagcaggtcgctccatggacggagccgggagttgggatatatcatcgagccggcgagtttctggaatcgacgcgcgtcgtctgggttaatgcgcaggtggcgaagctcaagctgggaatggctccatgagatgtctagttcgcgggacgccgaattggggtcgaagtatttttcagcgagcaaaacgacctgttcgcgagtttcagcggcgcagagaatgagggagaaatcgcggcgcgctcccggttcgagcgttatctttcgccgcaagctgaaaatcgggtccatggacgagtccgcgacgctggacaatttattgccgagagccgcagggtccgacaaggagcgaccgcgacctatgaagcgattgcgatccatttcgaactccagctcgtcggcgggctcgtcctgctccggcatacaaatcaaatgcgcggcccatatcctcggctcgtcgggattttttacgcggcgcgtggctatgagagcgccgaaccgaggctccgtttcagtctgcgcgaaaagcttgctgaacgccgggtgctgcctgtcagagtcgtgcggagcgagggcaagctcaatgtaggtggtcgcctcaagctctctcttgcggcctgacctgttaatgagtgttatgcggcgaatttccacgtcgtcttcaggcgccgcgattatgagagtttccgtttcaattccatcgtccgagcggcgaatctccgcctgatcaagcttgaagctaactgaatagttctcaatgtcgccgcccgccggatggaaagctgaactccaaacccgcttgctcttaaggtcgcggatatagcagaagaaaccccaattgtcgctagttgtgtcggcccgccagcgagtgatgtcgaagtctcgccatcggctatagccgcctccggcgcttgtgaccattagagagtagttgccattcgaaagcatctgcgttttagggtgtggggaatgaggcgtgttgaaaacgcttgttgacggagcgatttcgtccggcgcggcatggaaagaagtctgctcccggtctgagccttggtagataggcggagccgccggagagcgctcatagaaaagcggctcgctcgcccgcactctcgggtcgcggtgaaacctccgtcgaatcgcgctgttgttgacgaggttgtcgatagccagaaaactcatcgcttgatggtgcgccatataaacttcgacaattacgccgcgctcgccttcgcggcttcgttcgcgggtgaaatcaatagactcatagaacccgtagtcgcctgacattcccatgcgcgcaagacgcttgaggttgcggatggcttcaagaggcgagacggccagcgcgagcatggatgcgtaaggggccactacaaaattttctcccaagttgcgcttcagtcccagcgccggaatgccgaacgcctgatactgatatgttctattcgcgtccacggcgctgtgcgccgattccgaaacgccccacggagcgcctctccggcgggcataagcgatttgcaggcgcaccgcttcccgacatgcgtggtccaagagcgaattttcaaaagacttctggaagagaagaggcatcaggtattcaaacatcgtgcctgtccaacttagcaaaactggcggcccccccgcggagccgtacggacgggccattgccagccagtgcttgcccggcacatctccgcgcgcgatcgccacaaggcttcctatccgcgcctcgctcgccaataaatcgtagcgcgacgagtcaagccgttgctcgctcacattaaatcctatagagaagagccgtcgctcgttatcgtacaggaagcgcatgttcatgctttctgacaactcgttgacggagttcaacaggctgccgacccggtcgagcatttcggcggccatccatttggcgcgggcaaaagcgtcttcgactcgctgtccgcattccaatcgtcgcggttcgttcaaattgttttcatcatttgccgccgtcttcgacagtaaaaaatttccctcggagagctgtcgcatggagggcgctttttccagagcctcaagacagtccgcaatcgcgccgtttcttgtctcgtcgccggcggttttcgtctcttccgcaatcgcttccatccacgggagatagcggtctatcagcgtgcgccatgacgcaagcattgtttcagtccggttcgcccagtgcgcggcctcatcgcgtggcgcggcgttttcgcacacggcccggcgcaactctgcgacagcgcctgtcaaggataaaagccgagtcgcgagttcgcacagtcgtttcggaggctcggccagttgttgttcgagaaatttcaacgcctcgttatgaactctcgctctgtcgcttttctcaagcgcctcgcgcagcgcgcggagcgtgtcgagaaggccgtggaacgcctgcggcccgatgacgggttcgtcgatgatttcctgaaagcccgcgctgagcgtccacaggctgccaagcagatttccgctgtcaacagtcgacacatatctgggttcgagagggtcgagcgtcttgatgtcgtgccagttgagaaggtgtccgttgtatttttcgagtcgggctatggttttcatgcacttcgccgtccgctcgaacgcctcgtcgcaggtcaggtagccgaaatcgagagcgcccagattgccgagcaggcccaacccgatgttggtggggcttgtgcgcatggcaagattgtttccggcgtaaacctgaaagttgtcaggaggcaaccaagatgtttccgggcctacgaagtcttcgaaatagcgccacgagcgccgagctgtgactctgagcatgatttcatcttcgcgggcgatagggcgcgcgcgcgcgatgcggcgcggcgcgctcagacgcatccctgctataggacaagccgcccacagcaaaagaaaaggcaaagagatcgagagattatccgggcgcgacagaaatatcgcgattcctaagacaacagagaacaggctgacggcgcacagttgagccagaagcgggcgaagccgttcggacgctttctgttgaaccgcctgcgcggtcgcccattcaagcagtccgcgatggcttacgaaacgacggtagaacacgcgaattatcgcgtctatggacatagctgccctgtgcggcaggaaaagcagttccgcgcagcaacgtttcgcgttgtgcgctagttgtcgccatgacagggggtccgccccgcgcttgccggtcgctcgcgtgacaagctccgaaaacaccgggaagaaggccgataacccaactattaagcttgccgcagcgcccattcccgaagatatcagccatgacgaagcgagaaacaacacggacgccgccggcgcaacgcttcggcgaaggttgtcaaaaatcttccatcgattcagagcgctgagcggatttgcaacgcgtttgccgtcaggggagggcgctttcggcatgcaccagtccgcaatctgccaatcgcctctagtccagcgatgctctcttttgacataggaaaaatagtcgccgggaaattcgtcgagcagttctatatcgctgacaaagccgacgcgaagatgcgccccttctatcaggtcgtggctgagaatcctctgcaacggaaaacggttcttcaagacatggtgaaacgctcgcggatcgtagatgcccttgccgatatacgacccttcgccggagaggtcttggtaaacgtcagaaaccgctttcgtgtacgggtcggttccgatggggtctgtgaacaagcggctgaaggcggtcgccgtcgcgctgggaagacttgagctgacgcgaggctgaatgatagtgtacgggctggagccgacggcgtccgcggggttgaacggcgggcggttcaacgggtgggcgattgtctccaccattcgtcgcgccgtgtctcttagcagttgagtgtcgctgtcgagcgtgatgacgaagcgcgcgttcttcagcaagtcagggtcgcccgcgcggacgatctgctgtccgtcgggaagcgcttcgccgttcagcaacctgtttagaatctcaagctttccccgcttgcgttcccatccgataaaggactgctccgactccgtccacacgcgttcgcggtgaaacaaaagaaaacgccccgcgccgtggcgttcgttcaacgcgttgattccatcgacggcggccgcaaggagttcggcgtctccgctgtcgcgctcggtgtcggagccggtgaagtcgctgaacaggctgaacaggagatttggttccggattggctagatagcgtatctctagcttttcgatctccctgcgcgccgtgccgatgtttgagagcatcataggcacaacgacaagcgtgcggaattcgtcggggatgccctccttttcgaacgacatcttcggcagaaggcgaggcggcaaaaaacgcgtcacaaggtagttgatcgcctgaacggctatctggctggcaggcagagatgagagagccgacgcaagcgcggttagcgccgcgctccctcccgcgaaagagctgaccgccgcaacggcggcgaccgccgcgaccgtcggaagcagaatggatgaaatatatatgaccgtgtggttgcgatagacccaatgaagaattcgccgccgcagggtttcccggcttgccagttgggaggccagacgcggacggccctcgtcgatcagatagtatccgacatggttttttcggggatcaagcggcttgtcttccgcgtcggccatcagaaccgccgcctccgccgcctcttgctcggaaacgccgccgccgcgagccagttcctcgaccgcatggcgatatctgtcctttgtggcaaaatccatgctgcagtacaccccagacgggtcctcgcaaagttttttctcaaccacgcacaagtcttcgaaaacatcccgccaatcaataagagacagttggcgcaaactggctatcgcgctgccgatggaagcgttatgcgcggcctgtcgcgcctgctcgcgaatcgcgctgtcggccaagacgccgccgctcttgcgctcaaaccaactcttaacgtgcgcgagaacctcgctctccccgaagagatgtccggtgaggtgaaacgcgaagtggtcgctaggctcaggctgttctcgctccagttcggacagaagaaaaaaaagactgtcgggggcgagccgcgcggcgaccagaagtcgattggcccagaagtcggcgttctcgcgctctctcagccacactgtcatctgattggttaggtttcttatgaatgagataagcgcgatgcgaagcataagcggcatcgcccacaactcgcccatcttcaaaggactgaccgcttgatattcgttaagatggttcaatatggtgtgacgatccagttggccgtcagtatgcgatacaaggtccgacgctatgcagtaaatcctcggcatgttctgaacctgctcagcggccagcataggcagttctcgataaaaatttccgggcaggttgcgtcgcacatcgtcgtaattggctttgattagatgatagttgtcaagaatccattccgctgaaggggaaacgcgctgttcgagacgcgacgccccggcgagttcacggcggcaaaggtctatctccttaacacaaacatccacaagctcaagaagatggggcttgacgcccatatatgactgaacgcgatgatatccggctagcagtctcgcgtgcacagccaactgcgaggctgtcatgtgttcattcttgtcagatccagattccgcctctgtgacccggtcatggtgaaaaacaaaaatcgagggttgcgtctctccggcgacgcgcatttgcgccaaagcttgatccagcgactccaacggagctttcacgatgacggccgtttcttcattcacaagccatcgggatcgcttcttcgtaaaatcgcgatcctcgctcgactgaaagacataaaccgccagccttgcgacaatcgccccgccggcagccgcaagcaatagtccgactacgcatcgccatgccactatcgcctcgaatgttccaaaagacagatgcgcaattattattccaatcgcgacgcctgcgaccgctcctacgcatgtccaatatctatcctccgcggcgtttttgcgaaccacgccggaggcggtttttgaaattatcgcggttctgcgaaaatgacggcgtcgcaacatcctaaacgccacattagcttcttttcggtccacataaaacccaagcagtattcctgattctttcattgccttgctccaaatcattaaacgttgcgcgcgcgaatcgttgttaacacatgaacaagcgtattatggcgagcttacaaagtttcagccgcgctcctgtcgcagttgttctaatgtgaaaaacagagttaagcttttcgtgttttacttctaatattatagcagaatatactcgctaagagttgtgccatgcgcaaaactatttcttttgcgcatgatgctttttaccaaatagtaaatgggagctttcatttagttcttcgtatatgatacgtattactaatgacggaacgttgaaaaagtattcccttaaaccctttcaaaacttttcgcgctagcgccgatgggaaggcttcgctcttcccatcggcgcgtatcatgcgaaaagatattgagaaaggggtttcatgaggaatcttcttcttaaacatttccacaggagcgtcggtacgggacgcgtcagcgtcccgtaccgacgcgcaaggaaaagtttgaaggattttcaaggaaacttttcaaagtttccttgaaccgccggaggcgctttaatgcggttaagggaaaacttttaaaaaagttttccctcaaaacatttctatgcgcgcggcggagcgggcgcgttcgcgccatcgctccgccgcgctcatgtgaaaagttttgaagagattccaaagagaaactttttcaaaagtttctctttggccgccggaggcgcttttaaaggcggatttactgcgtctatccgtttgtcgcgcttcagtcgcttccgtatttgtctttgactttcttgaaagcgatgtcggccacttcgagcgatttcttgatgtcttcttccgtgtgcgcgcaggaggtgaaccagttgtggtgcgggtggaagatgacgccccggatggcggcctcgccgctgaagagctgtttgagcatgaagttcttctcgcgcgcgaaccgcatgaacggtatgtcgtacggtccggacatgataatctcaaacccgtgggatttgcctacgctgacaaggccgtcgcagagcgccttgccgattttcatcatgtagtttactccgtccagcctctgcatctctttcacggtggcgatggacgccgccatcggaaccatgctgctgaagaacgttcccgtgaacagaacgtgttcggcggtctctttcagtttgttcgttcccagaccggcggagatcgggtaggtgttggctatggctttggagtagcagaccagatccggctcgtatccgaagtaggcgtggctgccagccatgtcgagcctgaacccggcgcgcacgtcgtccgatatcagaatcaattcttcctgtttgcagactttgccgatggcttcccaccagccgggagcgggcatctgctggtccgcgtatatgcagtggtggtacggcgtcatcatcacgcccgcgacctgccctttgtatgtgttgatcagttccatgaaggagtctaggttgttccattcgaagaagtgaacgtgcgtgcgatcctcgtcgatgatgccgccgtagcttggggtggaccatgcctgagcgccgtgatacgcgccgcgcgcgatcaggattttctttctccccgtgtattcgcgcgccagcctcatgcaccatgtggtgatgtccgcgccgttctttccgtacacgcaccagtccatgcccttggtgagtttaaccatcatctcggcgtactcgatgctgatcggccccggatggctcatgccgtcgcccagttttgcctgttcctgcgccgccgcgtccaccaccgggttgttgtatcccagcaccatcggcccgaaaccgcacatccagtcgatgtactcgtttccgtccgggtcccagtagtggcttccctcgccgcgagtcgcgaaatacggatacgagccggggacggtgaacgcggggtgtttgtgccctatcactccgcccggaatgactttgcatgcccgctcgaaccactcgtatgatttatcaaatttgtaagtttccattttcaagccctccagttgggtatagtcgtccggcgtcaactgatatacaggccgatgcgctccataacgaccgcgaggctttcagccattccgacgtgcccgcgcagccttatgcggcacaggcccagctcttccatgaactctacattggcgttcagcatatcgtacgccagcttgatgtctttaatttccatgacgaccatcgggttcgccgccggccctttggccacagcgaactttccgttgtccagcacgatatgcgccaccggcccgtccggcagcacctttatctccatcggcccgttcggcactttcgacactattccttttacatacgtgtcgtgctctccgacggccttcatgccatagacggccatcatgagtttcacgcgcgtatggaactcgaagaagtccttgtttttgagatcttcttccgacggtctcagatacttctccatgagtttcgtcagcttcatgaactttccgagtttcccgatgttccagaagccccatatcatgggaatgaccgtgccggtgttctctatcattttgttggcggcttccggcgtcggaatcctcagcgagattgtgggcatgctcacagcgcccagtttcgcctcgcatttgccgtctttgaagacgaacctgactcccgccccgccgggcacgtgcatctggatcgtgcagttccagcctttcgtcagctcgcgcgcctccgcgtcatacgcgattatctcctcaagctgaggaaggacggcgttaaggtaaagatacgactttactaattctttttctttttccttatccatcgcggcactcccctgatgaattttgacgggcgcgtcgcagttcgttccgcgacactccgccaacaggcattattattgttattgagatatatttttgcaactttatttaaatcggccctagaacggcgtctatcccgctccaaaccgattgccgccgcgccgtcaatccccgtcaggcagggatatttcgcaaagaatagcgaaatggtcgggcgcttcctgaatcggagcccccttcggatgcccgtccagccgttccgtcccgggcgactgccccagcgtgacgcaagagccgcgcgccgcgttcgttatcacgtggtccagcgtgaacccggagcatgtcctgaacggcgggtcgttttccgcaggaccgctcagatagtaatatttcttgccatccccaacatgcttcagccaaaccgccacgtcgtcttttgcggcgtcccattgaaacgggtccatattcatgtcgcccatgataatcgcaggactgtccgtggccgcaagcgccgggaacccttcgtatccctcgaacaaccttctcaactcttcggcgcggcatccggcgtccgccgccgacggatgcccgttgactatcctcagccgtttcccattaatctccgcgtccgccccgaacacgaccgtctttgtcgagcatccttccggcgtttcgattgtcagcggccagcccggagcgcggcacagttctccgcgcccgcaaccttcaatcgtcccgacgctttttttcactcctatgcactcgtagttggcgcgcccgtcgcacactatcgtataatcatctcccaacagcctgcgaacctgatgcctctctttcctgtcctcaaaccggaagcacacattcttcttgtttttctccacggccgccgcctcgcaccactgaacgtccagaacttcctgcagcgacactatgtcgggcgacagcttggctatcccttccgcgaccttcttctcccattccacgagacacagtttgtaaaaatatttcgggccgcagttcagtatgtccgcgttgccgacgtttgcggtgagaaccctcagcgaagcgggggagggggagcctccgtccgcgagcgcgcggggactgcccgccataaacgccgccgcaactatagccaacgcgattgtttttgccttcattctgaacgcctccggacgcggtcaaccatcgacagttttttaatctgatttcttccggcaaatatttttcttcaagttcgggttcaagcttcgtttttataagggccgctcttgccgccttctttttccataaggcggaaagggccgatggagatgtctttctggacggctttgcacatgtcgtagatagtgagggcggccacggtcgcggcggttagcgcttccatctccacccccgttctgtccatcgctttggcttccgcgtcgataacgattattccagcgtctctgtcggcgctgaactcgacggaaactttcgtcaggctgagaggatggcacagggggataaggtcggatgtttttttcgcggcgcacacggcggcgacgcgggcgacttggaacacgtctcccttggagattccgccggacagtattttgtctatcacgtcgggcctgagccgcacttcgccccggacggttgcgcgccgcgcggtacgttccttttccgacacgtccaccatcgacgctcggcctttttcgtctatgtggctcagttcgcccccgctcattgcgtgtctccgttcgccgagcgcagaatctccaccgcctgttcgggcggaaccggattgatgtagaacccggtgccccactcgaatcccgctatgttggtcaggcgcgggattatctctatgtgccagtggtacgtgtactgtcggctggtgttcacggggatggtgtggatgatgtagttgtacggcgggaagtccagcgccttgtccagatatttgagcgacttctgaaaacactgcgccagagacgcgatgtcggagtcttccaagtccgcgaaattggggtcgtgatgtttcggcacaagccacatctcgaacgggaaccgggacgcgaacggcgcgaaactaataaatcggtcgttctcgctgatgacccttctctggtagtccctctcttcgtctatcatgtcgcagaagacgcagcggtctttgaagtcgaagtattcctgagcgccgttaagctcctcggttattctcttggggacggtaggcgtggcgatgagctgggagtgaggatgagccagcgacgccccggcggactgacccgcgttccggaatatcagtatgtatttgaaccgttcgtcgttctcgaggtctatcatcctttccctgtacatccacattagctgttccatgttttgcggttctagggtggatatggttttgtcgtggtcgggcgtctcgatgaagacctcgtgcgcgccgatgccgttcatgatgtcgtagatgccgcgcgcccgcttgttgaggtcgccctcgattgagagcgcgggatacttgttcgacaccacgcgcacgcgccagccgggcttgttcggctccgtgcacgagtcccgcaccgcgtctatctcaggcggcgtcttgtcttcgttccccggacagaacgggcagaagcccgttttcggaagaggtttcgctgcgatgaaatcgctcggcctgtcgccgcgctcggaggatattatcacccatcgacccaacacggggtcgcgtcttaattccgacatccttaatcgtcccgctttccttgcctagtctcaattatacgcatttgcgccccggtgtataccccgcgcccgcaacccgcaaagcccggccgccccgcataggcgatagcccggctaatgtttccattcgaccgggaacagcatgcgtatgtgcgtgacgtctttcagagctttgtcgtcccgcccggacaccgacggcatccgcgtccactccccgccgccgatccgcgcctgaactatgaacgcccccaaagcctgttcaagcgtttttccctgcggcccgcttttgaaatgtaccggcctgatgaaatgcctgaacagcggagccaccccttcgagcgacgggtccgccgcccccggcggcccgaccaccatccactgcgtcagcagcctcgcgttctccatctccgcgctcatcgcgtggttttcagggattatctgaaaaccgcctatctctcccaccggcgacgtcgagacgcagatgactcccgtgtggttcgccctgattctcccgacgtccgtgtacagcgagccttcgaaccttccaacccccgccaccggtttcaacacctgcccgatgagtttcggttcctctccgggatactttataaggatgaaccctccgaacctgttttcgaagacgatttccgatggatatttctccggctgttcgacgattatcagcagggaatcgccttctgacggcgtataatcctcggcgattggggagtgagcggaaccggcgcgggccgcgagaacccgcgagcctatgaacggcgattcggctcctccgaaaatgctccctccagccgggatattcgttattattgaactgttccgggaatagaaagatttataatccgccggcggagagaagaaatctttgggcaggatgctgaacaccgcgcctctgtcttcgttctgccgcacttttatgtgaatggcgtttacggcggtcgcagcgacagcccccgaagacgcccagccgctggcggtgtacgctcgcggatttatcgtcccggcggccagcaggacttttccggcggccgtccacgaagcgcctccgtcttcgctcacttccaccgctccgcccgccgcgttctccacctttatcctgaaaatttctttcatcgtcgcggagttttcgcctgctacagaggcgtttggcccgcgcgcgtccggaagaaccgccgacgccggagcgcagaccgccgccgccagaaccgccgctattatcgccattttaactttcatctgtttcctccgaaggcttgcggcctcctcgcggctttcgcgcctacagctcgattagctctgccttcatccccgccgtgtcaaaaacggcgatagtcgatttgcctgtcagccatccgcaacactctccgggattcactatcacgggtttgccgtccttgagaacaggctgatgcgtgtgcccgaacagcacggcgtccaccggcagcgccgccatcgcgtcgtccggcataggctcgtgaagcacggcaaaacgcgctccgcccatctctatgaaagccggcggcttctctatccgccctatcttcttaaatgtttcggaaagataaatcaattctccgtcgttgtttccgaacactccgaaacactcctcgaacccggcttccgcgatagctttcacaacgaacggggaaacgatgtcgccgcagtggataagccgcgcggcgccgcgggatttcagcgtcgatatcgccgctcttaaccggtcaaggttgtcgtgagtgtcggatataattcctattaacatacttcgctcctcggcgttcgcgccccgcattctccggttcaatacgcgaatccgcgcaagtttcgcggcgtccccaccgcaaccgcctcgaatcattatatcagcgattaaataaaattagctatcagcgcgctcgctatccgcaaccctgtcatcacgggtggcgtccacaactccgttgcgggcgctctcaatcggcaaaaccgattaagaactgatataatatccgaatcgcggcggcgtcgcgacaaacaataacctgagggccggaacaatgaccagagcggaagaattcggcataaagatagacaggatgcgggagagaatgaaagagcggggctggggcgcgctggcgctatcgcggtcggacaactttgcgtgggccgcttgcggagccagttgccacgtgaacatggccgccgaagcgggcgtcgcctcctttgttctgcttccagaccgatgcgcggtcgtgaccaaccgaatcgagtccgcaagaatcagagacgaggaactcgtcgggctggacgtggagcttgtcgagattccatgggccgacgacaggaacgcgaagatagcgcggatgtgcgcgggggcgggcgtggcggcggcggacatgccggcctccggcttcgtcccggcgggcgaggatttctccgacctgatgatggagttgacggaaagcgagatggacaggttcagggcgctcggagcggacgccggggccgcgctcgagtccgccgcgagggctttgcgtccgggcatgaccgagaacgccgccgccgccgcgctcgcctccgagtgctggacgcgggacgcgcagccgatcgtcgtcctcgtagcttccggaggcaggctcccggcatacaggcatcctctgccgacgcggcagccccttgagcgagccgcaatgcttgtcctctgcgccagaaggggcgggcttgtggcttccgccactcggatggtcagcttcggccccgccggggacgacctccgccgcagacacgccgcctgctgccgcgtcgatgcggctttcaacttgctcacccgacccggcgcgaagatttcctccgttttccgcgacgccaccgccgtttactccagcgaaggcttcgaccacgaatggctccttcaccatcagggcggcccgtgcggctacaagtcaagatacttctgcgccagccccgacacccccggcgaggtcaaacccaattgcgctttcgcatggaacccctccattacaggcacgaaatcagaagacaccataatcgcgtttgccgaccgcgccgaattcatcacccgcacaggcgaatggcccgaactcgaagttgatttccaaggcgcccgcctgtcccgccccgacatccttgagctttagcgcccacacctgcttcgctcttgtccctccgggcgcgccccccaaactcgtttctgcctatgcctaaggatcagccaaaattaatgtggaactttggagtgcggcaattcattgccgctttgcctttccgggaatttattcctagcatcccactccttaagccaccccatccgccctccacaacacacaacctcccaccccccgttgccaaatcgttctccttcgttcataatggcaacataaccgccatgaagctgcgacagaccacacatccgcgaccgaacaactatccctacaacagccgtgcttatacaaaatcaagatcagccaaccagatcaactctaattctgtaaacaggctccgcctgactccaccatatgcggttttgctgatgatactgtgctgcttggtgtggacattgattgcttttgtcagcgcatccgcagatgatttcacgggtttgaaagcgtgtccggatgaagagataaagatgggagaggaagttttaaataagtttctggataatccatctgattctttcagagctgacgagtggtgccctgtttggtcttcgcggaaaccatcatatattgatccccggaaagacttcgatgatatggatgaagaagagcaaaaaaagcatcagcggttgatatatgaatacgatagaagaacgttttgctgtgaactaccgctaaaaatatatcaatacaaaaatcatcttacttccgagtttgcgaagggacttgttttagtagacatagcaaattctcgagacccacgtatcgtccccttgcttgaagacataattaaatctgacataagtccagaattgcgaatgaatgctaccaatgaattatgtaggttggatgtcaaatctcaagctgtgatatcaaacgccataaatgacaatgacattagagttagaggcgtagctgccgggtgtcttctaagatggggttatgaggacaaagcattgtttgtgatggaaaggatcgcgagtggagaagaaaaacagagttactttaacgatattactcgtgacagagaaagaatagatttgtccagaggaaaaatgccgaacccccccagcaatgaatctattcacagagaccacagcgattttcagaactcttgtatacgaaaccttggcgaatatggaaaagacgctgcaattatgctcttgtgcaaacttcttgacgaagcagacaaccaagaaatacaggaatacataatcaaagtattgcgcagaacaaacaatcccaaagctgttgactgcctgactcaacacaaatagcaaatgcgagaagaagcgaagaagaagtggtcaggtttgaaattagcaattttaaaaacgggagcatctatggtaaggccgaggcttttgacagtttacaatgtcgctgataggcgaaatagcatccgggcgggtgaaaatggattcccgctttcgcgggaatgacggcacaagagaaaaggaatgacggcaagaaagaatgaattaagaaacaaaagataaagaatgaaggcacaaaaagaggaatgccggcggggggattgattatcgtttgcgtaatgtctgtttgtgttcaataaacattcgatgtttctactgtgaactctgagcgaaaaaggggactggcagcgcgcgcctcagcgatgcctgtgcctgcttttcgccgctccgccgttgtttctactatgaactcaggggtggattctatatcgagtcgatagctgcggatactttagagatgtcatcgtcggcgtttttgatattgcctgaaaaccgcactatgccttttccatccactacgaacgcggcaatccctttttcatcataaccgtaggttgccgctatctcgcctttccagtccatgaggaacgaaggataacgcggctctttcatgcggtttttcaccatcttcttcacgaaagcgggaacgccctttaagttcgccgcgccgactatgcggatatccttgccggcttttttcccgtcttcccgcccgctatgtttcttgtcgagtttcttgatgatttcagccgcgtcgtcgaatccgtttctgccggtgtagattatgacaaccgtcgatccgcgcagcttgtccagttccaccaactgcatgtgctggtcgttcagtttgaaattcttcgcctttgcgcccgttgcgacatatcctgaatccgaagcgagcgcaaccgaaataacggaggaagcggcgataatcaggctcagacaagttatccgcgcaaacatcgttttcatcttgcgggcgtctcctgtttcacgtcttgttcaacgcgtagatgcagtaattgagatatgtcgcgaacccgacccacagcgcgtatggcaggagtagaaccgacgccgcgcgcgatttcttccacagaaccggaatgagcgcaagcagcgtgatttcaatcgccatcgaatctataaccgccgggcctatcatgcgccgggcaaaaaaaatgtagctccatgcgaggttgaacgccgcgttcatcatgaacagtccggccacaagatagaatcgggaatccccagcgaaaactctccaagctataatcgccgataccgccgtcagtatgtatatcgtcgtccacactatgcctatgacggaacccggcggtgtccatgtcggcagttgtatagtccggtaccagtccatgccggacgacgtgaactgccccccggcgaacgacaacaggagaacgactccgatgataacgatttggttcagtttcatttgacgctcactttgcggcggcggcggccgtcgcggcgcttgccacggaacacaggaatgtcccccaaagcatgtccgccaccgtcatttcccaagaccaccccttgagcgtggccatgttcgtaaggtcgtaaatgccataactgattaatccgaataacgcgcccctgacgagagaattctttatgcgcccgctgccggactccgtatccaccgcgaatatgttcaggcctgccgtcagcgcaacgtaaaccaatatcacggcggtccagtcgggggtcagcccggcgtcgtttcttctggccagttctccgagatgttctttataatagtcgctcataatgacgcccagccagacggagtcaagcgccgccagcgtcgccgcggtcgtcccgattcttttcataaacttccatattttcattgcggcctgtctccttatttcatgctcaacgtcataacgctctggaacttgctaacatagcagtactcattaacgctcaccgctatgacggcggtatcgtccgcccttaagaaatccactaaatgaggatgcctttccgcgtatagctcaaagtaaatgctatcattgacgcggtcgatttccctgaccgctccgagaatggttacggctgcggcgtcatgaacgtcgcctttgctgttgctcctgttgtcaaccagaagcgaaacgcgcggctctccgagcagattgtcgaatttcctcgtgtttcggggcgtcgcaaaaacaagatgtttgagatcgtccgtagccgcaaaaccgattatgtttgaatacggactgccgtccctctgtaccgatgaaagaacagcaaagtactggccgagcaatagatgtttaactttttcaaacaggtctttggaatcgttcacaatatctcaaacctcgccgtgatggatttgtttcacaatcaataataaaacagaataacggcaattttgttccggacgccgaaattccggacgttaattctattaattctattagccggttcacccccacacgcgtggggaagacagcggcaatcgcgccctcgaccacgctcaagccggttcacccccacacgcgtggggaagacatattggcggcgacggcatgatctctaggattcggttcacccccacacgcgtggggaagacgatccgctcacggtcaatcaagtgctgatccacggttcacccccacacgcgtggggaagacgcagacatatgggaacaatttatcttcaacggcggttcacccccacacgcgtggggaagacttgtttgttgatttcctttgttagcttccgggcggttcacccccacacgcgtggggaagacctgcggtgctttctgccatttcaatcgccctccggttcacccccacacgcgtggggaagacgcgtcggcggtcgcaactcaaactgctcgccgcggttcacccccacacgcgtggggaagactgccatccccgaccccgtcagccgacccccgcggttcacccccacacgcgtggggaagactttgcaagtttttgagatgttgtttcttccatcggttcacccccacacgcgtggggaagactatcaatagttgggtttgtgtcatgggcttctcggttcacccccacacgcgtggggaagacccaacggcgggcattccatctgtcaaaggctgcggttcacccccacacgcgtggggaagacgctaaagaagaagccgtaagcgtcgccacccgcggttcacccccacacgcgtggggaagactacgtaagcggcctggtggaagacaacgatggcggttcacccccacacgcgtggggaagactgccacagatagcggcgacggattagagtttacggttcacccccacacgcgtggggaagacgtacatcggttcgccgcacgtggggcatttaccggttcacccccacacgcgtggggaagacgttcaggattttaggcaactgcatagcttcgtcggttcacccccacacgcgtggggaagactttctgcgaaaaaacgctcatcatttcacccccggttcacccccacacgcgtggggaagacggctctcaattttatagacaacatgggaaacacggttcacccccacacgcgtggggaagaccggcgcagatacaggattcgggtattcgagtatcggttcacccccacacgcgtggggaagacacaaacataccgaaaggatcaaagcatgaagacggttcacccccacacgcgtggggaagacttatagctgtacatctggttccagttgacaaacggttcacccccacacgcgtggggaagactgtggcctgtttagtggatttcatatcgcccccggttcacccccacacgcgtggggaagacggcgcgcctcggtcgccgtcgttctcagtcggcggttcacccccacacgcgtggggaagacaccagcatattgtatgccggtttttttaaaacacttttagtagtattgtcaaatcaatcatcttgtgaagactccttattattttgattgatcaaagtctcgtcagtcctttcagttttgtaaggagaaagaacaagggcaagtccatcgacatcgatcattggccgggccggtttcccacaggagcggtaaagatatccttgcggagagcgggtgtcgctccatatctgagtgacgccgccgtcgcgtattttcttgacggctttgttccacagaatatctctaatcctcgcgctcggattgccaaggtagagtcccggtcgcggctctatcatccagcgtgacaagtctcccctcaagctcgccggggatttctccaatatcatcaccagcatctaatacctccgcgatatccggcaagacgcgtttcatcagctttgttttatgaaaaacgtcccgacaagccaatcttacattgcgctcgacatcgacatcgctttcagagcaagtttgaaacgcgagcggaactgctatttccatcttgtacaggtcggcgacgtcatagacgaaggaaagcatcttgccggtatgaatgaatccgatggcaggagaatatcccgccgaaagtattgcagcgtggcacaagccgtaaaggcaggcgaaagcggatgagagcgcccggttgagcgggtcggcctgatcccagttctgcggattgtatattctgccgcgccacatcacgccgttctcttccgcgagcttgcggtatgcctccctgactctgtgcccttccattcctcttacggtgtcgagagaaacggagtcgggaagtttttccggaaagcgcatgttgtacatccggcgaatgacggcgatgcgcgaatccatgttgacgtaaagccccgcttgtcgaagcaagcgtcttgaggagtgagagcctcccgtgctgtgcgcgtaaagacggacgccttgttcgcctgtccagcacacaagcgtgttgttgtcggcaagaaaacgcattgccgattgagtgacggtcgtgccggggcctagcaaaagcagtcctagctggttaatcggaatctcgatagacccgtcggtcccgtgaaatagcaaggctccggccttttcgtccagccttccgtgttcgaggaaaagatggctccatctattttcgaatttcggcagttcacgcaagtccctcatggcggtcatatccgggcgaggctgacaaggccgaaaccgaagcctttgccgccgccgatgccgtttgtcactgcctctttgaatagatccgcgtccgttattgtaataacgccgtcgtaccggacggaacgaagcttttgccctttaaggttttcgttccgcgcgctcacatagacataagacggagttaaggacagagagtttttaacgacggaaaaacccgcgcgttcggctcgcgaatgtagccattcttcaagtttatctgaggccaccgggacacgctttccgttgcgtcttttgccgtcttcgccggtcttggtgcagatttttcgagtcgggtttgcaaggagcctgaaccggtattgcatatcaagggaaaagacaggctcgaaggcttttacttgcggttcggcggagagaagaaacccggcgttgtggaacgcatattgccaatcgggcattgatgcggactgaacgatgattgcggctccgtttcccgcaagagggtcgacgcggaacagaaaaccggtatcaggtttgcgagggacatgcacatggccttttgcgaagccgtcaggcttgaatggcaaaagaaaatccgggtcggctaacgatgcggaagacgaagggaacgccatgcacaagcgctgatggactctgtaaagattgcgcaaccatattcttcccggacgcggtcggtcggggttgtcgccggtgttgattaaaaggcaagaaagaaacatgacgattattccacctcctctgcgctcaggcgtctccgtcgggtttcgagagaccggtatcggactacttcttctcgtttcttgataatttcatcgcgccattgagggtgttcggggtttatccggtcaagccccattccgtgtccgtactctatcatggtgactgcgtcgtgacagagtcggcaaagagagcgcaaatcttcttgagattcattgccgccagcgcggcgatatgtcacatgctgaactgttgtcgcgggagatttgcagaaaacgcaaagtccgtggtcggagttcagccgctcggcccgcgcgttcttgtatgcggagtttgaatagtccgcgcgggaacgtggcggatcgggaactctgctttgcgccgcgtcttccgctatcctgacatctccttctgttccaactgagaggtttttcagcatcacaaaccgaggctgatgggatggcggctcgaacagtatggggacatcgtgccacactaacgcgtcatccggcgcttccggctgttcttgcgtgggcgtccagtcaatcaggcagtcgattgactgcggcgcttcatcttccttgttccttctgcgccaaggaacagatgacaacgccgagatcagatcaggatgcgattccggagggcgctcgctcaatggccgcgatggaacgcagttcttccttcccagatagagcgtccatttcggatttattacggcggtttcgatctgatcgatcactgctgaatctccctgcaaagcgactaaaaaagaagcgtcgcaaagatattctcgacgcgtgagcagcgcgcctttctttgtcttgccctcggcttccgcaatgctcatctgcatttctgcgcccacagtgtggtagtcccaccagcggattccggccctgtcaattctgacgcccataagcaaagagcgaagcttcggcaaccagaatgaggatgcttctgctcgcggaacgccaagcgcggcgcaaataatcccggaaacgccggacttcgtgggggcttcgcaggttctgcggacgacaaacttggactcatgtccgccccacgcttgcaatggcccttctagacggagaaacatcgtgttttcgcccatcatgccacctctgaattaagaacaacctcttttactttgctccagtcatatccgatagcggagacgatggcggggatcagttcgtcaagtgatttgacgttgttatctgagagatcgatttctttattctcctctatcgtctgcaacgggaaccgcaggttcggagagaaccagaatcggttttccggtttaccgtagccggcgtccagatcgaggatgtattgtccgagttgagcgacgctctgagaaacgatgtcgcgccctccgctgatagagaccggccttgcgaatgcattggcataactaacgggcgattttttgagttcaatcaaaatgccgtctggaggattatgcgcggcgaagctgttttgttttcctgtgggattgactgtcgccgcggcgcggatgaaagctcctacggtgtgtgcggcgagttctttgttgcctttcaagtttttaactaaagcctcaaaatcaattgagaaatatttgtaaaagcatgcggacgagaacaaagcttcatcaacatacccggcgcccgcgtcggctcccggaatgtcgtctgcggcaacgtaataatcaacttccggacgggcttcgtgcgttgatatggcgtgagcgacttgaagcgcggcctcgactgttgtgtctttaagaacaccggtttcaagcattcttccattcaaggccatgtcgggaacagcggtcaattcagaaataagccccccgaattccgatgcaagctcatcgtcggacttgccggaactgttttccagcaggtctgccattttcgagatcgcttcttttgtggtgtagaccaacatatcgcttttttcttcgtctttaggagcgatgccgcactttttgagtattgcgacagctctctttttggcgtctgccttgccttggattctttctgaaatcagttttgccaactgtcttgtgcggacgccgccgcatagagatttgaactcctcgctcatccttatgcttcgtttgacgcattggctggaaatgcgcgagcggatgactccgccgaaatagcaggttttcggcgcgccaaggtcgtctctgttcaagttggccggactgtggttctgtatcatgtggatttcgattagcatgttattctccttttcggtttagaaattcttccgcccatctcaggcgggttgactcgcgttcccagatggaaagatcgtcggtcagcttaacccaatcgagattgagtttttttgactcgattctgtctaaagcccattgtaaactcggctcaatgtcgctaagggatgcaagaagcaggttgtcgaaagcctgcctaaggcggtttgactcgtcggaagtctgattgcgcggcatagaactcccaagttgagacgcgagagtctttccttgttcgttggaaacggcgggacgaaaagcgtagagtttcgctatcagccacgccacttcgcggcgcggcgcgcgttgactccgttgtcttaacggccaccatattcctgtgaacaaatcaaatgcggggacggactcgtcaagtttttgtcctgagtgagcgcgcaacaggcttaactcgccggatttaaggttcgtcagcgtgtcgataaagcgctgcgtttcactcatctttttttcctcctttcttcacgcgggattttccggcggattttttttcacgcatatcggggatgacgcgggatatttgtctgcgtctttcgagagccgaagaagtaaaccccggggataaagctccggcaaccgcgctcattaatggtcggtactcgcgcgaggcgtcgtcccatgcggcagggtcgccggttagcaattcgtcaagtcgcgacgaaaccacatgctcaacatgaggacgtatcgttgcggccattgatgaattttctttatcagatctcgaaccgatccgctgtttttctatcagccaactttcttttttccataattcgataagcgtggccgccgtatctgtgcttgcaggttttgacggtattcttatcgttcgttcccagacatctatatttttcgctttgtctgtggagaaacctatcacgagaatcatattgtccgtatttgcgccaatgaatctgtttgattgggatattcgagatgccgtttccggccacggtctatccattctgaatctcccagtcgatgtgggatccggagcttttaatgatttgcgaggttctttgtctgtgtacaaaacatgaggatcatcccataattcgtttcgaagttctccggcgctctggaattcacatgttgttatcaaaaagtcccgtttgccacatcctatacagtctgacatttcgtcatcgggattgtgcagaaagacctttcttgataaggtcgtcaatccgtcaagcaaaggcgcgcaagagctagaattattagtaatcgacggcgcgacccatgagggattgcctatactatcaacatgcatccaatttgaaacgagggtttccttaagattaggcccgatggcaaatatatagattggcggagtcccgttaatgcctgcttttaggtcgggcagaccggacacggaaaacagagggagcctcaatagccccattgcgcaacatgccttgcacaatccgttgatattatctgtcgaatggcggaaatgtcgaaaattgttgccggtaggtatttcttggagcaattccgttgttgatttcttcctattcgctgattgattttgaaaaaatctttttccttctcccagcagattgaaacagtctttttccgcttcaagtttttcaaaccattcggcaggaaatgaatctcctttcaattttgtttcaccttctgtcgggttgcctttgcaccaataaagcacggccaatagaaatctcatgatggcgaaacggtccatagggttgctcgcggctatctggcgtatgcttccggctcgcgtgaacgcttccttaatgccgatggcgcttacttgtccgttgttccatagaacgggaatccattcctcatctactaaattaaacatagcgttgcctcctgttatgtgatatagccgccttattatatcagatacatagtccctttttgtcaatcaattagaatgcgacaaccttgtcatgcattctactcgttgcctgtgacattattgcgcgtcaaattgccgtctttgaaaaatatttaatcggacagtaaaaaaggaatgtcggcagggggtgggattgttcttgttggaattgttatgtcctgcgagcgaaagcaggctatgttccacccgcccggcaaacatttacacgctaaaatcggggactggcagcgcgcgccccagcgatgcctgtgcccgcttttcgccgctctgggaatgaaaggcaaattcggcgactgtgtcggaatactaattgaaaatcccgcttctttccttgattatttatgtgcgctacaaataataccatgtgcagatttggagttttcatttaaacccggatccatcattaggattcgggagcgaatgttcaaagcggaagaaatgcggaccgcaaggcgcgttattcaaagtagaggcggggttgccccgcccggaacaacgccatgatagggcgcggaaaccgcgcccctacagaaaaacaaacatgggcggcgctcacaagctcgtttgtgcgtgagaagcagtgtgccgctataaaaatggcccggttctcaggggtctataaataaagccgggttcaagcatgaatacggcagtttcatttaacgcgtttatgccagttcttaattgattttacccactcgtttgtgtgccatgcacaaaatgttttttttgtgcgtgagcgaaaacagcaacaattcatgagtaatttcaaataataagtcgtttatatcggcgaactattttttagcggcggccagccatttattgtagtctttatcccagccgctttttgccgcgtcggtgtatagcttgatgagcgggtcgaagtcttttatggtaacggggaaaaagcgtatttttgttgttttcataaggcttctgtagggtttcagggtttcggacttgtgggcgctttccatcacgctggacagcctgttgactagcagggtaggggcgttcttgtgtttcattatccccggctgaactgtcgcttccgagcaaacaagctcgttcagtttgcttatcatggcggggttgaacagcttgagggaaaagacgttcatctcgtgcacaagggcgaggtcaacctctttttttgcaagcatgtcgagcgaggccatgccgttgctgttcaatttcacttccttgaaaagcccatcgagaattttgtctccgaacatcttgcggagcggatagtagccgtcgtgttccttgtaggtggctagacgcaggtctttcattttgtcgatgcccgtgattttcgtgtccgagcttgagtagaggcacatccgggcggttttcttgtcgaaaagcgacacgccaagtatcggctcatagccgagtttagtggccagaagaaaaaacggatcggtattttttgtgaacgcgaaatcgagaacgcctttcgcggcgtcgtcggtgaaggccttttcgtcgtcgtaccatttgagttgcatatcgaccttctcgatgtcggcgacgtatttgaccaccgcgccgagaacggttttaagctgctggtcccgctcgtccggccccatgtaaacgccgaagttgtatgtttcagccgcaaaggtcgcgaccgttgacgccgctatcatcgccgccgctatcatcgccgccgccacaatctttttcatagcctccgcctccgttccgagggaaaactcccttgccgcatgttatccggtattttgtccctcattactatattaccgaaattcctcagggtttacacgaaaccgcgaaataattaacagcgccgccggaataataaacaaagaaaaagggagatatgaagagattcagaggcgcatatttgccagcaagcgaaatatagcggaattccgcagtttatgttcaatgtcatataaaaaaccgtttgttcggatgaaataattggtataattcaacaatggaaaatctgagcgacatcgcgaggctgttcgcgctgaatctgccagcagcggcggcggcgtgggtggcgtcggggttgctgacggggaatcgacgcgggcctgagcggttgcttgccgcctgcgtcgtttttgtctccacggtcgcttttaccctgctcctgttgtctatggcgggcgcgattaagtacccgaacgcgttcgcggcgcagatcgtgattctggcggttgttgtcgcggcggcgcgcgtcaaggcgaaatcttcgcgggcggtttactcccctgacgttctttcttttggcgaagcgccgcattcggagccggacgcgatggcgggcgcggcgatggccgcagtgaaaatcatatccgccgtccttttcttgatgatgtgctcgtttgcgctgaccatgccgcctgcccccacggacgcttttctggaccatctggtatttccggcggagtggctgcacgcgggaaagatagttttcgttcagacgctaagcccggaacaggcgacgacctactatccggggaacggcgaactgatgtatctgtggctgatgctgcctctgaacgacgacctgctgtgcgggctgatggagtcggcgggactgctgactgcggcgcttgcggcgcacgtaatagggctgcgggcggggatgccgccgaagagcgcggcgacggcggcggcggcgggttccgcagtcccaattgttcttgcgcaaacccttcaattcggaatagacctttattttacggcatttttcttggccgcagtcgcgtttttgatcccgcggtcggacggcgggcgcgcgaaaggcgacatgctgatggcaggtctagcggcggggctggctgtcggctcgaagtatttcggggcggtgatgctggcgctactggttccgctggtggcggcgcgcgcgcgcggcgagtcatggaaaaaagttctgtccagagcggacgcatttttcgccgccgcagcagccgcaggcatattctggtacgcgcgcaacctttcattgacaggcagcccgttctacccgatggggctggacatattcggatggaaaatattcgagggggcattcgagagggcggcgatgttccggtcatacctgcacatacccgcgtcggacatgggggcgttcgggaagatagtggtcgggcgggcgctcggcggcggcgcggctgcggttttattcggcgcggcgctgattgcgggggcgctgaaagcggctcccggcagggcgactgcggcgcgcgcggtggc

SEQ ID NO: 532 - DNA, 63461 bp, Artificial Sequence; identical to SEQ ID NO: 531
  Synthetic Oligonucleotide

SEQ ID NO: 533 - DNA, 63299 bp, Artificial Sequence
  Synthetic Oligonucleotide
gcatcgctggcggttcatccccacgcgcgtggggattacagcatgattcattccgtgtgcaaccaggtagacggttcatccccacgcgcgtggggattaccaaaacgcactcgtcaccgtggcttccgagatgggttcatccccacgcgcgtggggattacgatccaataggcgcggccagctaaacctctgccggttcatccccacgcgcgtggggattacaagacgcgcccagggctgttggatgctgagtgcggttcatccccacgcgcgtggggattactgaagacgcgatcatcgatctggcgactgatcggttcatccccacgcgcgtggggattaccacaggctgcggctatcgaacgcgaacgtgaacggttcatccccacgcgcgtggggattactcatttaaacgtatcgtctccatcccatcctccggttcatccccacgcgcgtggggattactacatcttcgggcttgagcatcccgccgctactggttcatccccacgcgcgtggggattacctccgtactcccgttgtcacgatctgcatcgccggttcatccccacgcgcgtggggattacgaaggaggcgggcgagcgcataacaaccaggacggttcatccccacgcgcgtggggattacacttggtatttattggttattttggctttgtaatgagctgaagtccatcccaactgaggacgtgtctcgagggatcgccccagaagtcgattttgaacccctgttcgttatttgcggtccaaatgaggatagatcctccttcgccggttttccggcaaaccttttcccatagtttttctcttaccatggcggagacggtgccgacaaacacgccggattttggttcgagcagccatcgagtgagttcaccgcggagcgaaggcgatacgcgttcgagcaccatgacgaccattagggttcatcctctgtgtgttcgtcgggttcggcataggacacgccgccggccacttcgccggcgtcagggtcccacaggcctccgggcgtgccgggatccgagtcgaaatcggtctcggcttcgtcgtcatcggccggcttcacgtccagcgcgtactcgaggtccttcacaacgcgttcgaggaggcgctgcgccgcaaaagcatcgcggcacaggattcggacctctcgctcgatgtttcgggccgagcgggcggcggtttcgaacgcggcgggggcggtggtcgtggccttgtataggtcggcgatatcgtagacaaacgacaactgtttgccggtgtggatgaacccgagcgcgggcgaatagcctgcgccgactatggcggcgtggcagattccgtagaggcaggaattggcggtggagagagcgcggttgacgggatcggcgtcgcgccagttctggcggtcgtacgcccggcccgtccacggtatgccgaattggcgggacaggctcgagtaggcttcgcgcacgcgcacgccttccatgccgcggatctgttggagcgtcagactcgaatcgagctttcccggaaagcgcatctcgtacaggcggcgaaccacggcgaggcgcgtggagcggcggctcgagaggcgcgcctggagcagaaggttctgggagtttcgcgtggttccgtgccccgcggcatagaaccggaccccctgctcgccgcaccacacgacgaggcagccgttgtcggcgagggcgaggacggcggcgtgtgtgatggcggtgccgggccccagcatcaacagggcgagcgtggcgcacggcaccggggtgagtccctgggcgtcgtgaatggcgatggctttgtcttcctgatcgatccgggcgtgctcgacataaaggtagctgagccggtcgcgcaccttggcgaggtcgtgcaagtcacgcgtcagcattcgccacgcctcgattgtggtgcgggcgtcccgcctgcacgaaccacagacagcagcccgaacccaaaccctttcgccgagcccagcccgctctcgaccgatagcatgaaagccggcccgtccgccaccgtcaagtctccctcgagcagcgcggaacgaaaccgcagccggttctcggccgttcccggcttgtgtcccgccacccagccgaggtgaaccacgttgaattcgttctggagtgcaaacccggcgtgttgggccttcgcggcaaaccattggcggattgcccggtccggggtttcgccttgatcgccgtcccaggtcacggccacgcgtttcgactgagatttggggcggccgaaggtgtcgacaccctcgtgcggcgtgcacagatctgtaccatcgcgcgccgtcttggtcttcttgcttaaattcattctgatgcgaaaccgaaggtggtcgccgggcgcgaaagacggggcatattcgcgaacctccggcggcgccgccagaagcatgcccgcattgtaaaatgcgctatcccagtccggggccaattgagactgaacaagaacgatcgcgcgcggcgagttctcctcgatctggttgtcgatgcggaacagaaaaccggacgggcttccgtgcgacctcgatggaaacgccatcgacagccgctggtggacgtggtagatgtcgcgcagccaccgccggcccggccgctcccgatccggattgtcgccggtgttgatcatcagactcgatagatacatcactcgacctcctcggggctaagccgacgccgccgcgtctcgagcgaccggaacttgacgatctcgtcgcgtttctcgataatccgctcccgccatcgagcatcctccgggtcgatgcggtccagccccatgttcagcccatactcgagcatggtgacggcgtcgtggcacaagcggcaaagggaacgcagctcgccgatccgctcatcgccgccggcgtggcggtacgtgacgtgctgcacggtcgttgcacgcgatctgcagaacacgcaaagatgcgagtccttctcgagccgctgcgcgcgcatcttccggtactcggaattgccataatctgcccgcgggcgttgtggcgagggcacctggcgctgcaacgccgattccgccaccgggacctgccccccggcgcccacgcggaactgcccgcgcacaacaaagcgcgcaccatgcgacggcggctcgaacgtcaacggcacgtcgtaccacacctcggcgtcatccggcgcctccggctggtcgggcgacggaaaccaatccagcagatactcgagtgtttccgggggattatccctttcaaagcgccgctgccacggaaccgacacaagcgccgaaatcaggtccggatgcgccgccggcgcctcctcgagcacccgccgcgacggcggacagcatttcctgcccaaatagagcgtccagcgcggcttttcgatcacctgccggagttctttgatcagggccggattcccctgaagcaccaccaggaaagtggcgtcgcaaagatactcccgccgcgtgagcattgcgccgggttttgtcttcccctcggcttcggcgatgcgcatgtccatccccgcgcctaccgtgtgatagtcccaccaccggtatccgggcgcatccacccggacgcccatacgcagttcggccagttgaggcaaccggcattcctgcgcttccgcccgcgtcacgcccaaagccgcacacaacagtccgatcacgcccgatttagtgggcccttcagccgtgcgccgtacaacgaacttcgactcctgattaccccacgcctgcagcggtccttcaaaccgaagaaacagcgtgttggccgtcatggcgccacctgttggcttgtcactttcttctgaaccgaattccaatcaaagcccaagccgccgatgacggccggaatcagttgatcgagcgatttgaggtttacctcggccaccggaatcgttttcttggcttcgatgacgcaaagcggataacgcagattcggcgagaaccagaaacgcttctggggcttgccgtaccccgtgtccaagtcgcgaacataatgcgccaactgcgccacactttgtgaaatgacgtcaggattgcccttgcccgacacgggagcggcgaaggcattcgcatagctcgtcggggtgtcggcgaattggatcagcaggccatcgggcggattgtgcgccgcaaaactattctgtttgcccgaaggatttgccagcgctgctccacggataaaagcccctaccgtatgtgcggcaagttctttctggccattgaggttttccacaagcttgtcccaattgatcgagaagtacttgtagaaacatgccgaggcaaacatggattcatccacgtagcccgcccctgcatcttcgcctggaatgtcatcggcggccacataatagtccacctcgggcagcgcctcgtgcgttgaaatcgcgtgagcaacctgaagggcggcctcgacggtcttgtcaagctccttccaaaggtcgtttgaagatttgtccggctccagcatccgtccggatagtgccatatcggggactgccacatgcttactgatcaacgcgcagaagtccgcggccagttgtttctcagtccttccgtccccgttttggagtagtgcggccatttcctcgatggcttggcggctcgtataaacgagcatcttgcttttttcgctatctgctgcgtcgtccgtttcttccttcttcgccttcttgggcttgaaaccgcatagttcgagtatcttctcggcgcgcttctggacgtctggcttcccttgaaccttctcggcgatcagtctggccaactggcgcgtgcgaattcccccgcaaagcgcttggaactccctgctcatccggatgcttcgtttgatgcattgacttgagatgcgcgagcgcagagcaccgccaaaatagcacgtcttcggcgcacccaggtcgtcccgatttaggtttgacggactatggttttgtattgcgtgaatctcgatcagcatgatggacccctttcatccttaatcttcggtttgaaggaattgttccgcccatcgcaggtggacggattcgtattcccacacggagagttcatccgtgagtcttacccaatcgagtgaaagtcctctcgaggcaacctgcccgatcgcccaacgaagttccgcctcgatcttgtcgagcggcagcatcaatatgttgtcgagcttccgcccaaaccgatttctaccgttctcatcggtcgggaggcaccggcggagttgacgcgcaagcgtggcctcgcgggcctggggaattgggtgggcagcgtagagtttagctataagccacgccacttcccggcgcggcgcccgctggttcttcgcccgtaacggccaccaaagccccgaaaagaggtcaaacccatccacggattcatccaagccgtgttgggaataagtccgcagcagaccaagatcccctgacttgaggccactcaatacgcgaatgaattcttccgtcgcggtcatttatcccgtccttttccccgccccttcttcgcggccttgggtgtcatgtttggcatggcattggcaatgcgcttgcgtattctggctgcttggatcgtaaaccctggggacagcgattgtgcggctaagcgcatcatcgggcggaacgccttggccgcttcctgccatgcggtttcgccgcccgctatcaacgatccacttttctccgacacctgcttttcaacgtgcggtccaatggacgcaagcatagaggtaatctctcgatgctcacgccgctcgcccttttcgttgtccgatcccaggtttttggcgaaaccccattttcccttgcgccattgttccaagttgttgaggcattcgtcccgctgttcttgtggcgcctggtcgatatcgcaagggatctggcattcgacagcctcaagatacttgtcgttctggacggtagaaaagcccactatccagcaaggagatgcgtttcctgtttgcccctttcgaagcaggccggcaaggatattggcccactgccccgccgcggcgtctggtgcgccaagagcgtcccgcgcatgcaggctgctgatttcgcccttggcggacatcccgtagatgacatgcgggtcgcaccacgccctgaccggttctccttcttccgtcttggtgctgccaattggggcaaatacagtacgcaggattagcctctcgctgcgcccgcatgagatgcaggtttctgcccgttccgcaggagagtctaaccacactcgccgcggcagccaggtcaaacctgtgagcagtggcacctcgcctatgccaggcagttggacgtccggtttttcccatgcgggcgttcctaacgggccgaccggccgccaggaaagccgtacagtggccgcaagtgaaccgcgcagcggtatgacgtaaaggggaggctttgagttgattccaggcggtttaccacgcccaccggaagtcgcaaatgctggaagccttagcaagcccattgcacaacatgcgcgacacaaaccgtttacttcgtccgttgaatgcctaaaatgccacgcattcgtaccggtcggcacctcatggacaaggtagttggcggtcagccgtttatcttcgcccacaggtttcttgtactgataaaatcgccgggtctctccaaacaagtcaaagcattctttattctgttcgagtttcaagaaccaatccggagggaatggttcgtaaggcgcggcctgtgggccgttcgccgggtttcccttgcaccagtagagcagggcgaggagaaagcggagtatggcgaggcggtccatgggattggatgcggcgacttggcggattctgtgtgcgtcttggaatgctttgaggataccgacgcgtttgaaatcgccattgtgatagagaacgggaatccagttttgggaaagcaagttgtacgagttcatagacagcccctttttgcgcgccctgcagtgagtctacgcgggggttctgtttaaatcaagtagattgaggggttatctaagtgagcgattttgatgtggaagttggggtcagcggcggtattgggaggctcgatgaattgtctcgccaagccggaagggctgaatgggccagggtgagtatacgtgagcggagattctcctcaaaccacagctgggccgcgctgcctttatatatgacgacataatttttgctgaatgtgggtccggaattattccggacctacgcttaggcatacattgctcagaaagggctctggctgccgccgctgccgcgtgataatgtagaaactcgagggcccggaattattccggacctacgcttaggcatacgttgctcagaaaggggtctggctgccgccgctgccgcgtgataatgtagaaactcgagggcccggaattattccggacctacaggaaggtgggaaaattcggtcgtgctgtatagaatcgttatgtgctgatattgttgactgtctggcagggcggccgacgaagtcggctgcgcggaaagctgattgttgacgaggtacagcctatcgagtgcggtgaggcggccgatctccgggggaagcgtggaaagctgatttccgctgaggttcagcccctgaagctgttcgacacccggcgcgtcgagaagcgtgcggaggtcgctgtccttcacgccgcagtccataaggctcagagttacccagccgcttcttctggctttggcgacccgcttcacgattagggcggttgaatatgtagccacagaaatccgctccgttccgttttccggcgccgggtatcggccgccggcccctaaacatccccgtttagcatagtggcttgaggaagctagtttagtacccggtggagaaaaaggcaacaacgcatgatacgggtggggagggacaagctgtcgaacccctgccggggtacttcgttggcgcgacttgtgcccagggtagcgcccggccctggaccggtgtggagtggtcgccggggtcttcgttggatgctcgtggtaggtgacgggtacagggccattggtacgggccggtcgcaaccctgggctgacaattgacccacccctccggggtggaagagtgaagcggcaggagttgttgcaccccttcagggtgcactatctttacgcattcctttcctggggcgttgcctcaggctattatgtgttacggctccggcgtaacttgcgctttcagcgtattcatcattcatcagttgtcatatgctgccgcacggtgaacttcgcacttggccctgtaggggcggggggagttgttgcaccgcttcagggtgctttttggttgtgcattcatttcctggggcgttgccccaggctaatatgtgttacgcctccggcgtaacttgcgctttcagcgtattcatcattcatcagttgtcatatgctgccgcacggtcaagttcgcacttggccctgtaggggcggggggagttgttgcaccccttcagggtgctttttggttgtgtattcatttcctggggcgttgccccaggctaatatgtgttacgccttcagcgtaacttacgcctccggcgtaacttgcgctttcagcgtattcatcattcatcagttgtcatatgctgccgcacggtcaagttcgcacttcgcccggtcaacttcgcactcagaactttgaacttcgcgcttaccaggggaagtttttcatgctggggagggtgaagatttcgaccatcaggggtagcggggggcggatggtgtagtcggggtcgttgtatggtgcgttgggtgcggttttttcttgggcgaggaccatgcatcgggttgcgtcgatgatgtggtcgtttccttttgagtaggtgacggcgccgttgttgagtgagtaggtttgtgtgaggaactggtcgggtatttcggggtcggtggcggggaagacgatctcgcgccgttgtagcgccttgttgatgagcgaggtcatgagttcttttgttcgttttttcgtttgggcgccgttggggagttcgaatggtgtgactccgccgaaatcgaagccgaagaggcgtccgtcgaacgcgcgtggcttgtatttgtcgagcgacatgagttcctggatgacggcgagtccgttgccgccgttgtcgatgccgattgctgcgggcgcgagtagggagtcgatgacggcgagacattgggcgatgtgggggtaagcgactttctccatgtggacgcgcaaaacaagccttaaactgcagtctggagtctggagtctggagtctggaggagaacaatcaggagattttttgggggtgtcttggcggaagactaggatttcggttgggtcgtttgtgtatccgaggtctgcgccgaggtagtattgggcggagtcgggccagatgttgagtagcgtctcgaaccgttgttcggtttcgagttcggattggcagtcttcgagttcggcgttggtgatgacgattttgcggtactcgggcacgtcttggagcgcgagtgcgaggtgttcggggtggaacgcgccgtagcttggcgcgccgtgttcgccggcgacttcgtgctgccagccggcggttgcgcggccgccgtagaattcgagcaggtcggcttcgtggttgggtgtccagttggggttgagccaggacggccatcggaacacgcgccagcggggcgagtttgtgaggcggtagtatgtggcgttgcgcatgccgttgggggtcgagtatacgcggagtttgccgccggcttttaggcattggcgcagcgcgcgccatgcgtcttcgctgagccacgcgccttcgtcgacccagacgcggtcgacgtggagggagcggaacgcttcgccgtacgtgcccgcgggccggaagtagaggacgctgccgttggtgaactcgaggcgcgggtagggaaaccgctgcatcttgcggtggccgttgcggccgcgggcgatgcaggcttcgagccgcgggttgttttcgagctggaactcgatttcctcccaaatggcgagcaactggcccgcgagcgccgccgctaccagccccgatcctttccgggtggtcatcgcataatggagcgccagcgtggtcaggttggccgtcttgccgacgtcgcggccgtcgagatggacgatgttgtcgtcggctgcgcggagatcctcgatttggtgccgccaataagcgcgggccgacccgtcgcggttcgccagccatttctggccccaggcgacggggtcgcacttgtcgagcggtgaggcgggcgtccggccctcggcgatctcgcgggcgtcggcttcggcggcggccacacgcgtcccgtactcctcatccagtttcgccttccgctccgcccaacgacctttcaacccatcgtaatccagaagctttcgcaccatcgccgaagtccaaagcccttccccccggttcggcactccatcctccttcaacttccgcatgatcgccgactggctcagcccggcttcctccagttccttcgccagcacgatcgccccctgttccaccgggttttcaacaagacggcgcgtagccttctcaaacatccaccctaccggtatattcatcatcccagctttcggcttgtaactgggtttccgagtcttctttacactccccttttccatcgccttttccctttccccgctgtccttctatccttcatcctttcctccagcctgctcttctgccccttctgcttcaaaaaatctgcaatccccaatccgcaatctgcaatccgcaatccattcatccttcgtcccctaccctttgtccgtcatcctcgcaccattcttaattcttaattcttaattgatccttgatcaactccctctatttcatatgtgcatttggtgctctctttttgccattttggcatggttcgagaaacgtaagtggttgaacgagcgcgagataaaaagtttttctgacaccacccctgccagaaaaccggaaacctcttataggactctggcctacggttaagttagcagctataacggcggactttttgactgacaatttcggacttcgttcgaggctgctataatctcgatcatgcgcccgggattggagccttttgtagactacctcgaggccgagaaaggttattcgccgcacacgttgcgtgcgtacctttccgacctggaccagttctgcgactacgtcgcacacgggcccgcggcgttcgagcgggatgaaggggagccgcacccgccggcgtcgctcgacgtgcttggccgtgcggttcggaatgacgtgcgggggtacctggcgcatgtccagacgcgcggcggcagcgcgcgtacgtccgcgcggaagctggcgtcgatccgggccgtgtacaagttctgcgtccggtcgggcttgctcgaggacaacccggcgcagacggtccggtcgcccaaactgggccgcaacctgcccgaggcgctcacaatccccgaagtcacggcgcttgtcgaggcgccggacacgtcccagccgctcggcgtccgggatagggcgttgctggaggtcctgtacagcagcggcatccgtgccgcggaactggccgcgcttaacatcgagagtctcgacctcgacacgggcctgatgcgcgtgctcggcaaacgccgcaaagagcggctcggccaactcggccaatacgccgtcctggcgttgcgcgactacctccgggtgcggccacagttgggtgagccgcagcacgaccggctgttcgtcaaccaccgcggcgggccgctcacgacgcggagcgtccagcggatcgtcgagaaatatgtccgccaaatcctgcctgggcggcgggaaatctcgccgcacacgctccgccacacgttcgccacgcacatgctcaacgcgggcgccgacctccgggtcgtccaggaactcctcgggcacgaaagcctctcgagcacccagatctacacccacgtcagcatcgaccggctgaaacaggtctaccgggacagccatccgcacgcctgaatgggggagttggccgagagccaacctattgatacacctggggttacaagatatccatctatcgaggtggttagaaatcctgttgtttagttgacgtgggagtgtgtgtccgctacaatgtttcgcacacaaaatatctttacgcaaaggactcttcatggttaatcccaatgcgttagggctcaccgagcggattctggtggcgttacgcagagttatgcgcgcggtagaccttcactcccgtcgtcttgtgcagactcacagtcttacgagtccgcagctcatattgttgcgcgagattgaacggaacggtgaaatcgcgataggcgagcttgcgcgccgcatcagcatcggcaacgccacggcgacgggcatagtcgaccggctcgagcagcgggatctggttcggcggggccgcaacgggcgtgaccggcgcaacgtgctggtgacgtgcacggacggcgcgaggcaggtcctaagcggcgcaccgccgttgctccaggagcggtttgtgcgggagttggagaaactgcacgagtgggaacaggcgcagatcctgtcgtcgctggaacgcgtagcctgtatgatgaacgccgaacatctggacgcggcgcccatgctggcgatctatccgctcgatgcgacggaggacacgttgcggtcggcagacggccacggcgcgaaacatgccgatgccgccgcacccgcggatggcgacgcgccgccgcgatcggtcgatgcggccgagttccggcttcgggaacttcggcagccggccgattttgccgcgcggggcggattgcacgacctggcggcatttctgcaggaggcgctcaaaccgtacagcgacacgttcgaagacattgctcggggcctgcgcgacgcgctcaacggcggcgggtttatcctggtggcggaacatgacgggaagacggcgggggcgctggtgatgctccgcacggggatgggcgggtacgtgcccgagaatctgctgctgtttgtggcggtcgacccgccgttgcgggggaaaggcctgggccggcagcttgtggagcgcgggctgtgtctggcggaagggagtgtgaagctacacgtcgaatacgacaatccggcccggcgcctgtacgagcgtgtcggattcacgagcaaatacgcggagatgaggtattcgccatgaaccggctcgtcatcaacatcgaagcgctccactataatttgaaagtgatcgacaggtggatccgcgccaacggcagttcgtggacgctggttaccaaggtgctgtgcggccatgccgatacgctgcgcgccctccacgcgctcggcgtcaccagcgtgggcgactcgcgcctctcgaacctgaatcaagtcagccggtgcatgccgggcgccgaaaaatggtatctccgaatacccgacttgtccagggcgggcgaagtggccgccctgtccgacatcagcctcaacagtgaaatcgaggtgatccgcgccatcaacgatcacgcggcacggctcgacaagatccaccgcatcatcatcatgatcgaactcggcgacctgcgcgagggcatcctgcctggcagtctcgtcaacttctacaagaaagtcttcgaactgcccaacatcgaagttgccggaatcggcggcaacctcgggtgcctggcggggaccgttcccaccgtcgaccatctgatgcagctcgtgctgtaccgcgaactgctcgagttgaagttccgccagccgctgcccattatctccgcgggagtcaccgcgaccctgccccttttgctggagggccagatgccatccgccgtaaaccactcgcgcatcggcgaggcggccttccttggcaccgacctgatcaacggcggcacgctcccggaactgcgaaacgacgtgatgcggctcgaggccgaaatcgctgaagtcaagaaaaagggcttggcgccactcggtgaaaccaccaccatgacgccgttcgaaaccgaagcatgccccgacacctcgcccggccagcgcgggtaccgggcactggtcagcatcggccatctcgacaccgacatcaacggcattacgcctctcgatacccggtacaaaattgccggcgccagcagcgatatctccgtggtcaacctcggtgaaaacgtcgataaactccaagtcggcgagcgcatcgccttccgcgtcaactattccgcgctgctgcgcctgatggattcaaaatacgtcgccaaagagatactacccccgctggacgagattcgggaccacatatcccccctatccgaagccgctttcggcgcggccacgatgttggacggggtagcctccgccaaacccgcgtgaggagaagcccatgacgaacgacaccgggctcacgcaggcgtgcgaccgcgaccgcggcgtgtgggaccaatgtgccgccgcgtacgagcgcaatatcgttcacggccatcccgacgtcgtggcttacgaagcatttgaagaagaattccttgaccgcgtcctggcttttctggcagaacgatccggaaagccgctgcacgtgatcgatgttggctgcggttcgggccggttgcacctgcgttacggccttaaaaccacgcgcggcgatcagttgcccgctgccgacgccgagaatctcgcccgcgcccgcgcctcacgccgcgacctggactacgaccccgtcctggccggtgaaaccggcggcgggatcgagttgatcggcgggatcgatctttcctccgaactgatcaaccttgccgccgggaaactgggggaagccggcctcggaacgctgctgggccagcgattgtggcttcgccagggttccgcgttcgacctcgaaccgctggacccggaacctctgcccgtgctcgtcaccgtatgcaacagcatcggcgtcatgcaggggcccgaaggtgcgcagcaactgttcaaatcgctgcggcgcgccgccgaaaccgcctccggtatcgccgtcatcagcgcctaccgcaaagaagccgtccagtcgcacgcgctcggcaactacgagtccaccatgaacgtctccgggcagccgcgctggctcgccccccagacatacgcccgcaacaacgggttcacgctcgtcccgcgccggtacaagcgggcgtgggactccagcaaatccatcctcgtcgacgtgttcgaccgcaacggccaaaaagtctgcgacgggttcctgctcacccgcgtcaacgacgaagtggaacgtacaatcgaaacgggccacattcgcacgtggtcccggtacgagtcgtactggtacgggtttgacacgattgcccggtggatcgacgcatactggggccgcgacacctcctggcacctcgcgggcatcgaactggatgcgttgcgggccgcacccgcccaaatcgccgtctacgaccctcaacggcggctggccgatcttttcgggcgctggcgcatctcgacccgggaggcctaggcgtcatggcggggggcctgatcacctggggcatcatcattgcctacatgatcttcatcttcttcaaaggcgtgcttaaagccaggaagatccgcgacaccgacgatttcctcgtggccgggcgcaacatcggctggtttttcctgttttgcacgatgggggcgactgttatcggcggcggttcgagcatcggcgccatcgggcgaacctacgagtggggcgtgctgatgcttgtcgtgtccaccggctggtacctccacttcctgttctcgggcctggtggtcgcgccgaaattccgcgacgcggaactttacacggtcgcgggctattttggtcatcggtttggcgaaggtccgcgttttctcgtgctgattctgtcgcttctgttctccgtttttatcgtcgccgcacagatggccgcgttcggaagtgtgctgacggctatcctccccgagtttaccaactcgcccctggtgctcgccctcgccatcatcattggcggggcagtcgtggtcacctatagcaccgcgggcgggctcctggccgtcatccacacggacgtctaccagttcgttatccttattttcggcttcctcgtcacgctggcggcctgcatacccgacatcatctcctcatggaaagaggccacctcggccatccctcacacgttcttccagatcgaaggcgggaaaggctggatttttctggtcaccaccttcctcgctttcttcctcggcgaaacgttcgcccccggctacgccacccgatactgcgttggaaaagatatccgcgaaacgcggatcggcattgccggcgtcgggatcttcctggcgctcacgtttcccgtcgtactgttcttcatagccctctacgcgcggatccactttcccgacatcgccccccagcaggcgctccccatggtcatccgcaaaatgaacaatcccgtcatcggcggcctcgtcatcggcgcgctcatgatggccgtcatgtcatcggccgactccgcgctcaactcgtccacggcgatcttcatcaaagacctcttcgaacaccagcttggctggaaagaccgcaacgacggtcggatgctccggctcgcgcgcatctgctccgcgctgctcggcggcgccgccatactggtggcggtgctgtggtccgacatcatcggacttctcctgttcacgtaccacctctgggcgcccgcgatcatcctgcccgtgtgcgttggcgtcctctcaaagaaaaggtcgcccgcgctcacgcgcaacatattcatcacgatgcttaccgcaagcgccctgaccatgatctataagggcttcgccatactcaaaaaccggctcgatatcgcccccctcggcgacggcgcctaccgcttcatggaacaggtggacgcatccgtgttcggcgtagcggtatcctgcctcacattcggcgtgctcaccttcctgaccaccgaccgcaacgccatcgcggtcgatcccgaagaagaacaaccagaactctccggctccgacgactaaggcgactaagaagtcgcattcagaatctttgttcgcgaccttgactcaatatctacgcgccgtgcgcagatgtcgtgaacaaagattctaacaacatgcgcatgcgcctcaactcgaaccagttccgcctacctcgcagccaacggcccgatggtctcatccggtttgcgtcgtggcccgaaatcggataccttgctcttcatgcggcggttgctccgatttattgacgcggctcgctggaagtggctgttgggtttccaggcggggctgttcattgtgtttcacgccctggtgaattcgcttgggctgcggttcgacatggcgcctctggggatgttcgcccactacgccgacccggtgctgctgcggacgcgcctgatcgagagcgtattttacctccacgtccagccgccgctgtacaacctcgcgcttggcgtgatcctaaaacttttcccgggccacgcggcgccggtgtttcacgccctctttctgatcaacgggctggccctgtacctcctcgtgacgctgttgcagacgcggctcggggtccggaaaagcgtcgcgctcctgacgtcgacgctgtttgtgctaagcccgacgttccttgtgttcgagcacgtcctgatctatacgctccaatgcgcgacgcttctcgtgatcgccgcgctgttactcgagatctacgtgcggactcggcgcgcggtgtacggctgggggtttttcatcagcctgtttctgctgtgcggaatccggtcgatgtaccacttggcgtattacgtgttgatggcgtgcgcagtcgccgccgtgatgcgaggaaaccgcaggcaggttttgtggatggcgctgatacccggggtgattctgttttcgttttacgcgaagaattacgtgcttttcgacaagttttcggtgttttcgtttctcgggaaaagcccgtggatcaaaacggtcggcaacctgccgtgggaagaacgcgtgcgcctggcaaatgaagggaagatctcgaaggtgtcgctggtcgagcggttctacgcaatcgagtattaccccccggagatacgcaatatcgccggttacgaaaacatcccggtgctgcgccagaccaccaaatccaccggcgaggtcaactacaaccacctctcccagatcgccgtgtccgacatctacctcgaggacgccctctacgtgatccgggtgcggccgaaattgtttttgtgcaccaccgcgtgggccgggctcacgtatttctcgccgatgccgctcaccgtgccgcggcttcaatggctggtgcgcgcctacgacgtcctcactctcaagatcaacatccccgtaagccgactgatcccccaactcggagcgtcccgtcacgtcccctacctcacgctgctgatcggcatgccgctgctgatggcgtacggcgcgtggcttggggtgtggtcgcgccgccacacggccgcccagcgggccgcactgctgttcatggccttcaccgtcatctacgtcaccggcctcagcatcatcgtcgaactcgctgaaaccaaccggtaccggttcgagatcgacccgttcctcgtcgccttcctcggcctcatcgcggggagaaaaagagcaccggacgcggaaactgcttcgcgtccggcgcaatcttgccggtaaacaacaccggccctgctaaaactcgcgcaatactacttagcgctttttcgccgccttcttcacaacctttttcttcgcggcggctttcttcttgggcgctgcttttttcttgggcgctgctttcttcttgggcgctgctttcttctttactggcattgcgtttctcctccttattttaagtttctcgggtccccccgaggttacactagatattgtacacggtcggccccctcacgtcaagatgttgtggcaagttttttttggggggtggaatggacagagtggagatggtggacgctgcggaattcagtggggcgagttgcagcgggccatggtgattttgcacacttcgtggcatggaggggaaacaatgatcgcggcggtcttgtttttcagtgagctggtttcagaggcgcgcggagtggcggttttggatggttcgctgcgtgtggcgttggcgggtcaggaggagaacgcggtgcaggcgtcgtggccggggatcggttgctggttctggtcggaggaggagtttgggccggagggttacaagcgtttcttggacgtgcacgcgtcgcacacggattttgatctgttgacgacgagcatccgttatccggtggaagtgacggaccctgcggtacacgatcagattaaagctgcggcggcgtacgcgcgggagaaggggatgtcgatggtgatggatctggatgtgcgtctggctcggcaggcgtttatggacaagtatccgggggagatgcaggagattgtgcgggtgcgtgaggtggagatgttggggttgggcgaagtgacggtgggggtggaacctttgaacctgggcgatcattacacgcaccgggcgcggggttatgactcgattggtgggcgggtgctgcgggtctattcgggtgtggcggggccggcggggattgagccggactcggtggaggacatcacgggccggtgtcgtgtggagcaggcggacaaagacggcgtggcggttgcgatcccgtgcggtccgggggatgagggtcggacggtgtttgtgctggcggcatttacgttgtttacaccggacgtatatgcgccgcacttgatcgggtttgagcgggggattctcgaacagtacagggacgtggggttggcgggggcgtgtaaggatgagtggggttttccgggtcggttcaagccgcgggcggatgacgtgtggtattcggattggatggcgagggcgtacaagcggcggcggccggggcgtgacctggcgcgggacgtgttgctgatggttgtgggggagcgcgggcgggtgggtgagcgtgcgggggcgatcaatcactacatggagatgaaccgtgagcggaacgcggaggtcgagaattctttttatgcgggcatcaaggaggtgtttggtccgcaggtgatgagcgggacacacccgacgtggtttccgtttccgacgccggaggaggcgttcaagaacgggttggactggtggggggtgcggcgggatttggcgcagaccgacgagtcgacgccgttttgcgcgcggacggcgctgtcgaaaaagtggcggtcgcctctctggtacaacatgtattacgacggggacatcaaggcttatgaagaagatctttggcgccacgcgctgggcgggggccggatgaattttcatccgctgtatccgaacgatgcggtggaccgtgcgacgtcgctgctggggggcgatttgcttcgagcggattgccgggtgcgcctgctgaacctgatttcgacggcgccggtggattgcccggttgcggtgatctttggtcatccgtcggcgttgaactggacggggtcagggtttgcggacgttgggctcgaggtcacggatgcgatgtgggcggaaggctactacgccgatttgattccgagcagcgagatatcgagcggggcgttgacgatcgcccgcgatggcagcgtgcgatatgggccgcagcgttacaaagcggcggtgttgtaccacccgcagtgggaacggccggctgtggcggagtttttcaggaaggcggcgggaggtccgacgcggttgtaccgggtcggggaatggacgcgcgattttgagggcgaggagtttgatgggtctgcggccctgccgacggcgatgatcaacgggagtgcggccgattgcgcgcgggatattattgcgcacctgagggcgtcgggggtggaagcgcagacgctgggtacgcggaggggtgtggcgggatttacgcaatcggtgatgccggagccgagcggccggtgccggctgctggacggtacgctgattctggcgtcaggcaaggatgatgtgatgggggatccgatccgggcaacggtgagcctgaatgggcatgaggtgaagtttgatgcggtgggtgtggcggcggtgcggctggacaggacgggacaggttgcggcgatggcggcgggcgggctgaagcgtttcaaggcggggcgtatggagattgaactgccggcgcgtgtggatgtggcgttgtggcgggatgcgagtgggcggtggcagggggtgttgcaggggtgggacgggcctactcccgatgtgttgttgggcatcacgcgggcgtgggcgcgtcacaactttccagcacccttggggggagaaaagtcaagagaataggtggctgtggagttggtgaaaaagccaggcaactctattgaagggccgcgaaaagcagggacagacacgatttcaaacagccgaaatcgagtcagtcccagttttttgccagattttggtggaagccacgtagattttatggtgcaagatgactttttcaccaggtccgctgtcccctattctcccctatttccccgcgggttctccgggacggcctttccctcggctaatggaaaaggacattgcgcggtctgttcggtacaaagcgtttggaaacaaccaaagaccgaacggaggacacgcaatgccctacacccattttaccttagcggaacaaaaagtgctctattttatgttgtagcgggggtggcggcggatgagggcaaggatattgtcaccggagacgtgcaggcgagaggcccgcaccagaagttggggcgtgtttccgggtttggctttgtcgtaggatgccgcccgtcaccggctgaacatttctgtgcggaatctgcctccgttgggcgcgagtggccggcttgatgggcggggaggggtgtggcaagatgctcggcattcggcaaaggagggtaggaactcatgcttaagctggagcgcggacacgtggcgccgctgtcggtgctgttttcggtgctggtgcctttcagcgtgtattttggatatcgccggaactacgagtttctgctgtacgtggcggtgatagtgtttttcctcgtggtgatcgcgctgaccaacgatcgcgtgcgataccctttgcccattatctggggcctcgtggcatgggcgattctgcacctgtgcggcggggggattccgattggagacggggtgctttacggcgtaatgctggtgcctctgtcggacacggttcccatttttcgctacgaccagttcgtccacatcatcgggtttggcgtggccaccctggtgatgtatcacttactgcggccgctgctccgcgcggatctgcggggctggaccgcgctctcgatcgtggtggtcatggcggggctgggcgtaggcgcgctcaacgagatcatcgagttcattgcgaccgtgctggtacccgagaccggcgtgggcggatacgtcaacacggcgcttgatctggtctccgacctggtgggggcggttctcgcgatagtcttggtgcgtcttggctgcttgcgccctgcgactcaccactaaccttttcccttctgacttttagaagccgcggcgcccgcgagcccaggaagtcgtgagccaatgactgcgtgtagaccatgacgacttttaccacgggctggctagttaaaaggggagaagccgggtatccagccagcgggtcagcgcggggacaagaacttgaacgtcgttcgacttttctggccttacgggctcatcgggagccgatcaagcgttcaagatagggcaagctcgatcgggcttgcgcgagggtgtcgcactcgactgagagcacaccgtcgaaacctgcggaccggagtgcctcgacgatcccgggcaggtcgattacgccttggccggccgccacgccaacgcgggtgccggtgactttgccgcgttcgtgtaattgcgattccgggatgtctttaatgtggacatgtacgacacggccggcaacttgctggaggtaaccgacagggtcgttgcccgcaagaaacgcgttgccggtatcgaaattgacgccgaggtcgccgggaccgtaggcatcaagcaacctgaccaggtaatcggggcgcgccgtcagcgcattgtgcaattccatggcatataacacgccccgcctatgggcgtgccggacgacctcgtcaagacttacacgcatcaggtcgaagccgcgctcgagcgtcatccattcttcgggaaccggaccctcgtcggacattacaatggggcaagcgacttccgccgcgaaatcgatcgccgatttgagatagggcacgccgatctgcggcaacagcagcgtacagtgggcatcgatggctgagaatgacaggccgaggccttcccgcacggcgttgatcgccgcgggatcggtccgccctccatcgaagtggtgatagggcgactcggcgcgcacggtcaggtggctgttgatcggcaacgcgatggcggaatacacgtagggctcgacccagcgatacccggcgtccgccgcgcgcgccatcgcttgttccggcgcgaggcgttcggttcgggcgaattcgaggttgagcccgggcttcacggcgcgcgcctacagatgatacggatggcgctgcggcttgctgagcaggcggttcgcataggggtcgtcgacgatctcttgtttgttggcgtcccatcgcagcgtgcgtcccaatagataggacaggttgcccaagttgcacatcgtggcggtccgatggcctttctcgatgtccatacacggcgttgcgccagttcgaatggcctgcagccagtctgccttgtggttcatgttgtagtcggcatatttgtccatgcgatacacttcgacaccgccggcaggcactttgaagtttcgggccttttccggtgcgtcgtactgcgtgccgtcgcgatcgagcaccaacgtatcgtcctcgccgtggaataccatgccgaaatcatcgttcttgtcggggtaattgctctgccggtcaccgggctgcgcccagatgagttgccaatcggggtctttgaacgtgtagaccacctccatctccggcgggcagtcccaaatccccttgttgggcggatagcctttggcctcaatggtaaccggcatctgctcgtcggcgtcgaggcaccagcggatgatgctcatcacgtgcgcgccgcgatcccgaatcacgccgccgccggattccatgacccaccggaacacgccggggcagtaggccttgttgtagggacgccagcgcagcgggccgagccagaggtcccagtccaattgcgccgggggctcgccatccgggtccgtgccgcccgtcggattgagcttgtgccagcatgtggccttgtggaccttaccgagcatgccgttgcggatgtacgtgcacgcttggtgggcgggctcggccgatcgcgcctgcgaccccacctggaccacccggttgtatttcttcgtcgccgctaccatcgccttgccgtcgttgatcgtgaccgacgtcggtttctcgacgtagacgtgcttgccggattcgcacgcctggaccatctgcacggcgtgccagtggtcgggcgtggcgatcacgacggcgtcgatgtcgtcgcgctcgaggatgtagcggtagtcgcggtacgcgtctacaccggggccgcatttccctacggctgccgcgagccgtttctcgtccacgtcgcatagcgcggccaagtggacgtcgccatcgcgctcgaacttcaatgtctgctgcagatggttcgaccccatgcccccgatgccgatatgcgccagggaaaggcggtcgtttgcccccggcttccccggcgccgctatcgccgaaatatacggaaagcccaacactgcacccgcacttgccagaaatcctcgcctactgagtgtcatgacgtcatgtccttcattaagttgtcgagactatttctccgtcttgggttgaaccgcggtcttcttcgtcggaacaaatctcacgcacggcacaccgggcacgtccacgccccgttgtcgcaacgactgcgcgatgttgggtttgaaggcgtcgggggctgcatcgaacgcggccttgagcgcggccagcgagcggtcgccgggaatgcgttccaacgccatgcgcgcgtcttcgcggagggcctcgtctctgagcacactcgccacgggttcgacggctgcgtcgtccccgatctcggacaggatccagagcgcctcgctacgtgccggaacggactctgtttcgtcgttcaagagggcggccaatgccgccacaacggattgccgctcggcgtcggcgccgggccgagccgcgtaacgcgcgatctgccacagcgcccgcttggcggccagcgccgcctcgccgctgtgcgccgagataaccccggccaacggtttgaccgcggaggcgccgaccttgccggcgttgaaccaagcctcggtccgctcgtcgtcgttcccgccagtcaccttagcgatgagggtgtcaagtaaggcgttgttgtcagccatgtcctttgtctccatatgtatctggaaatccccaacgaatctgtcgaaccgattgtagataagccggtagcgccccgcaagcggtcaaatgcgtcttcaaggaacgtccttatccagcgcccagtagatcgcgttcttgagcaattggttgaacgcggggttcatgaaatcgtcccaatggccgagcgaggtgtagaacacgcggccgccgttatacgtgttcgtccaggccaccggctcggtcgcggcgtcttccgaccagcggccttgcatcagcagcgtggcggtgtccgacaatggattaagccggtacagccaactggggctatggaatgcggcgctttccagtcccttgaggacgggatggtccttcgcctgcgcggcgcaccacacgtcgcaccccgtcttgcgtgagcgcgaatcgtagcccttgtaatggcaccccagcacttcttcgtcgaacttctgccagaccacgtggccgctggggcattccgcggggtcgctcaactggaacgggacggtgctgacgcgcaccgccacaagcggcttgcccgcgcggatgaaccgttcgagatgatccatctgcacgaccggcaatgcccgccgccgcatgctcaacaccagcagatccgcgtcgtacaacgcgtcgagtcccggcacattgtcgcggcccgtgcctacatgggattccggggtcagaagcgtgcaacggaaatcgtccccaagatagcgttgaacgaaggccgggaacgttgcgtccgatttatattcctgttcggcgagtacgaagacaatgtgcgggcggcggtcttgcgttcccatactggccgcggccaacaactggcggctctcgaacgacggcgcgatgtgttgttcgatatatcgctggatgatggcgctgcccttcgccggcgtgaagttccggtccagttccctgcttccggggtcgatgccattggctgtgatggcctggaccaggtctgacacgaaacatagcctaagcccgtggcgtttcatgttgatcatgccgcactcgcgatagaggacgcacatgttgctggccacgcccatatagacaagtgtgtcgatgcctttgtcctggcagaaattcagcaactcccggccgttgttgcagtcgacgatgagatcgctctccgcgatgacaaggtccttgtgctgccgggtccagactcgagtgcccgtcgggcacggctgatccggcccgcactcgcatcggtccttgcccacgggttggggcggcggctcgaatgtatttggttccggcggcggatatgacggaacggcctgcatcgccttgcgctggggatagtccgcatagaaatcgaccacgtccgacggcgcaaagacgatggggatgccaagtttccgcgcggcgtcgagtgtctggttcatgcgcgggacgagattgcccacgcgcgcggtgtaggtcttgcaccagtgttggtcccacatatcaaccacgacgaccgccgtcttggtcgcgacaagcttccccgtgaccagtgttcgctcaccggtgaccggatcgtattgctgcaggctcagatcaaagcccatcccgtctgcccataacggcaacccgagtgagagaaagacccatacaagaataatgttccggaccgtcttgcgcattccggtctccttccgcagatgataggacaggcctaacccgtagaccagcgtagccgcgcgtgaattttttttcaagaatgcgggcttttcccgttccctacgggtcttcatgagttagacaagggcgaaggaggcctgtaccagagggtgatgaggaacccccggcgagctacacagccgaccaagatggtgatagccggatcatcctgtccgaactgcttcgcctgatccggttcttcaacagcgatgcccgcgcagcgattctcgccctgtacgcggcccctgtcctggccttattctgcctttacgcaagcgcccgaagagcgtcaactgttttgcaacatactgtcatgctgagctttacgtgccataagcaccaggctgcgtgtcgcacatacggcaagtaaatggctcataatgattgggcggtctgcgcgaattcgcatgaacagcgctgaggactgctcgcgaaaggtgttattgggccttgaacgccctccgaactggtcttgagggcgtcggtccgggcctgtatgatcgcggagaacttgcccgcgatggtcgcaggcagaacatatggtaaacgttggcttgtcggaaggaagggagatgtctcgtgagaagaatggcaattttggcggttttgatgatgcttgcaggctttacagtgtcggcgtacgcggcagattcaaatgatgttactgcaactaccaaggtaagcattaaagatgtcgagcatgtagtcgtgtacaaggatccaagtctggcccatgcatgcaatcaggtcagtatcgtcctgctgcaaaacggggagctctttttgggattcaacgaggaaagatatcccgtccatgccgacagcggccaatcttgctttatcaaatcgacggacggggggagaacctggaacactgccgccaagcgggtcatctggccctacaccgagtttaagggcaactgggactgtgccttttcccagaagtccgacgggactattctgatgcacactcgggtgtgtaatttcatcgcacccaggggaatcaattacgaaggcgaccaatcgcttgaaatgcctcctcccgggatgcccgaacgcctcaagaggcaaacggggtatgcgctgcttaaatccaaagacaacggcgtgacctggactgaccccattgaggtcaacacgaatcctatcgccagctcatcgttgtcctggtacgcttgcggcgggtcgggagcggggcacatcatggaacttcccgacggggggttgctcatgcccctgggcggaacactgtcggataaaggggaaaacggagccgagccgagccgctgcttcttgttgagatcggatgatggcggtgacaactgggagtactggtccacagtggcgtatgacgcggccggcattatcagcttctcggagccagggatggcgcggctcagcgacggcaccctggtgtgcttgatgaggacccaccacaaaccaaatcgacaggacaacatgtggttcacgtgttcggatgacgatggagtcacgtggagcccgcccaagagaacgtcgctctggggttatccggcggacgtcgtgcagttgaaggacggacgcgtactggcggtctacggctacaggaaggccccgtggggtgttcgcggctgcatctcgcaagacggccggacttgggagatcggtaaagagttcgtgatcagggaggggggcgtgccggcgccgtcgctgggcagcggttcgcgtactcttctggatgcattagttatgcagcagtattggcacatcgggtatccgagcgtgacccaactggctgatgggaccgtcgtcgttgcctaccacgagtacagcaatgatgagcagcccatccactacctgatgagcacgcgattcaacctataggttcggagacccgggcatcggggcgtactgaaggctggtgcggatttgggttgcacaaaccagttgctgattgtcagttttaagtctacactggtggaacaggtcatggagagtatcggttttcagccgccggtcacgacccggccacggaaggggagtaaatatgagtgagagcgtctacaaagttgtcgagattatcggcacctcgccgaattcatgggaagaggctgcaaagaacgccgtcgagaaggcgggcaaaaccttgcgcgagatgcgcattgctgaggtggcccaactcgatatgaaggtcgacaacaaccaagtcgttgcctaccgagcgaggatcaaggtatcgttcaggtatgaagactgagtccagtctgaatctcgagcgtttcctcggaagttgcctgtaatgatcatcctgctgcatagcggatgagctgaatatagtactggatcgcttccatatagcgccggatgctgacgcgctcgtttacaccgtgtatcatggccagttcttgttctgtaaaccaaaagggggtgaaccggtactggtttacggcaactttagcgtagttcctcgaatcgttgtcgccgatatcgaggctgggggctaccgcgaccgcgggccacacgtgtcgaatgcttttctcaatggcctgatagccccgcgccgcatgatctgaaacgggcgatgcgttatgtgcgccgggcaggacattcatctcgatgcggtcatcccccatgacttcgcggatatggttccttacgcgctcgattgtatctccagggagaagtcggcagttaacgaccgcccgtgcggtagacggcagcatattgtccttttctcccgcgttgaacattgtggcggtaatagtcgttcggaggccggcattcgtggcgggcgcttgttcaagctcccgcgtgatgagtccgccgaacagccagcgattggagaaaagcacgcgatacggcaggctcatctccggagtcgcgtagtccaacgtgaggcccatcagtccctcggaacgcacgggcatcgggtgacggttgatgcgagtcaatgcggccgccagaatctcgatcgaggtctcgggtgggggttgggaagaatggccgccctcctgcttgacgagaagctcgaagcttgcatagcctttgtcggcaagggctaccagcgcgagcggtcttgcgacgccaggtacgattccgtccgtgatcacgagaccctcatccacggagaattctgcctgcaccccgcgtatcttgaggagtgacgccatgtgggctgcgccctgctccccattcaactcttcatcgtgccctaacgcgagatagatagtgcgctggggcatgtagccggcttgcacaagggtttctgcggcttcaagaattgccatgagacgtcctttatcatcgagtgcgccacgtccccaaacgcagccctcagcaatgacgccgccgaacggcggatgcgtccacgccagtgggctttcctccgcagtgaccacgtccaggtgagccaggagaaggatgggctcgagcgtggggtcgtttcctggccacgtgtacatcaagctgtattggttgacgaactcgcgctgcatgcgggcatggataccgggataggcctttttgatgcaggcatgcagtttgcgaaactcatcgccgctaaatctagtttggtccatgtaggaaacggtcttgcactgcagcgcctccgagagatgggccgccgctgtttcatcgttcagcgtcattggttgccgcgtctcgggcggaaactgtcgcgacttagccagcacggcgcgcaggagcacagcggccgtcaggatggttgcgaggaggaatgcggcgagcatcaatctcttgaacatggaacgactcctcagatctcttgtcgctatgctaccatgccggcacaagaaagaggcaatcacggtcgggaacgcgatgatgagccttgaggtttcctggaccaaatggatattcattttcaaatccatgcccgcacaccgattttctacttgcgcacggcccacgccagggccttattctgcctttacgcgggcctttgccgagcgtcaataattttgcaggatactgcaatgtaaagttttaagcgttataagcagatgaatgcttattgcacatacggcaagtgcatggcgcatgggacctcgtgctcaacagccaatcactcagcaacttcgaccgccacaaacggtgctgcacttctcgaccggcgtttccagattgatatggaaagccaaaaacaacacgattagatgccagggtttgaggatgaattccggcatgagaacgggcaatcctttccaaatggaaaagaggcatgatgcccgcatgttgaggccgagtcaatcggttcagtgccgacacacaacttaagcgcaactcgtttggctagaattggttacacgttggctggatattttgaccctacgcgacagggaatttgtgttatgaaacaacggttcacgttatggaatatcgagcttttcgaagatttccaaggaggtcaaacatgaaagcatgtgtatgcgtctgcgccgtcctgatgtctgtgctgttttttatgtttgcagcgccacggattgcatgggctgaatcgccgcaggaaccggatactacgcactactcggttgtcgacgtctacaagtatccaggattcaaccttgtgcagtttacgttgcctgttttgagccactattcctacatggtggtaagcggcaaggaatcgctgatggtcgaccctggccgggatatattcgcttatctggactacgcgaagaaggaggggctgagtttcaagggcactttcctgacgcactcgcacgcggattttgtcgctggccatatggaaatggcgaaggcgaccggcagccccatctacgcgagcgccatcagcgaagccgaatatccgtttaagcctcttgaagacgggaccgtgattgagatcggcgaggcaaccgtcaaggctgtggccacgccggggcatacgccggacagcatgacggcctatgtcttcagcaaagacaaacccgatatgcctgaactggtcctgaccggcgacatgttgtttgtggggagtatcggacgaccggaccttctgggcgggacgatgacgggctcggaactcgcgggtatgagcttcgacacgtgggtgaacaagcttgccaagctcggtgacgcggtggttgtatttccggcgcatggtgcaggatccttgtgtggcgccaacctgagcgatgcgccctcatcgactatcggggcagaacgcgccaagaatccctacctccagcacaagggccgcaacgagtatattgcggcagacctcgcaggtctgcccgaagcgccgcagtatttccaccacgatgcggcattgaaccggaacgggccggacctggtggattggagcgcgccgatgccgaaggaagatccagccgatgtgaacctgacggacccggccaaggcctacgtggtcgatctccggagcgacgccgactatgcgatcgggcacattcccagttccgtcaatattggtctgacggaacggctggaaacgtgggtgggcatcatggtgccttggaatgccagactggttgtgtgcggcacggctccgcagatgaaagaggccatctaccggttgcacagggtcgggtatcacgcgggggttgtctcgattgactcttggctgaaatccagccagccggtggcgaagaatacgctcgtgaaaccggcggacctgaacgcacaggtagagaaggcggacgctccgataatcctggatgtgcggctggcggcggaattgtccaagggacgtatcgcggcctcactcaacttgccgcttcaacacctcgacacactgtcggcccagattgaccccgcgcaaccggtcgtcaccctctgcaactcggggtaccgctcgagcatggcggtgggtgtcctggaacgaaaggggttcaagaatgtggcaagtcttctcggcggaatgaccgcctggacggatgcggcactgccaaccgcattcgacacggccgcgtcatatcccgtggcattggccccgcagacggctcaattttccgcatcggcaacgccaccgccgccaagggtggcggtcaatctgccggaaaggatttcggcttcggatttgaaacggatgattgtggatttgcccgggaccttcgagttcgtggacatccggccgcccgcgatgtttgctgactacacgcttccaggggcgcgaaacgtcgatattggcgaccttatcaccaactcagaatatctgaatggcacgacgccgttggtcattgtagaccgggacggttccctggccatggcggctgcgggcattctctcgcagaagacgacgcggccgattcgggcgctctatggaggactggaagcatactgggcggcttcggaactgaacccagtggtcaaagaggtggctttgggcgcatctgccgctgcggcaggaagttccatgccgcaagcagctcccccggctccgccagcgtccgcgcctgcatcccaggcgcccgccgcccctcaaccggccaagaagaaaagcgcggggtgctaaccatgatagacgagaaaacaaaagtgaacccttattggaacccttatttggccggcattctgttgggactcacgttgttggcctcgttcttgttgcttggagccgggctgggcgcttccggcggaattgcacgagtcgccgcgtttaccgaaggatgtattgttcccggccacgtggcctccagcgaatattttggcccgtggagcggctcgcccttgaagtattacctcgtgtttatgctcgtaggcatcttcctgggaggattgttctcggcgctcctggccaaccgagtctcgttccagatcgagcgaggcgctgcgtatccggcgggacgccgagcccttttagccgtcgcgggaggtctcctcgtgggctttgccagccgcctggctcaagggtgcacgtcaggccaagccttgacaggcggggccctgctgctgacgggcagcctcatttttatggtgtgtttgtttgccgggggctatgccgccgcgtggttcgtgaggaggcaatggaatgattgagacattctacggttcggattccctcggggccagctcggctcttttcgtggcgttactggtggggtatttcttcgggttttcactcgaacgcgcggggttcagcagttcgcggaaattggcgggcattttctattttcgcgacatgaccgtcctcaaggtcatgtttaccgcgctgataaccgcgatgctgggtttgtgttattgcctggcgtttggctgggtccgcccagaaagcatcttctttatggataccgtctacggcgcccagatagtgggaggcttgatattcggcgtcggctttgtcatgggcggatggtgtccgggcacggccgccgcgggactcgccgcaggcaagatggacgctctcttgtttcttgttggtgcgattggcggcagcgtcctgttcaacgaacttttctggctggtcaaacctttgtatacctctggcgaaaggggcgtgcagttcgtttacgacacgctccacgtgtccaagccgttgtttgccgtcgccttcacgcttgccgccgtggtctgtttctggggcgccgagtacatcgaaaaagcgcgcgccacgggcggcgccctattccgttcgcctttcctgaaggccttcagccttgcacttgttgttgccgccgccggactgttcctggtgccggtaaccggaacccctgccacagccgcggtagcccaactggcgacacacgagcaatcggctcttggcgaggaatcgctgctcaaagaagtcgagcagggcggcgatcatatcgagccggaggaacttgcggatcggttgctggcgggtgatcccaatttgctcctgatggatgtgcggactgatggcgaatacaaggcctttcatctgccgggagcggttaatgtcggtctcgcccagttaccgcagtacctggcggcgcacaaggggcaaaagacggttgtcctctactcgaacggcatgacgcaccccgcccaggtgcgtgacgcactggaaagaatgggatacgccaacatctatatgctcaccgacggtttgaagggcttcatagagcggtgcctgaaaccggtgtccctgcgtggagaaccaatcccgcaagcgttggctgcgaaggtgacggcatggcgcaacttcttccttacggcaagatcggctacggcggtaacaccgacggccgcggcaactcgggcggtcgccacgccggtaccggcagcatcaccggcaccccctgtagccatggacaatcaacgactgcctggcctggtggagacgcagtggctcgcggacaaccttgggaaatccggagttgtcgtgatcgacatgaggccgcagcccgaatacaacaccagccacattcccggggcactcagccttgccgtggagagcttccgcggcaacgtcaaaggactaccgtcgatgttgctgccggcggacctgctggcgcgccacttgtccttgatgggcataacgccggacaatctgctcgtttttatctacagcgataaggcgcatgacgccaccttgccctgcatggggctcgaacggctcggccatctccgctacgcggtgctcaacggcgggtttgggaaatgggccgccgaaaagcgacctatggataccgtgctgccgtcggtacaggagtcggagtataagcccatgccgggggcagatacgttcactgttgatgccgcgactgtgctcaagcaccagcaggataaatccgccatcatcatcgatgtgcgtccccctgaatacttcagcggcgccaagtctgacgaggcccgcgccggccacatccccggcgccattaaccggccctacaccgaagacgtggtgaagaacgaaggagtgctgacgttcaaaccggttgccgatctttcggcggcctatgcagccattgttccgtcaaaagatgcaaccgtgattgtccattgccgcaccggccaccaggcgagccagacattctttgtcttgaaacggttgcttggttacaaggatgtcttgtactacgacgctggctggaccgaatgggctgcacgtcccgagttgccggtggagaagtagacggaaactggcgcgtacggaaatcaaggtcaggatgcgaaatgattatgacaggatttcaacagaactggaggccgggtttttatttgtctgtatgctcttgattccgcgagtaaggatgggacccaaaaatagagagagtagccccggaattcgttatgcgatcgttgcagacaagtcagagcaacctacgcccgtatggtcagctaaccaggcgctgaataatgattgagaggaaagatgttcggatgacatagtggaagcctccccgggtaaggccgatccagccgcccggatacatttccacatccttgctcgcgtaccgattctcatcttgcatccgatttatgcagggccttattctgcccttccaagaacctctgaagatcgtcaatggttatgcaacatactgtcatgccaagcattacgtgccatgaccacccgactgcgtgttgcccatacggacagccctttgcgctttagggaaaagctgagccccacgcgcgttcaagcagtagtccgccgacgactccaaggcgccgtacctcgaaaaacgtgaggctagcaagggtgtttaatttctcgaccggcgtttacacaagatgtcaacaaaatgacgcttatcggtctattatatgagctacaggagaacaaacaatgctcgggcgagaagtcatattggataaacaggcgatacaggacgtcctttccggtgagcgggagcgcttcggggaactggtcgagcgatatatgcccgttgttcaggccacagctatggcccggctccgaaatgtgtcagatacggaggacgtggttcaggagacgttcctgcgggcctttcagtctcttgaccggcttcgcgttaaagagaagttcggggcgtggctgctgacaatcgcacggaacgtgtgtaacaccttgttggcccggcgagggcgcgaagcgtccctgcatgaagcaacgccgccgttggctgtcgagccatctgcgagtggggaggcggctgaattggacgggctgttgcacgaggagcttctgaaactcggcgagaaccatcgcgaagtgctattgatgcattactttgccgggcgttccctcacggagatggaatccttgctcggcgtgagtcgtctcgctttggcaaaacgactgcaacgggcgcgggaagccctcggcgagcgcatgctcaaacgcgtcgaggcgggccggtacagggtgtcccaggaaaaggtctcgacggtcatgaaagcgattgttgtggcgccggtttcgtggggtctgacggagacagccagtctgacacgtattctgtatccggcaagacaactgggagaactcgtcatagcgcacaaacttatcgcggttccaatacttcttgtcgctggacttgtggtcacactagccatcggaccgatggaggcacttgagaaaccgattccggctgttgttacgagcaccgcggacttggccgccgtcccgccggctgcagccactgtaaccgagacagttgccgacgtcgcggctgcggctgcggaatcggccgacgcctccacggaagccgttgagaaaccggtggacctgtccgatcccaaagatgtctggagaaaggtggttgaggtaaaccgcgtgtggctcgacccgcgaccaacgtatctgcgatacacgctaaacatgggggggcccgagccgggaaacacgcccgagttggtgcaccgcgtttggattgacggcgataaaggccgctgggagactgagggcagccagatggtgtttgacagccagaatgcggtctatttgcagccctacggccttctccagcggagtcccatgccgatggagaacgcgtcgacgtaccggcagggattgatgtggcacacggcgctccacgcatttgccaggcgcggcctgccggagaatgcgcgcattgtcgagtcgaccgatgcgccttctgaaaacatcgtagtgattgaggcggaaccggagaagactggcgcggcagtgggattcggcctgggcggaacatggttcggaaaaagctcgtaccccgtcagccgggtgcgactgcacattcagacgccggaatttgtgcccgtgctcgaggaggacttcgcgcaactacccgatggtggcgagagaagagaactgatcgaaattggcccggaattcctggccttcggaagccaatccgcgcccaaggttctggcctaccacagtacgctgttggacgaccgggagtgggtattaagggccgagttccaaaaaaaggatgacgcgtggattctgcgcgagggcctcaacctgcaagaaggcaagccatccaaacgcatttatgtcacgaacgtctcgacggcggcgttttcgccggccctcgtcgagatgccgagtgaggaggaattggccgcactcaagacggccctcccaaaacaggagcccgcccaggcgtccgctgaaggccagccggttgtggtcggtgtcttcccggcgcacgcagccaagaatgtggccgtgcaaacggaactgaggatccaatttgaccggcctatggatccggacagaatggggattgccttcgagaagggcggcctgagagacttttcggcggcacagtacgatgccgagtcgtacgagttcgtggttcccgtacggttaacgccgggtgaacaacaattcattgccgttaacagtgatgacgacggattcctttccgcggatggcgtgaaggccgcgcagtaccgttggggctttgagacggcggctgtaccgagccgggcggacgcccctgaaccgcgcgtcgcatcgctctcgcccgcgccgggtgacacggttgcgtgtcttacgttcatagaggtggtttttgaccagccgatggatccgtccgcgggttacattgttgacttgagcaaggacagatccttgatgggcggcgcacaactgctggcggacgtgcagtatgacgagcgtggaaagcggtttctcttgccggtatcgtttccgcctgattggcagggggatatcgaacttcgggggtttcgcacggtcgagggggcggcagccgcgccggtcccgctgcacctgtccacaacgcgcgaaccgttttccgagagctcactcgaacggttcaaaaaggcggcgaaagatccccggttgctcacggtgctgagcgagatgcgccaggcgcggcagcatctgacgtctgtgtccgagcatgtcatggtaacgtacgcgtttggcgtcgtgcccgtcgaattggcgccgtttattaaagccgatggcggcacgttcaggtttcaggggaatcgccagttctacggcgacgtgaacctatccacaaacaggttcgttgtagccggggatggggaccagtgctggtggctgtgtaccaccaccgataagaatgggcagacagaggaatccgtgcaggctgcgccgcacgacacaatcggcaagaaaaacatcttgatatgcgatccctttgaccttgaaggtcatgacgtagacgcggctactgcggaactgcatctcgaatacgaagggatggtcagttttaacggccgccaagcccacgtgattaagtcgactacagccgaccttcccggcgactggacggaggccaggatcattcgatggtggatcgactcgcaccagttgatgcccgttcaggttgccgtcaatcaactatgcatgcgcagcctgtatacgtttgcctacgagggcatgaacgagccgattccggacacggagttcgcgctgccgccccgcgacgatgccgcttcacaaccttttgaaccgctgacggatggtgacacaacgcggttcctaaccgtagtcgacggcggcaacggccggatgtccgtgcgatggggcaatgcagcgagcagcagcgggttaaattgactgcggaagaacgcctcgcccgcgcgttggttcaattgcggttggcggcgaggtaaaaggcgacgttgtttcggtattcggcggtgagtttgccttgttggagcaggtgctcgacgtgtttcatggcttcgagaacggggattgacaggccggcggcgatatcttggagtgagcaggggtgtcggcgcacgagggcgaggatttcgtcttcggagacgtgcaggcgagacgcctgcgccacaatattcggaaagttggcgatgacttcggcgttgggcccgatgcggcgtgcgatcttttgcatgatgttgggggcgacgggaacggcggtcgagcctggtgcgggtcgggcgagggtgttgaggtggattttgtcgggccggatgcggccgatacagtcgatgaatcggtctatggcggggctttgaggttcgatgggggcggtgagaaagatttcgagccagatttggccggagtaagtctcgcggaaggattccaggcccgcgatcattctctcatacgtaatggcggctatcggctggttgacggcgaggaacgtctgcgcgtcagaggcgtcgagggagggcaggacgacgttggcgaggttcagtgcgtcgcggacctccgggtcccacaggagcgacccgttggtgaggacggctacgggcgttggcgtgagggatttgatgccggtgatgagcgggccgatctcggaatagagggtgggttcgccggacccgccgatcgtgacgtaatcgggtaggacgccggtttcgagcttgctccggagttcgtcgagtacctcgtcgagtggcacgtagggcttgcgttcgagcgtatggacagtagtaggtccgagttggcagtagacgcagtcgtaggtgcaggtcttgaacgggacgacgtcaatcccgagcgagcgccccagccggcgggaaagggcggggccgaatacgtatttctgagccatagatttacagtacctgcgggagagcgggtgcgtcaagcgtggacccgaatcgtggacccgaatcgccggcaatagcaggtcaaatgattttggacctacaggcgcgtctcgaaagaggaggcgtagttgtttttttgccgtcaggatcggaaggtcgtggcccatgggagcttccccggctatttcgacggttttgatgcctattacttccggatactgggttttagtatcgaggccgttttcgcgcatctcgcgcacgcacatctcgatgacttcgcggatgctggctggtcattgcctccgtcctcgaacgttctgccctgggtgtggcaaccgcggaacgcgggaacatccgcgacgtagtaaccgtcttcgtcttggtctggtgggatggagaaccacacgggcagacaggagatcgactggttggccaggcacatactacccccgcgcgctgcccattcacgacctcaaagaccattcgaaaaagccggagaggcatatgcagcaggaatcttcaatggtggcccgagaacggatgacattacagacttctcttaagggcatgctgttcatggaatcattgcgcaaagagaatcgcgcccgacggccacaaggtttggaatattcagcccttaatccctgtgagtacgatgcccttcacgaagtactgctgggcaaagaaaaagaggttcctcacaagaatttgtgcacgagtttgggctccggcaggtcgcccaggcaatgatatagggcggtgatgtaatggggggcggtacggaacccgtagcatcggtggctgacgactttggccttgttgttcatgccttcgacggcgcggttgtcgatgcgcatctcaaagtagttgaggaggtcgtcgaggtggttcttcatcgtccaggcaaagtcgcgcatgggcttgagccgggagtgtgtcgcccaccagaaccacttcttgagaaagcggcgggcgccgtctttgctgtcatagtcccagaattcacggaagctttctttgagaagataggcgcggttgctgcgcaggttcaactgctccaaatgcccaagtcgcgcgcgttgcttgtcggtgaggttctcggggttcttcagccaaatgtagcgggtctttttgagcagttcgggattggtcttgcgcaattcttgggcttcgtcgcgcggcacctggtcggcggccgtctggctgaccagcaggaggggcagtttcatcccgtagtcgccgacgacccactcgaacttgatacggactttgggatgacttttctcaaaggattccgcgacttcgcggaaaatggcgtcatcggctatgtttccccaataggagaagcggatcacggtagtgccgccatcgtcgtcccctatcggcgtggcatgcgccgcgcccagaatcagggccgcggccaacaccaaacattcgggtacccaacagattttccgcgccgtagtttcaacgatgcccgttgggcagggcgcaagtcaaactcagcaggagtcgccatactctgagtctttacccttttgttgcacaccagcgtaatcgcggggaattgcatgcgacggtacacctttcgcgtcgatgcgttcgttttgatgcatgcgccgctcgggggcggtgagttcgtcacgaagccgattcggttcaaaggggaaaaactggtcctcaactacgccacgcccgcagcgggaagcgcgcgtgtcgaactcgaagatatcgacggaacaccggtcgacggatactcgttgaacgactgccctgagatctacggagacatgatagaccaaacgatccgctggaagtcgggccctgacgagatcagcctggtagggaagaccgtaccctacggccccgagcggtgtcaaaagaaaggacggcggaccgcgacaagagagaacgtcggccggcttcggcgtgtttcgtggtccacccgtcctcgcaggctaacgcaacgtaacgtttgcgtcggttgtgccgatgccgatatccttgagttccgctttcccggcgcccttgaaccagatcgcacccgctacatcccccgcgatgcctcttatcaagtagtgtccctcgctgtcggtggtggtcgatgatcgggagtagtccgcgaggcccatggcttccaccgccacgccggcgacgggacgggcttgcgcatcccgcacgtagccgcccaccgagtgggccgccagcgatggcacgacaatggtgagttcggaggcggcggcccccggcgagacatccagccagaacttctgcgcgtcgaggtagaggtttcccttgtcccctccgtccttccaatagaactgcaaggtgtaggtgcccggactgacgctgctgaaggagaacttgccctcgccatcggtttccgtattctgcatgggcatgctggcgcggtcctgtccccgcttgtccggatggccgatggcaggatgaagatagacgcgggcatccgcgaagggttttccgtttgtatccaccaattgtgcggagaacgacgaggcaaccgcggcgtcaccaatactcggctccagcttgccccccgacatcatgtacgcgatcacagggatcaccaacaaagccgcaagcagcacgcccacgccaatcagcacctgtttcatatttcgtctccttccaggctgtaacgttgtcttccggtggcccctattccgcagcggcccccgccggggttgccccggagctcaggtcgatgtccaactcgagggtttcgccctcgcggactgtggtgacgcgggtttggtcccccacgcggtactttaccttcaactcctttaccacaccgtcgatgggatcgccggcaaggtcattgaatctactgacggtcagtttgtttccttggatgcgttgcttcaacggctcggtcacgtcgacccacttgtcctgcgcaccgtactctgcggagaggacttccaagggcgctccttccgggacaccacgcgaaatctggcccggcaaacggtccgggacgtcgtagtcgaggagttccacctcgtagggttcccggtgacggacgatgcgcacgacgatgtgattgtccagaacccaaaggtccgtgacatggccggcgcgcttcttgaaccacgtgtcggcgctggtgagttgcgtaaggacgaggtggttggtattgaacgccccggccgggactacaatctcctctttgcccttgttttcgacgcgcacacggtacgagggaaacgtgccttggccatgcggcccgttgccccaatcgcacatgatgaactccttgccctcgcctgccttcagcccgaacccgcgtatgagaacgttgataaccgcgtatgggtcgggccgcgagttcagggagaacagggcgccctcgtcgatagggaattccttatcgtcggtctcctcaccccaatgacggatctggaccgccttgttggcatggaagtcaatccttgcctggaacgcgggatagcggtccgatgccttgcgggtcgcggcgtagtgggcgggccggtgattctcatcacccacggccaaggctgtttcgttgaagaaggtcaaatgcgatagggcgctgacagccccgttttcctgctctttgacccacaaagacgagggctggtcgtactcgcggccgcggctccggtgaacatagcggccgtggaacacgagccttccgggaagttcgtctatggcgggaataggttccacaccatcggagaaacccatttccggcgccttcgcggcagtatccttcggtgcagcatccggctttgcaggcgtggcatcgtgcggggctttttcgtcgggcaacacgagttcgatcccttcgatgtcatccgggccttcgactcgaagcggcgggttcgccgcatccaccgtccgatacggaccgaaccccatattcaaggtacacagctcgaacgtgtaggtcccgggacaggcgccctcccgcatcgcaaagcgcccttcaacgtcgctgagagcgtcgggtaaccgctgtgacgcacgaccttcggtaatcttcatgcttacggcaacggtggggacggggcgaccctggctgtccacgacgcggcccgagatcgtcgcgcacctctggaccacgaagtccttgccatcaatctcgcccgtcacttggaatggatcagactcaatccgtccatatccgtccgcacttacgactaactgataggtccattcctcggaaggcgccaggccccagaggcaataggccccgtcctccgcggtcaccgtttcggacgtagtgaggcggcgactgggccgcagttggttacgatggctattcgaagcgtgcaggcgcgcacccttgacgggatcgcctgcttgatcgacgacgcggcccgacacgcacgcgccgcgttcgaaggtgaagtccacgtccgtcaactgctcgtccgggccaacagagacagtcttcgccaccaagggtccaatgtccgagggacgaggctctcgcacgacgccatccgggacggcgtaggccacggcgaattcccctgcaggcaaatgctgcagccggtaagtcccatcggatccggtgaccgcctctcgcaacaccgtaggcgggcggacgttcggcacccacagccggactgcgggtatcggctcgcccgtttcttgaaacgtcacttttcccgagattgttgcgccgtgcgagatctgcatgtcgaggccgacaacatcctggccgtcgagaaggttcagccggggatgctccagcgccgtgtagcccgcctcggcatcatagatgacgagttgatactgaaaaggacagagacgctcgaaaacaaagcgcccggattcatcggtgcgcgtagtgatgtcgggcatgtcgttgtccgcgggcgtgccgcgtaacatcacgggaatgccgcgagccggtttcccggaatccttgaaacagaccgtgccggaaacgcggacgccgtcatcgagaacgagcgtgagcggctcgccttccggcagtttacccaggagtacgccggggtcctgccgctcagcaaacgccgcgagggtcggcggtaacagaatttgcgatccccggccgtatggccatgtccatctcgggatcgcgaatcggcccttctggtctgttcttatctgcagggccagactcatgccgtaggaactccattcgcggatagaaagaaccagcgtgccaggaacgggttcacccgtcttgcttaaaacggttccttcgagcgggtcggggtcgaacggcgtgagggttaagtctcgcgacacgttttcgtctggcaaaagaggacttcccagcgtaaggggagcggccccgaacgcgtcggcggtgaccgcaaacacgttgtacgccccatcgggcaggccggtgatctcgtacgtcccgtcatcggccgtaaaggtgtccttgtaaccccactgccacgcttccccgcggaataccgccaccttgaccccggccgccggtgcgccgttttggtcgcggaccgttccgtgcaaccggtagggacccggctcgagttgaggcatgagatactcatacccttcaggaacaaccgtctccgcgccgcggcggttcgtccccgttgcgtcgtgttctgcttcgacggggcggagtcccgggaggacggccagtcccagcagtacgacggcgatggcgccggcaatggagagtctgggcgaacggcggagggtcacgtccatgatgcgcttcatgcggcgaccgagggggtggagcatctcggcggttccgacggcggggcggagcctgccgaaacctgcgatgctcgaggcggcgcggacaaggctttcgcagtaggcggtgttttccgcgaggcgcagatggaggatcaaatcgtcgcagcagtcctcgcgtgtccggcggagtgcgcgcataacgagccagaagacggggttgaaccaccacaagagcagaagcagattctcgaacacgataacccaaaggtcccaccgacggaggtgggcgagttcgtgggccaggatgctgccgagttggtccgtggagagttcgtccattatggaggcgggcatgaggaccttagggcggaacaaaccgaacgctatgggggacgttttgtcctcggaaatgaagaggtccacgcgctggctgaggtccaattccgcacagaggctcaggaactgttcgtacaatggtcctgcggtgaccatccgggcgcgtctcctcattgcccaaatccgccacgtccagccgaggatccaaaggcacgcgacaaacgcccccgccaggtgcagtgccaagattctcgtgtgccaggccatgtggtgctgaggcgccgccggcagcatcggcggcattggagtctgtggttgttctggaggcgcttgcgaagaaccaacgtacgaaggtggccgaggctcctcgacaggtacagcgctcacgtcgatgacagggacctgggaggactccttcggcagaggcgcgacggcctcccgcaccggtacctctgcaggtgtccaatgcgataggtcaatcgggacggccacaagcggcggtacggcgaacttcaccagtgcaaggatcaacaaggcgtagcgcagcgacgcggaccgattccgcagcagccatacgatgccgaggatgagcgcaccggccagcatcgactgccaggtggcatggaagacgtagggccagacgacctctgaaaacgtctcgattgaatgcagcaactgcatggtattcagttctccccggtgtgtttctcccgcaactttcgtagcagcctttcaagcgcatccagttcctcggacgtaggcgggcgcgactcgaagagcgacgccaccatggcaacgccactcccgccgaagacacgctcgtataggtcccgcatgattcgtctatacgtcggctcaggtggccgggtagggcaatacacgaatgcctttcccaccggccccttctctttcgacacgaggttcttgccttccaggcgtttgagcagcgagaccatcgacccgtgcgtcatgggccggtagccctgcatcgcctcgcggatctcgcgggctgtggccttcccctgttgccagagggaagccagcacttccaattccgcgcttggcagcttctccagcacaggtcgtccagccggtttgtcttgacgtttctctctcgacacatcctgctccttgctgttcaagcacgctagcacccgcgacggcgtcaaatatatacgattgcctattttgtgtcaaccaaaaatgcgggcgcctattttcccctgagtttccaccgtgtcttatgacttgaagcgctacgacaggatccgcatctggaagtcggccaagaatagttgcactccttggccgaccgggcaaggcccagataaacggacgcgttcgagcgtgtggacggtggtagggccgagttggcagtagacgcagtcgtaggtgcaggtcttgaacgggacaacgtcaatcccgagcgaacgcccaagccggcgcgatagcgcgggaccgaagacatatttgaacgcaagttcgctcacaaaagaacagtaccccggtgaatctggctgcgtcaaaccaggcagggacgggtagggactagcgcggcgcggatcctcatttagcgggaaggcagtttcaggatttcgtttttcaactcaataaccttgatggggcagcccggccaatcatttgcccagcaaacaatgaaatcgcattgattaggatcgtgtccgtgttgctcaaaattcgacgcttggcactcaaactctatgcgagccttagcccaaaggtttttcttagaatcaaacagatattttccctcgcaatccggaaaaccttgttgcaccgattcgacattaaaacccagttcccggctcaccatcgcaaagaggaatacaacgccttgttcattgatgggggcgtgtcgcaaacctcgaaaatcaatgggttcgccgtatagttgttccggtgtcttctttcttgtcgtaccgatggaaatcatacgttgagttccggagctctcctgtccttcgctgccttcttcgacgactcgttcgccttcaggggttgagacgatcatgtggctgttctccgatttccatttccggtaatgcgcaaggacatcggcccatttcccaaatcgtttgaagtagggctttgtagaatatttgcactgggcagaacaatcattgtagccgggctcgtgaccaattttcttttcaaggtcatacaacgctaagaaaagggcgcgctccgttagaacagggcctcggtttcttaaatgctcccctggagccactcgatcaaggcctgctgcctccaatgcatttccaatattcccaaatcgatacttcaaagtagacacagccattaccgaagcgatgtctttcttcgataggcttttctgcccaagccgttgcgcaaggttcttcagcatctcaataatttgtttttcagtgtttcgaggcatggagaacaccttgttcggacgctgcgcctataagagacgtttaaactcttccggtgttatttcgatatccttcaagatctttcgcagcaacccgcgccctatgtcttgtccagcatgaaatgggacggtagttctgcgcccatcgggatggacatagcggcggtgactggttgcccccaacggtcgaggctgaaagcccaaacgttccaatactgcgacgagttcttttaccctcagcatcggaaggtcgtgggccatgggtgcttacaccgctatctcaacggtctttatgccgatcacttccggatactgcgtttcaatctcgaggccgtcttcgcgcatctcgcgcacgcacatctcgatgacttcacggatattcgtcatcgcctcttcgaacgtcttgccctgagtgtggcaaccgcgcaaagcgggaacatcggcaacgtagtagccgtcttcatcttgctcgataatgacttgaaatcggtacaggcccatgctgcggctccttatcgtagacgtttccagttataagagtagcacatacggccccggccccgaaaggttgaggcgtcccgatggctgtgaaaaataaaacgggggccgttgcgggaacgggttcgagcaggcataatttaagggtgatttgattgaccgccggaattttggtaggttgcggtgggtgtctttttttcttttcagcggtgctacaaaacagcgcaggacatattatgaccgacacaagtggtaagaaccgaatgttgttgagcgggaatgaggcggtggcgcttgccgcccgggacgcgggggtcgctttggcttcggcatatcccggcacgccgtccacggagattctcgagagtctggcggctttgggcgggccggcccaatgggcgcccaatgagaaggtggcgtatgaagtggcgctgggcgcggcgttcggcggtgcgcgtgcgctggcttgcatgaaacacgtgggggtgaacgtagcggcggacccggtgttcacgtcgacctacacgggggtcagcgggggtctggtgctggtatcggcggacgacccggggatggcctcgagccagaacgagcaggacaaccggcggtacgcagtcgctgcgggcatgccgatgatcgagccgtcggactcgcaggaggcgtatgagttcctgttcgcggcgttcgagatttcggagcggtggaaacttccggtgatgctgcggatgacgacgcgtgtttgccattcgcagacggtggtgacgccgcgggcaaaccggctcgagccgctggcggcgcatttcgagcacgatatccggggccgcgtgatgatcccggggtttgcgcggcccgcacaccggcgcctgcgtgcgaagctcgaggaaatctacgcgtggggcgagacgatgccgctccaccggcggttcgacggcagcaagaagctgggcatcatcacggcgggcgtgtgttacgttcacgcgcgggaagcggcgccggccggcagcttcctgaagctgggcatgacgtacccgctgccgtacaccatgatcaaagagttcgcgaaaagcgtcgagcgctgcgtggttatcgaggagaacgacccgtatctggtggacgcgtgccgggcgattggggtggcgtgcgaaggcaaggctgagatgtaccggtttgatgagatgaacgtggaccgggtgagacggatcctggcgcatgatgaatcgcccgagccgatccggccgccggggaagccgccgcaactgtgcgtgggttgcccgcaccggtcggcgctgtcggtgttgaagaagctcgattgcatcatcatgggcgacatcggctgctatacgctgggggtcctgccgccgatcgacgcgatggattcgtgcgtgtgcatgggggcgagcatcggcaacgggctgggcttgcgacatgtgctgccgccggacgaagcgcggcgggtggtcagcgtgatcggggacagcacgttcgtgcacggcggcattacgggcctcgtcgagatggcgtacaatccgccgccgaccggccacgtggtcctcattctcgacaacgggaccaccgccatgacgggcttgcaggaccaccccggcaccggcgtcaggctcaacaaaaaagatacccacaagctgagctttgaagacttggcgcgatcgattggcatcaagaacgtgcacgtgtttacgggggtggacccggcgggttttgaggcgctggtcaaagagagcctggccagcgaggaactgacgctgattatcgcgcggcgcccgtgcctgctgtcggtgaaaaagcagaaagcccggactgcgtccgtgacggagaaagccaatgcctgaaaaaaacgaggtgaccaacgtggtgttcgccggcctgggcggccagggcattatcaaggcttccaacatgctggcggaagcggcgttccggtccgggcatgacgtgaagaaaagcgaaatccacgggatgagccagcgtggcgggtcggtgaccagcgacgtgcggtttggcaaagaagtgttcagcccgatggttccgtcgggcgaggcgcagttcatggtagcgctcgacagtacgcagatcgaggcggcccagcacgtgatgcggcccgacgggttgatttttaagcccgagatgttcctcaaggacggccagacgttcggcgacctggacaaagaccccgattcgcccgtgaaccgccgcaatctgaacgtggcgctgctgggcgtgctgagcacgcacctggacctcgaggagagcgtttggatcgaggccgtttatgccaacctgccggaaaaactccacgagcagaatgccgcggtgtttgcttacgggcgcgaggtggggcggaaggcataggcgcgggttacgcccttccccaggctgtctgagaagtcaagacaagggacataagggaccaaaaggacctaagatttctgctgatagtttgtcccgcgcgaccgggtggcggcggtggagggctttggcgggttagtttggtcgatgccatttgtggtgcgggcgtcccgcctgcacgtggcatcttggcggcgcgcgttttcatggccttgcctgctaaactgctgcccaaggttaccaaaaaaatcttatatgtgcaggcgagacgcccgcaccacaatacagcccggacttgcatgggctctttacataggtagcagcaatggaacgacagcccgagcctgaggcgatggatctggaggaagaggcggcggcctatgcggcggccgatttcgcggatgtgaatgaggcgtttgtcgagcggctggtggagcttgcggggccggtggatcgggcgctggcgctggatttggggacgggcccgggggatatcccgcttcggctttggcggcgccggggcggctggaagatcgtggcgggggatgtgtcgcacgcgatgctggagttggcgcgaagcgcaatcaagaaagccggcgcggccgattccctgtggccggtcgagcaagacgcgaaggcggcgccgtttaagtccagagcgttcgatgtggttttctcgaacagcatccttcaccatatcacggatacggggcggctgtggggggaagtcgggcgcgtaagccttccggggacgctgatttttctgcgcgatctcgcccggccgcggtcggcgcaggcggcctccgagatagtccggcgatacgcgggggcggaatcggccctgttgcaggaagaatattaccgctcgttgctgtcggcgtatacgccggacgaggtgggtgcgcaactggcttgtgcgggcctggatgggctgcgtgtcgagatggttacggaccggcacctggacgttttcggccgggttgacggataagagtggttttggttagagtcgtgtaagtgtgggcggttttaaagtcgagttggacacgaatttgttgggtttgggcgaataggacctatacgacttataggacctataattggtttgtttgttgattgttttttggctatattcggcttgagagccaaaccccgggagggacgatgtgaacgcattcaggcatgacgctggaagttcgtttaatccggtgagtgcaccggattatctgccggtggtccagttgcgggcgctgcaattgcaccggcttaagacgatcgtgaagcgggcgtacgaccaccaggcgctgttccgcgaacggctggacgccaagggtgtgaaaccacaggacctacagaagctcgaagacatccacaacctcccgttcacggtgaaaacggacctgcgcgacacctatccgttcggcctgttcgccagccccatgagcgagattgtgcggctgcacgcatccagcgggacaaccggcaaaccgatcgtcgtcgcctacacccaggacgacatcgacgtgtggtcgagcgtgatggtacgttcgtttgcggcgtgcgggcttgggcagggcgacatcatccagaacgcatacggctacgggctttttacgggcggtttgggggcgcattacggggccgaggcgctcggggcgactgtgattccgatctcgggcggcaactcggatcgtcagatcatgatcatgcaggatttcggcgtgaccgccatctgctgcaccccgagttatttcctccacctgatcgagcggtctcgggagatgggtattgacatgcggaaactgcccatcaaagcgggtgtgttcggcgcggaaccgtggacccaggcgatgcgggaacggatcgagcccgaagccgacatcaaggcctacgacatctacggcctgtcggaaatcatcggtccgggcgtcgccatggaatgccaggagcaggcggggccgcacctgtttgaagaccatttctattgcgagatcatcgatccggagacgtgcgagccgctgccggacggccaggaaggcgagctggtgatcacgacgctgagcaagctggccatgccgatgatccgataccggacacgcgacatcacctcgctgatgcccgagccgtgcgagtgcggcaggaccatccgcaggatgcgccgtatcggaaggcgcagcgacgacatgttcatcatccgcggcgtgaatgtgttcccgtcgcaggttgaatcggccctgctcaaagtggaaggcaccctgccccattatcagatcattctggagcgggaaaaagggctcgacaacatggaggtccaggtcgaggttaccgccgacgtgttcggcgacacgatcggcgccatggaaactgtccgcaaaaagttgtcggatgaaatagcccacattttgggcattcgagtgaaactgagcctggtccagcctcacacgatcgagcgaagccaggggaaagccaaacgcgtgattgaccggcgcaaaatgtaagccgttggcaaagaggaagggatttcggcaatgaaaatacaccaattgtcgttgtttttggagaacaagccggggcggctgagcgagccgtgccgagtcctggcggatgcgggcatcaacattctgacgttgtcgctggccgacacccagcagttcggcatcatgcggctgatcgtccgcgactggatgaaagcgaaagaggtgtttgagaaggccgggttcgtggtgaacgtgacggaggttgtggctaccgaagtggccgacaaacccggcggcctcgccaacgtcctggccatcatggaaggcgggggcgtcaacatcgaatacatgtacgccttcaccgtccgtagcggggataaagcggtgctggtgttccggttcgacaacccggataccgcgatcgaactgctcaaggccaagaatatcaatgttgtgggcggcgtcgagctttacgaacgggccgaacggtagccgggatcaggcggtgcggaacacaggcatagtaggtgcgtaatgccggattttgccttggaaaacggggtctggtcccctgaagagacgcttgatcggccgcagttgcaggatctgcaactcgatcggctcagggacgtggtacggcgagtcggcagcgtccccttttaccgggaatcgcttgcgcgcgaaaagatctcggcggagtatcttcgttcgctggacgacctgcggcggattccgtttacgatcaaagaagacctccgccggcaatacccgctggggtttctggcggtgccgcgcgagcaggtagcccgattccacggctcgtccgggaccaccggcaagcccacgttcgtcgcgtatacgcgcgaagacctcgatacgtgggccaacctctgcgcccggtttctctacgcgggcgggctgcggtcgcaccacaccgtgcatattgcatttggctacgggcttttcacgggcgggtttggcctccactacggggtggaaaaagtgggggcggcggttttgccggtcgcttcaggcaatacgccgcgtcaggtgatgctgctcgaggacatggaagcggacgcgctggtctgtacgcccagctacgccctcaacattgcggaagcggccagggcccagggcgttgacccgcgcaagtttaacctcaagtacgcccatttcggcggcgagatgtggaccgaagacatgcgccgcaaaatcgaagatgagcttgatgtctatgcgtttaacaactacgggttaagcgaagttatcgggccgggcgtcagcggcgagtgctacaaacgcgacggcatgcacatccaggaagatcacttcatcgttgagtgcgttgaccccaccacgctcgagcctgtggcggatggcgagtacggggagttggtttttacgacgttgaccaaacaggctatgcccattttgcgttaccgcacccgcgacattgccgccctggacagccagccgtgcccctgcgggcggacgaccgtccggatgagccgagtcgccggccggacggacgacatgctgataatccggggcgtcaacgtgtttccgtcgcaaatcgaggaggcgctgctacaggtggaaggtattgcgccgcactatgttatagaaattgaccgtccgggtgcgctcgaccaaatgaccgttaaagtcgaggtccgccccgagatgttttcagacaaaatgagccagatgcaggccctgcgggaccgtatcgaccggaaaatccaggccatcacgaatatccgcgctacggttgaacttgtgcccccacagacgctcgaacgatcggcaggcaaggccaggagagttattgataatcgcaacctgcggatccagtagggacccgtggcaagagtctcgattacgtccctacgcataccggatgcgatatggggcccgacatatttggcgcggcttagtacgtctattcgtaaatacggtgacgtatggagtgtggacgctcttagcgcgtttgccaccgctttttatagtgcaaggctttcctcgcgaacaatgtcgcacttgtcaggcaaggcctccctgccgaaaaagcggcagcaagctgccgcgctccacacagcgccatgccttgtgggtattctgaagtccatttcattagcccgaagttccagaggctggtttcatttcttgtagtgtgtgagggggcgtaaacattggtttgttgcatggttataggcgtgttgttgtgtgaacaatgcgcccatgcaactagaagctatcccaaaaccgaataaaagcgctcctcccataccgatgtcgggaaaaataccggggggattcccacgtcgcgctggactcaggcttttgaattaagaatagaggccatgtgccagcgctcctcggaatgacacgttcgggcgccttttggttgcggctatgccgcgccgtgctctttgcgttctttgtggttttcaatttccgttacagcacgccgtacttggactgccgcacaaactctgcggccgtgcgctctgtcgaaggctggtaaccgggtagaggctttatttgcgtgtggtacgcgtcgaggagccaggccggctgcgggaagtactctttttccaactcggccggcggcacgatcccgttgttggccccgacaacgcatacaggcgcgtcaaggtggtcgaacgcgatctgcgcgatctgccccgcgatggtgtggagataacttccgcgttcacaggcgtcgctggccaggatgagcttggcagtcttcttgaccgactcgaacaacacctcatggtcaaacggaagcggcgcaccaacaaaccgcttaaggccaccgagatcggcctgaaagtcggcaaggttctcaaccacttcaaggccggcaaacacttcgtgctcgacatacaagacggccatttcgcgttcgcccgcaacgccaaacgcatccagcacgaagagcggctcgacggcatctacattatccgcacgagcgagtcgaaacaagagctcagcgccgaagacaccgttcgtgcgtacaagagcctggggcaagtcgagcaggcgttccggtgcatcaagcgcctcgatatccgcatccggcccatccaccaccgcaccgtggaccacgtgaaagcccacgtctttctctgcatgctggcttactacgtcgaatgggagttgcgcaggaaactcgcgcccgttctgttccaagacgaagaacttcacgccgctcgctggacccgcgaccccgtcgccaagcctcagcccggcgaggccgtacaacgggaaaagcgaaccaagcagactcaagacgggtggcccgtccacagcttacagaccctgatggatgcactcgccacgcgctgcaaaaacatctgccgagtcggccaagggaaaaacgccgcacggtttaccacattcacggaacccaccgatttccagcgccacatcttcgacctgctcggactcaagtgtggatagaaacgcctgttcccagtaaacctgcatttgaatacaaggttatttcccatgcaggataaaacgtgcattcgatctggctctggaacttcagtttaagtcttacggggcggcggatatgccgtcgttttccctgctcaaccggcgggcagcgtgaagtagaaggtagcgcctacgccgggtgtggattcggcccagatacggccgccgtgctgttcgacggcccgtttgcagatggccaacccgattccggtgcccggatactccccgcgcccgtgcaggcgctgaaacacctggaagattctctcggcgtactcctgttggaatccgatcccgttgtcttttacccaaacctgccactcgttgccgtcgatccgggatccgatctggatgtccaaggggcgttcggcgcggaatttgaggctgtttccaatcaagttttggaagacttgggtgaggagtgtggagttgccgggaacggagggcaattcgccgagagtgatttttgcgccggtttcgctgattcgggcggccagattgatcatggcggtccgtgcggccttctcgaggctcaccttggaggcgaccacgccgcttcgtccaaccctcgagtaatcgagcaggccctggatgagcaattgcatccgtaaggcggcatccgtgacaaaggcaaagtactcgccggcggtggcgtcgaacaagggggcataatcccgccgcaggagttggacaaacccgccgatctggcgcaacggctcctgcagatcgtgcgacgcgacataggcaaactgttcgaggtcctcgttggaccgcatcaggacggcttcgttttggcggagggcatcctcggcgcgtttacgttccgcgatctcggcggccagttggatgttcctgttttccacctcggcggtgcgctggcgaacctcctgttcgagatgttcctggtagtgacggacttcgtcttccgacctcttgcgttcggtgatgtcgatgcccatttccagaataagaacagcgcccgtggtgtcggtgaaaggaaagtcaaagacctggtaggtgcgtgcatcgggcccgacccattcccagtcatggggcgccatcgtctggaggacgccataggcttcgcagatttcgcacggctcgctgcgcccaaacaggtgttcgtaacagcgcttttcggactgcccgaaacgctctcggaatacgcggttcgcgaaactgacccggtagtcgggagtcaacaggacaacgtaaaccggcagcgtctccagaacgtcgtagaataattgccgctcggccagcacggctccttccgcgcgccggcgctcggccatttcccgctcgagcgtgacgttggccagttcgagttcagccgttcgttcgctgacgcgggtttcgaggttttcattggcttcgcgcaacgcctctgccgcctgcttgcgttcggtgacgtcttggactgtcccaaacccccctaacaactcgccttctggaccgacctcgagttcggcccgctcccggacccacttcacggccccgccgaccacaatccggtgctcgatatcgtacgctgtttccccccggatggctgccatccagttttcgtcgacgtactgccgatcatcggggtgtacggcatccaggaacgtctcataggtcaagggggtgcccgtggcaatgccgaacatcctgtacgtctcgtccgaccacgacaatcggttgtgttggacgttgaggcgccaactgcctgtatgggcaacagcctgcgcgtgcttgaggtcggtttggctttcgcggagggctttttcggcttcctgacgttcggtgatgtcgcggatgcgaatcccggcaattatttcgccgtgcgaactgacttccacggggaatatcgacccgtccttgcgcttgtggaaggtctcgaagaggatacccgtggcaccggctttcgccatttgcgcttcgacggcatcgcgatcgcgatcgctccacaggtcgcgccccatcatttcgagcagttcctcgcgcgaatagccgtaggcgcggatggcggcggcgttggcctcgaggatgcggccgtcgtcccgccgcataaatagaataatgtcacggctgttcgccgccagcagttcgtatcgctgcaagacttcctcagcctgcttgcgcctggttacatccaggaagacgaccgcgacctgccgcggcgcagggctgtacgcataaacctcgtaccagcggcccaaaggcgcggcgtaattctcaaaacgggcgggcgtgccggtgagtgccacctgcccaaaatgctccacccagtacggctcgaccgttggcagcacttccttaacgcggcgccctatcacatcttcgcgcttcagccccgtgaggacttcgaatgccgggttgatatcgagaaaaacatagtcgcagggcttgccttgcgcatccgtaacgatttcgtgcagcgcaaacccttccgtcatcctgtcaaacaacgcgcggtagcggtaattgtcgtcatgcaagaccacttcttgaccccctctggtctttgcacgcttccttggttcgtggtgtgctgtaccggtcatgactttttgttccgcaagaaaaagcggggcctctccgtaaccgccgtttcccgtaacaggatgaacccaagcccaaaaactatagcagatcacgcctcacccgccaaataggcgtgccacatcattccacagccggatagagcgagtggtaggcggcgtaggcgcccaggacggttttgacgtagttgcgggtctcgccgaacgggatgttttcgacgaacgtctcgaggtcggctttcggccaccttttgagccatttcgagcagtttccggggccggcgttgtacgacgccagggcgtgcacgaggttgccgctcgagcgctcgaccatccgcaacaggtaaccaatcccgagccggaacgagttgtcggggttttcgaggttggcgatgcaggccgcgtcaatcgagggatcaaccttggccagccactgggcggtgggcggcatgacctgcatgatgccgcgggcgccggcgtgggaggtcagggcgggccggaacgtgctttcctgccgggcaatggccagcacgaggtacgggtcgattccggtgccgcggcatttggcccgcacctgttgccagtacgaccggggatactcgatccgcatgcgcgcgggtgtccgcttgccgtcggccaccccccagttgtacgcctcggcgaaatccatcgccgccttggcatacccggcttcacacatgacccggtaaacgggggcgtcttcggccccgttgccgagccgcttgccgaggtacaacgcttcccactcgccctcttcgagcccgttcttgccaaaaaacatcagccgctcgaactgcgggtccatggcggggtcaggaacgtttacacgttcttccgcggcgatttccagcggcgctatgtacgagccggtgccgtccacccggaggttttggccattggatgggctgtcgtcgtcgcgcgcgcgcgccttggccagacggtatgcggcgcaatgggcgtaatagttgcccggcccgaattgggctgcgttctgaaaggctttagcggcgtcttttttatgccccgcggcctcgtggtgttttcccagccaataccatgcgttggcggcatggcgcccctggggatagcggccgaccagttgttcgagcgagtggacgcagcccttgaggtcgccggttttcttctggagtccggcggcggcgagcagggcgaaatcggcccgcgcatgatcgggacaatgtttggccaggcgcaggtactgctcgacggcgctcttgtctttttcgtctcgggcaaaacggcttgccagccaatacagcgcatccccggcctgatccgatttttcgaaatgcttgaggagcaggtcgcacgccaacgccgcgacctccggcttgccaacgctcgaatggctgcgggcgacgcaggccagaaccaggcgcatccagcgcgcgcgcgcgtcgctgtcgccgtgctcgttgacgagtttctggaacgcttcgcgctgcgcgtccgtcagggcccgtttgttcgacgtcagcaggggcgcgagcacgttaatgttcaccgggctaccgccgccaaccgcctcgggcaggagccgcaacgccagtttccacgcatcggtgcattcggctgacttgatcagcccatcgagcgccacaaaccggtcggccatatcaggcgacttctcgaggtaacgcgccgcatcgatgcgccgctgacggagcacggtggttgccacgttatcgcggaagtaggcataggcccgctgttcaaattccggcacgcggacgtacacctccgccgccgcccaatcatactgatcgacgatccacgttttcgggctccacgtcttcggggccgccgtcttcggcgccgccgtcttcggcgcaaagtcgagcgattcggcataaagggccgcggccgcgggaaactgcgagtccagcgccagcaggcccgccagatcgagtttcgctggaagaacccacggcccctccggcacctcggcgagcacgctgcgtaacgcctgcaccgcctgtgtgcggctgccggtcgcgcccaggcacctggccgcactgatccgggcgtagggcgccagcaacggatccgcggatgcactggccgtataggcgccgatggcttctttgaactttccggtgcgttcagcattatgtccggcgaggtacgaatccgcccccggcaacccacccaacaacacaacgacagcaaaaactgcgttaaccaaaaccgattaccttcccgtcctccggctaatcttcaatccgcaatcgacaatcagtactgtcccgttaaaaactgctgttgttgctgtaaagcatattttaacaaggtcttacaaatgagtttgggcgatatcgatttcaattcggcgcagtctagaggccatgattcttccacc

SEQ ID NO: 534 - DNA, 63027 bp, Artificial Sequence
  Synthetic Oligonucleotide
gtggggattactgaagacgcgatcatcgatctggcgactgatcggttcatccccacgcgcgtggggattaccacaggctgcggctatcgaacgcgaacgtgaacggttcatccccacgcgcgtggggattactcatttaaacgtatcgtctccatcccatcctccggttcatccccacgcgcgtggggattactacatcttcgggcttgagcatcccgccgctactggttcatccccacgcgcgtggggattacctccgtactcccgttgtcacgatctgcatcgccggttcatccccacgcgcgtggggattacgaaggaggcgggcgagcgcataacaaccaggacggttcatccccacgcgcgtggggattacacttggtatttattggttattttggctttgtaatgagctgaagtccatcccaactgaggacgtgtctcgagggatcgccccagaagtcgattttgaacccctgttcgttatttgcggtccaaatgaggatagatcctccttcgccggttttccggcaaaccttttcccatagtttttctcttaccatggcggagacggtgccgacaaacacgccggattttggttcgagcagccatcgagtgagttcaccgcggagcgaaggcgatacgcgttcgagcaccatgacgaccattagggttcatcctctgtgtgttcgtcgggttcggcataggacacgccgccggccacttcgccggcgtcagggtcccacaggcctccgggcgtgccgggatccgagtcgaaatcggtctcggcttcgtcgtcatcggccggcttcacgtccagcgcgtactcgaggtccttcacaacgcgttcgaggaggcgctgcgccgcaaaagcatcgcggcacaggattcggacctctcgctcgatgtttcgggccgagcgggcggcggtttcgaacgcggcgggggcggtggtcgtggccttgtataggtcggcgatatcgtagacaaacgacaactgtttgccggtgtggatgaacccgagcgcgggcgaatagcctgcgccgactatggcggcgtggcagattccgtagaggcaggaattggcggtggagagagcgcggttgacgggatcggcgtcgcgccagttctggcggtcgtacgcccggcccgtccacggtatgccgaattggcgggacaggctcgagtaggcttcgcgcacgcgcacgccttccatgccgcggatctgttggagcgtcagactcgaatcgagctttcccggaaagcgcatctcgtacaggcggcgaaccacggcgaggcgcgtggagcggcggctcgagaggcgcgcctggagcagaaggttctgggagtttcgcgtggttccgtgccccgcggcatagaaccggaccccctgctcgccgcaccacacgacgaggcagccgttgtcggcgagggcgaggacggcggcgtgtgtgatggcggtgccgggccccagcatcaacagggcgagcgtggcgcacggcaccggggtgagtccctgggcgtcgtgaatggcgatggctttgtcttcctgatcgatccgggcgtgctcgacataaaggtagctgagccggtcgcgcaccttggcgaggtcgtgcaagtcacgcgtcagcattcgccacgcctcgattgtggtgcgggcgtcccgcctgcacgaaccacagacagcagcccgaacccaaaccctttcgccgagcccagcccgctctcgaccgatagcatgaaagccggcccgtccgccaccgtcaagtctccctcgagcagcgcggaacgaaaccgcagccggttctcggccgttcccggcttgtgtcccgccacccagccgaggtgaaccacgttgaattcgttctggagtgcaaacccggcgtgttgggccttcgcggcaaaccattggcggattgcccggtccggggtttcgccttgatcgccgtcccaggtcacggccacgcgtttcgactgagatttggggcggccgaaggtgtcgacaccctcgtgcggcgtgcacagatctgtaccatcgcgcgccgtcttggtcttcttgcttaaattcattctgatgcgaaaccgaaggtggtcgccgggcgcgaaagacggggcatattcgcgaacctccggcggcgccgccagaagcatgcccgcattgtaaaatgcgctatcccagtccggggccaattgagactgaacaagaacgatcgcgcgcggcgagttctcctcgatctggttgtcgatgcggaacagaaaaccggacgggcttccgtgcgacctcgatggaaacgccatcgacagccgctggtggacgtggtagatgtcgcgcagccaccgccggcccggccgctcccgatccggattgtcgccggtgttgatcatcagactcgatagatacatcactcgacctcctcggggctaagccgacgccgccgcgtctcgagcgaccggaacttgacgatctcgtcgcgtttctcgataatccgctcccgccatcgagcatcctccgggtcgatgcggtccagccccatgttcagcccatactcgagcatggtgacggcgtcgtggcacaagcggcaaagggaacgcagctcgccgatccgctcatcgccgccggcgtggcggtacgtgacgtgctgcacggtcgttgcacgcgatctgcagaacacgcaaagatgcgagtccttctcgagccgctgcgcgcgcatcttccggtactcggaattgccataatctgcccgcgggcgttgtggcgagggcacctggcgctgcaacgccgattccgccaccgggacctgccccccggcgcccacgcggaactgcccgcgcacaacaaagcgcgcaccatgcgacggcggctcgaacgtcaacggcacgtcgtaccacacctcggcgtcatccggcgcctccggctggtcgggcgacggaaaccaatccagcagatactcgagtgtttccgggggattatccctttcaaagcgccgctgccacggaaccgacacaagcgccgaaatcaggtccggatgcgccgccggcgcctcctcgagcacccgccgcgacggcggacagcatttcctgcccaaatagagcgtccagcgcggcttttcgatcacctgccggagttctttgatcagggccggattcccctgaagcaccaccaggaaagtggcgtcgcaaagatactcccgccgcgtgagcattgcgccgggttttgtcttcccctcggcttcggcgatgcgcatgtccatccccgcgcctaccgtgtgatagtcccaccaccggtatccgggcgcatccacccggacgcccatacgcagttcggccagttgaggcaaccggcattcctgcgcttccgcccgcgtcacgcccaaagccgcacacaacagtccgatcacgcccgatttagtgggcccttcagccgtgcgccgtacaacgaacttcgactcctgattaccccacgcctgcagcggtccttcaaaccgaagaaacagcgtgttggccgtcatggcgccacctgttggcttgtcactttcttctgaaccgaattccaatcaaagcccaagccgccgatgacggccggaatcagttgatcgagcgatttgaggtttacctcggccaccggaatcgttttcttggcttcgatgacgcaaagcggataacgcagattcggcgagaaccagaaacgcttctggggcttgccgtaccccgtgtccaagtcgcgaacataatgcgccaactgcgccacactttgtgaaatgacgtcaggattgcccttgcccgacacgggagcggcgaaggcattcgcatagctcgtcggggtgtcggcgaattggatcagcaggccatcgggcggattgtgcgccgcaaaactattctgtttgcccgaaggatttgccagcgctgctccacggataaaagcccctaccgtatgtgcggcaagttctttctggccattgaggttttccacaagcttgtcccaattgatcgagaagtacttgtagaaacatgccgaggcaaacatggattcatccacgtagcccgcccctgcatcttcgcctggaatgtcatcggcggccacataatagtccacctcgggcagcgcctcgtgcgttgaaatcgcgtgagcaacctgaagggcggcctcgacggtcttgtcaagctccttccaaaggtcgtttgaagatttgtccggctccagcatccgtccggatagtgccatatcggggactgccacatgcttactgatcaacgcgcagaagtccgcggccagttgtttctcagtccttccgtccccgttttggagtagtgcggccatttcctcgatggcttggcggctcgtataaacgagcatcttgcttttttcgctatctgctgcgtcgtccgtttcttccttcttcgccttcttgggcttgaaaccgcatagttcgagtatcttctcggcgcgcttctggacgtctggcttcccttgaaccttctcggcgatcagtctggccaactggcgcgtgcgaattcccccgcaaagcgcttggaactccctgctcatccggatgcttcgtttgatgcattgacttgagatgcgcgagcgcagagcaccgccaaaatagcacgtcttcggcgcacccaggtcgtcccgatttaggtttgacggactatggttttgtattgcgtgaatctcgatcagcatgatggacccctttcatccttaatcttcggtttgaaggaattgttccgcccatcgcaggtggacggattcgtattcccacacggagagttcatccgtgagtcttacccaatcgagtgaaagtcctctcgaggcaacctgcccgatcgcccaacgaagttccgcctcgatcttgtcgagcggcagcatcaatatgttgtcgagcttccgcccaaaccgatttctaccgttctcatcggtcgggaggcaccggcggagttgacgcgcaagcgtggcctcgcgggcctggggaattgggtgggcagcgtagagtttagctataagccacgccacttcccggcgcggcgcccgctggttcttcgcccgtaacggccaccaaagccccgaaaagaggtcaaacccatccacggattcatccaagccgtgttgggaataagtccgcagcagaccaagatcccctgacttgaggccactcaatacgcgaatgaattcttccgtcgcggtcatttatcccgtccttttccccgccccttcttcgcggccttgggtgtcatgtttggcatggcattggcaatgcgcttgcgtattctggctgcttggatcgtaaaccctggggacagcgattgtgcggctaagcgcatcatcgggcggaacgccttggccgcttcctgccatgcggtttcgccgcccgctatcaacgatccacttttctccgacacctgcttttcaacgtgcggtccaatggacgcaagcatagaggtaatctctcgatgctcacgccgctcgcccttttcgttgtccgatcccaggtttttggcgaaaccccattttcccttgcgccattgttccaagttgttgaggcattcgtcccgctgttcttgtggcgcctggtcgatatcgcaagggatctggcattcgacagcctcaagatacttgtcgttctggacggtagaaaagcccactatccagcaaggagatgcgtttcctgtttgcccctttcgaagcaggccggcaaggatattggcccactgccccgccgcggcgtctggtgcgccaagagcgtcccgcgcatgcaggctgctgatttcgcccttggcggacatcccgtagatgacatgcgggtcgcaccacgccctgaccggttctccttcttccgtcttggtgctgccaattggggcaaatacagtacgcaggattagcctctcgctgcgcccgcatgagatgcaggtttctgcccgttccgcaggagagtctaaccacactcgccgcggcagccaggtcaaacctgtgagcagtggcacctcgcctatgccaggcagttggacgtccggtttttcccatgcgggcgttcctaacgggccgaccggccgccaggaaagccgtacagtggccgcaagtgaaccgcgcagcggtatgacgtaaaggggaggctttgagttgattccaggcggtttaccacgcccaccggaagtcgcaaatgctggaagccttagcaagcccattgcacaacatgcgcgacacaaaccgtttacttcgtccgttgaatgcctaaaatgccacgcattcgtaccggtcggcacctcatggacaaggtagttggcggtcagccgtttatcttcgcccacaggtttcttgtactgataaaatcgccgggtctctccaaacaagtcaaagcattctttattctgttcgagtttcaagaaccaatccggagggaatggttcgtaaggcgcggcctgtgggccgttcgccgggtttcccttgcaccagtagagcagggcgaggagaaagcggagtatggcgaggcggtccatgggattggatgcggcgacttggcggattctgtgtgcgtcttggaatgctttgaggataccgacgcgtttgaaatcgccattgtgatagagaacgggaatccagttttgggaaagcaagttgtacgagttcatagacagcccctttttgcgcgccctgcagtgagtctacgcgggggttctgtttaaatcaagtagattgaggggttatctaagtgagcgattttgatgtggaagttggggtcagcggcggtattgggaggctcgatgaattgtctcgccaagccggaagggctgaatgggccagggtgagtatacgtgagcggagattctcctcaaaccacagctgggccgcgctgcctttatatatgacgacataatttttgctgaatgtgggtccggaattattccggacctacgcttaggcatacattgctcagaaagggctctggctgccgccgctgccgcgtgataatgtagaaactcgagggcccggaattattccggacctacgcttaggcatacgttgctcagaaaggggtctggctgccgccgctgccgcgtgataatgtagaaactcgagggcccggaattattccggacctacaggaaggtgggaaaattcggtcgtgctgtatagaatcgttatgtgctgatattgttgactgtctggcagggcggccgacgaagtcggctgcgcggaaagctgattgttgacgaggtacagcctatcgagtgcggtgaggcggccgatctccgggggaagcgtggaaagctgatttccgctgaggttcagcccctgaagctgttcgacacccggcgcgtcgagaagcgtgcggaggtcgctgtccttcacgccgcagtccataaggctcagagttacccagccgcttcttctggctttggcgacccgcttcacgattagggcggttgaatatgtagccacagaaatccgctccgttccgttttccggcgccgggtatcggccgccggcccctaaacatccccgtttagcatagtggcttgaggaagctagtttagtacccggtggagaaaaaggcaacaacgcatgatacgggtggggagggacaagctgtcgaacccctgccggggtacttcgttggcgcgacttgtgcccagggtagcgcccggccctggaccggtgtggagtggtcgccggggtcttcgttggatgctcgtggtaggtgacgggtacagggccattggtacgggccggtcgcaaccctgggctgacaattgacccacccctccggggtggaagagtgaagcggcaggagttgttgcaccccttcagggtgcactatctttacgcattcctttcctggggcgttgcctcaggctattatgtgttacggctccggcgtaacttgcgctttcagcgtattcatcattcatcagttgtcatatgctgccgcacggtgaacttcgcacttggccctgtaggggcggggggagttgttgcaccgcttcagggtgctttttggttgtgcattcatttcctggggcgttgccccaggctaatatgtgttacgcctccggcgtaacttgcgctttcagcgtattcatcattcatcagttgtcatatgctgccgcacggtcaagttcgcacttggccctgtaggggcggggggagttgttgcaccccttcagggtgctttttggttgtgtattcatttcctggggcgttgccccaggctaatatgtgttacgccttcagcgtaacttacgcctccggcgtaacttgcgctttcagcgtattcatcattcatcagttgtcatatgctgccgcacggtcaagttcgcacttcgcccggtcaacttcgcactcagaactttgaacttcgcgcttaccaggggaagtttttcatgctggggagggtgaagatttcgaccatcaggggtagcggggggcggatggtgtagtcggggtcgttgtatggtgcgttgggtgcggttttttcttgggcgaggaccatgcatcgggttgcgtcgatgatgtggtcgtttccttttgagtaggtgacggcgccgttgttgagtgagtaggtttgtgtgaggaactggtcgggtatttcggggtcggtggcggggaagacgatctcgcgccgttgtagcgccttgttgatgagcgaggtcatgagttcttttgttcgttttttcgtttgggcgccgttggggagttcgaatggtgtgactccgccgaaatcgaagccgaagaggcgtccgtcgaacgcgcgtggcttgtatttgtcgagcgacatgagttcctggatgacggcgagtccgttgccgccgttgtcgatgccgattgctgcgggcgcgagtagggagtcgatgacggcgagacattgggcgatgtgggggtaagcgactttctccatgtggacgcgcaaaacaagccttaaactgcagtctggagtctggagtctggagtctggaggagaacaatcaggagattttttgggggtgtcttggcggaagactaggatttcggttgggtcgtttgtgtatccgaggtctgcgccgaggtagtattgggcggagtcgggccagatgttgagtagcgtctcgaaccgttgttcggtttcgagttcggattggcagtcttcgagttcggcgttggtgatgacgattttgcggtactcgggcacgtcttggagcgcgagtgcgaggtgttcggggtggaacgcgccgtagcttggcgcgccgtgttcgccggcgacttcgtgctgccagccggcggttgcgcggccgccgtagaattcgagcaggtcggcttcgtggttgggtgtccagttggggttgagccaggacggccatcggaacacgcgccagcggggcgagtttgtgaggcggtagtatgtggcgttgcgcatgccgttgggggtcgagtatacgcggagtttgccgccggcttttaggcattggcgcagcgcgcgccatgcgtcttcgctgagccacgcgccttcgtcgacccagacgcggtcgacgtggagggagcggaacgcttcgccgtacgtgcccgcgggccggaagtagaggacgctgccgttggtgaactcgaggcgcgggtagggaaaccgctgcatcttgcggtggccgttgcggccgcgggcgatgcaggcttcgagccgcgggttgttttcgagctggaactcgatttcctcccaaatggcgagcaactggcccgcgagcgccgccgctaccagccccgatcctttccgggtggtcatcgcataatggagcgccagcgtggtcaggttggccgtcttgccgacgtcgcggccgtcgagatggacgatgttgtcgtcggctgcgcggagatcctcgatttggtgccgccaataagcgcgggccgacccgtcgcggttcgccagccatttctggccccaggcgacggggtcgcacttgtcgagcggtgaggcgggcgtccggccctcggcgatctcgcgggcgtcggcttcggcggcggccacacgcgtcccgtactcctcatccagtttcgccttccgctccgcccaacgacctttcaacccatcgtaatccagaagctttcgcaccatcgccgaagtccaaagcccttccccccggttcggcactccatcctccttcaacttccgcatgatcgccgactggctcagcccggcttcctccagttccttcgccagcacgatcgccccctgttccaccgggttttcaacaagacggcgcgtagccttctcaaacatccaccctaccggtatattcatcatcccagctttcggcttgtaactgggtttccgagtcttctttacactccccttttccatcgccttttccctttccccgctgtccttctatccttcatcctttcctccagcctgctcttctgccccttctgcttcaaaaaatctgcaatccccaatccgcaatctgcaatccgcaatccattcatccttcgtcccctaccctttgtccgtcatcctcgcaccattcttaattcttaattcttaattgatccttgatcaactccctctatttcatatgtgcatttggtgctctctttttgccattttggcatggttcgagaaacgtaagtggttgaacgagcgcgagataaaaagtttttctgacaccacccctgccagaaaaccggaaacctcttataggactctggcctacggttaagttagcagctataacggcggactttttgactgacaatttcggacttcgttcgaggctgctataatctcgatcatgcgcccgggattggagccttttgtagactacctcgaggccgagaaaggttattcgccgcacacgttgcgtgcgtacctttccgacctggaccagttctgcgactacgtcgcacacgggcccgcggcgttcgagcgggatgaaggggagccgcacccgccggcgtcgctcgacgtgcttggccgtgcggttcggaatgacgtgcgggggtacctggcgcatgtccagacgcgcggcggcagcgcgcgtacgtccgcgcggaagctggcgtcgatccgggccgtgtacaagttctgcgtccggtcgggcttgctcgaggacaacccggcgcagacggtccggtcgcccaaactgggccgcaacctgcccgaggcgctcacaatccccgaagtcacggcgcttgtcgaggcgccggacacgtcccagccgctcggcgtccgggatagggcgttgctggaggtcctgtacagcagcggcatccgtgccgcggaactggccgcgcttaacatcgagagtctcgacctcgacacgggcctgatgcgcgtgctcggcaaacgccgcaaagagcggctcggccaactcggccaatacgccgtcctggcgttgcgcgactacctccgggtgcggccacagttgggtgagccgcagcacgaccggctgttcgtcaaccaccgcggcgggccgctcacgacgcggagcgtccagcggatcgtcgagaaatatgtccgccaaatcctgcctgggcggcgggaaatctcgccgcacacgctccgccacacgttcgccacgcacatgctcaacgcgggcgccgacctccgggtcgtccaggaactcctcgggcacgaaagcctctcgagcacccagatctacacccacgtcagcatcgaccggctgaaacaggtctaccgggacagccatccgcacgcctgaatgggggagttggccgagagccaacctattgatacacctggggttacaagatatccatctatcgaggtggttagaaatcctgttgtttagttgacgtgggagtgtgtgtccgctacaatgtttcgcacacaaaatatctttacgcaaaggactcttcatggttaatcccaatgcgttagggctcaccgagcggattctggtggcgttacgcagagttatgcgcgcggtagaccttcactcccgtcgtcttgtgcagactcacagtcttacgagtccgcagctcatattgttgcgcgagattgaacggaacggtgaaatcgcgataggcgagcttgcgcgccgcatcagcatcggcaacgccacggcgacgggcatagtcgaccggctcgagcagcgggatctggttcggcggggccgcaacgggcgtgaccggcgcaacgtgctggtgacgtgcacggacggcgcgaggcaggtcctaagcggcgcaccgccgttgctccaggagcggtttgtgcgggagttggagaaactgcacgagtgggaacaggcgcagatcctgtcgtcgctggaacgcgtagcctgtatgatgaacgccgaacatctggacgcggcgcccatgctggcgatctatccgctcgatgcgacggaggacacgttgcggtcggcagacggccacggcgcgaaacatgccgatgccgccgcacccgcggatggcgacgcgccgccgcgatcggtcgatgcggccgagttccggcttcgggaacttcggcagccggccgattttgccgcgcggggcggattgcacgacctggcggcatttctgcaggaggcgctcaaaccgtacagcgacacgttcgaagacattgctcggggcctgcgcgacgcgctcaacggcggcgggtttatcctggtggcggaacatgacgggaagacggcgggggcgctggtgatgctccgcacggggatgggcgggtacgtgcccgagaatctgctgctgtttgtggcggtcgacccgccgttgcgggggaaaggcctgggccggcagcttgtggagcgcgggctgtgtctggcggaagggagtgtgaagctacacgtcgaatacgacaatccggcccggcgcctgtacgagcgtgtcggattcacgagcaaatacgcggagatgaggtattcgccatgaaccggctcgtcatcaacatcgaagcgctccactataatttgaaagtgatcgacaggtggatccgcgccaacggcagttcgtggacgctggttaccaaggtgctgtgcggccatgccgatacgctgcgcgccctccacgcgctcggcgtcaccagcgtgggcgactcgcgcctctcgaacctgaatcaagtcagccggtgcatgccgggcgccgaaaaatggtatctccgaatacccgacttgtccagggcgggcgaagtggccgccctgtccgacatcagcctcaacagtgaaatcgaggtgatccgcgccatcaacgatcacgcggcacggctcgacaagatccaccgcatcatcatcatgatcgaactcggcgacctgcgcgagggcatcctgcctggcagtctcgtcaacttctacaagaaagtcttcgaactgcccaacatcgaagttgccggaatcggcggcaacctcgggtgcctggcggggaccgttcccaccgtcgaccatctgatgcagctcgtgctgtaccgcgaactgctcgagttgaagttccgccagccgctgcccattatctccgcgggagtcaccgcgaccctgccccttttgctggagggccagatgccatccgccgtaaaccactcgcgcatcggcgaggcggccttccttggcaccgacctgatcaacggcggcacgctcccggaactgcgaaacgacgtgatgcggctcgaggccgaaatcgctgaagtcaagaaaaagggcttggcgccactcggtgaaaccaccaccatgacgccgttcgaaaccgaagcatgccccgacacctcgcccggccagcgcgggtaccgggcactggtcagcatcggccatctcgacaccgacatcaacggcattacgcctctcgatacccggtacaaaattgccggcgccagcagcgatatctccgtggtcaacctcggtgaaaacgtcgataaactccaagtcggcgagcgcatcgccttccgcgtcaactattccgcgctgctgcgcctgatggattcaaaatacgtcgccaaagagatactacccccgctggacgagattcgggaccacatatcccccctatccgaagccgctttcggcgcggccacgatgttggacggggtagcctccgccaaacccgcgtgaggagaagcccatgacgaacgacaccgggctcacgcaggcgtgcgaccgcgaccgcggcgtgtgggaccaatgtgccgccgcgtacgagcgcaatatcgttcacggccatcccgacgtcgtggcttacgaagcatttgaagaagaattccttgaccgcgtcctggcttttctggcagaacgatccggaaagccgctgcacgtgatcgatgttggctgcggttcgggccggttgcacctgcgttacggccttaaaaccacgcgcggcgatcagttgcccgctgccgacgccgagaatctcgcccgcgcccgcgcctcacgccgcgacctggactacgaccccgtcctggccggtgaaaccggcggcgggatcgagttgatcggcgggatcgatctttcctccgaactgatcaaccttgccgccgggaaactgggggaagccggcctcggaacgctgctgggccagcgattgtggcttcgccagggttccgcgttcgacctcgaaccgctggacccggaacctctgcccgtgctcgtcaccgtatgcaacagcatcggcgtcatgcaggggcccgaaggtgcgcagcaactgttcaaatcgctgcggcgcgccgccgaaaccgcctccggtatcgccgtcatcagcgcctaccgcaaagaagccgtccagtcgcacgcgctcggcaactacgagtccaccatgaacgtctccgggcagccgcgctggctcgccccccagacatacgcccgcaacaacgggttcacgctcgtcccgcgccggtacaagcgggcgtgggactccagcaaatccatcctcgtcgacgtgttcgaccgcaacggccaaaaagtctgcgacgggttcctgctcacccgcgtcaacgacgaagtggaacgtacaatcgaaacgggccacattcgcacgtggtcccggtacgagtcgtactggtacgggtttgacacgattgcccggtggatcgacgcatactggggccgcgacacctcctggcacctcgcgggcatcgaactggatgcgttgcgggccgcacccgcccaaatcgccgtctacgaccctcaacggcggctggccgatcttttcgggcgctggcgcatctcgacccgggaggcctaggcgtcatggcggggggcctgatcacctggggcatcatcattgcctacatgatcttcatcttcttcaaaggcgtgcttaaagccaggaagatccgcgacaccgacgatttcctcgtggccgggcgcaacatcggctggtttttcctgttttgcacgatgggggcgactgttatcggcggcggttcgagcatcggcgccatcgggcgaacctacgagtggggcgtgctgatgcttgtcgtgtccaccggctggtacctccacttcctgttctcgggcctggtggtcgcgccgaaattccgcgacgcggaactttacacggtcgcgggctattttggtcatcggtttggcgaaggtccgcgttttctcgtgctgattctgtcgcttctgttctccgtttttatcgtcgccgcacagatggccgcgttcggaagtgtgctgacggctatcctccccgagtttaccaactcgcccctggtgctcgccctcgccatcatcattggcggggcagtcgtggtcacctatagcaccgcgggcgggctcctggccgtcatccacacggacgtctaccagttcgttatccttattttcggcttcctcgtcacgctggcggcctgcatacccgacatcatctcctcatggaaagaggccacctcggccatccctcacacgttcttccagatcgaaggcgggaaaggctggatttttctggtcaccaccttcctcgctttcttcctcggcgaaacgttcgcccccggctacgccacccgatactgcgttggaaaagatatccgcgaaacgcggatcggcattgccggcgtcgggatcttcctggcgctcacgtttcccgtcgtactgttcttcatagccctctacgcgcggatccactttcccgacatcgccccccagcaggcgctccccatggtcatccgcaaaatgaacaatcccgtcatcggcggcctcgtcatcggcgcgctcatgatggccgtcatgtcatcggccgactccgcgctcaactcgtccacggcgatcttcatcaaagacctcttcgaacaccagcttggctggaaagaccgcaacgacggtcggatgctccggctcgcgcgcatctgctccgcgctgctcggcggcgccgccatactggtggcggtgctgtggtccgacatcatcggacttctcctgttcacgtaccacctctgggcgcccgcgatcatcctgcccgtgtgcgttggcgtcctctcaaagaaaaggtcgcccgcgctcacgcgcaacatattcatcacgatgcttaccgcaagcgccctgaccatgatctataagggcttcgccatactcaaaaaccggctcgatatcgcccccctcggcgacggcgcctaccgcttcatggaacaggtggacgcatccgtgttcggcgtagcggtatcctgcctcacattcggcgtgctcaccttcctgaccaccgaccgcaacgccatcgcggtcgatcccgaagaagaacaaccagaactctccggctccgacgactaaggcgactaagaagtcgcattcagaatctttgttcgcgaccttgactcaatatctacgcgccgtgcgcagatgtcgtgaacaaagattctaacaacatgcgcatgcgcctcaactcgaaccagttccgcctacctcgcagccaacggcccgatggtctcatccggtttgcgtcgtggcccgaaatcggataccttgctcttcatgcggcggttgctccgatttattgacgcggctcgctggaagtggctgttgggtttccaggcggggctgttcattgtgtttcacgccctggtgaattcgcttgggctgcggttcgacatggcgcctctggggatgttcgcccactacgccgacccggtgctgctgcggacgcgcctgatcgagagcgtattttacctccacgtccagccgccgctgtacaacctcgcgcttggcgtgatcctaaaacttttcccgggccacgcggcgccggtgtttcacgccctctttctgatcaacgggctggccctgtacctcctcgtgacgctgttgcagacgcggctcggggtccggaaaagcgtcgcgctcctgacgtcgacgctgtttgtgctaagcccgacgttccttgtgttcgagcacgtcctgatctatacgctccaatgcgcgacgcttctcgtgatcgccgcgctgttactcgagatctacgtgcggactcggcgcgcggtgtacggctgggggtttttcatcagcctgtttctgctgtgcggaatccggtcgatgtaccacttggcgtattacgtgttgatggcgtgcgcagtcgccgccgtgatgcgaggaaaccgcaggcaggttttgtggatggcgctgatacccggggtgattctgttttcgttttacgcgaagaattacgtgcttttcgacaagttttcggtgttttcgtttctcgggaaaagcccgtggatcaaaacggtcggcaacctgccgtgggaagaacgcgtgcgcctggcaaatgaagggaagatctcgaaggtgtcgctggtcgagcggttctacgcaatcgagtattaccccccggagatacgcaatatcgccggttacgaaaacatcccggtgctgcgccagaccaccaaatccaccggcgaggtcaactacaaccacctctcccagatcgccgtgtccgacatctacctcgaggacgccctctacgtgatccgggtgcggccgaaattgtttttgtgcaccaccgcgtgggccgggctcacgtatttctcgccgatgccgctcaccgtgccgcggcttcaatggctggtgcgcgcctacgacgtcctcactctcaagatcaacatccccgtaagccgactgatcccccaactcggagcgtcccgtcacgtcccctacctcacgctgctgatcggcatgccgctgctgatggcgtacggcgcgtggcttggggtgtggtcgcgccgccacacggccgcccagcgggccgcactgctgttcatggccttcaccgtcatctacgtcaccggcctcagcatcatcgtcgaactcgctgaaaccaaccggtaccggttcgagatcgacccgttcctcgtcgccttcctcggcctcatcgcggggagaaaaagagcaccggacgcggaaactgcttcgcgtccggcgcaatcttgccggtaaacaacaccggccctgctaaaactcgcgcaatactacttagcgctttttcgccgccttcttcacaacctttttcttcgcggcggctttcttcttgggcgctgcttttttcttgggcgctgctttcttcttgggcgctgctttcttctttactggcattgcgtttctcctccttattttaagtttctcgggtccccccgaggttacactagatattgtacacggtcggccccctcacgtcaagatgttgtggcaagttttttttggggggtggaatggacagagtggagatggtggacgctgcggaattcagtggggcgagttgcagcgggccatggtgattttgcacacttcgtggcatggaggggaaacaatgatcgcggcggtcttgtttttcagtgagctggtttcagaggcgcgcggagtggcggttttggatggttcgctgcgtgtggcgttggcgggtcaggaggagaacgcggtgcaggcgtcgtggccggggatcggttgctggttctggtcggaggaggagtttgggccggagggttacaagcgtttcttggacgtgcacgcgtcgcacacggattttgatctgttgacgacgagcatccgttatccggtggaagtgacggaccctgcggtacacgatcagattaaagctgcggcggcgtacgcgcgggagaaggggatgtcgatggtgatggatctggatgtgcgtctggctcggcaggcgtttatggacaagtatccgggggagatgcaggagattgtgcgggtgcgtgaggtggagatgttggggttgggcgaagtgacggtgggggtggaacctttgaacctgggcgatcattacacgcaccgggcgcggggttatgactcgattggtgggcgggtgctgcgggtctattcgggtgtggcggggccggcggggattgagccggactcggtggaggacatcacgggccggtgtcgtgtggagcaggcggacaaagacggcgtggcggttgcgatcccgtgcggtccgggggatgagggtcggacggtgtttgtgctggcggcatttacgttgtttacaccggacgtatatgcgccgcacttgatcgggtttgagcgggggattctcgaacagtacagggacgtggggttggcgggggcgtgtaaggatgagtggggttttccgggtcggttcaagccgcgggcggatgacgtgtggtattcggattggatggcgagggcgtacaagcggcggcggccggggcgtgacctggcgcgggacgtgttgctgatggttgtgggggagcgcgggcgggtgggtgagcgtgcgggggcgatcaatcactacatggagatgaaccgtgagcggaacgcggaggtcgagaattctttttatgcgggcatcaaggaggtgtttggtccgcaggtgatgagcgggacacacccgacgtggtttccgtttccgacgccggaggaggcgttcaagaacgggttggactggtggggggtgcggcgggatttggcgcagaccgacgagtcgacgccgttttgcgcgcggacggcgctgtcgaaaaagtggcggtcgcctctctggtacaacatgtattacgacggggacatcaaggcttatgaagaagatctttggcgccacgcgctgggcgggggccggatgaattttcatccgctgtatccgaacgatgcggtggaccgtgcgacgtcgctgctggggggcgatttgcttcgagcggattgccgggtgcgcctgctgaacctgatttcgacggcgccggtggattgcccggttgcggtgatctttggtcatccgtcggcgttgaactggacggggtcagggtttgcggacgttgggctcgaggtcacggatgcgatgtgggcggaaggctactacgccgatttgattccgagcagcgagatatcgagcggggcgttgacgatcgcccgcgatggcagcgtgcgatatgggccgcagcgttacaaagcggcggtgttgtaccacccgcagtgggaacggccggctgtggcggagtttttcaggaaggcggcgggaggtccgacgcggttgtaccgggtcggggaatggacgcgcgattttgagggcgaggagtttgatgggtctgcggccctgccgacggcgatgatcaacgggagtgcggccgattgcgcgcgggatattattgcgcacctgagggcgtcgggggtggaagcgcagacgctgggtacgcggaggggtgtggcgggatttacgcaatcggtgatgccggagccgagcggccggtgccggctgctggacggtacgctgattctggcgtcaggcaaggatgatgtgatgggggatccgatccgggcaacggtgagcctgaatgggcatgaggtgaagtttgatgcggtgggtgtggcggcggtgcggctggacaggacgggacaggttgcggcgatggcggcgggcgggctgaagcgtttcaaggcggggcgtatggagattgaactgccggcgcgtgtggatgtggcgttgtggcgggatgcgagtgggcggtggcagggggtgttgcaggggtgggacgggcctactcccgatgtgttgttgggcatcacgcgggcgtgggcgcgtcacaactttccagcacccttggggggagaaaagtcaagagaataggtggctgtggagttggtgaaaaagccaggcaactctattgaagggccgcgaaaagcagggacagacacgatttcaaacagccgaaatcgagtcagtcccagttttttgccagattttggtggaagccacgtagattttatggtgcaagatgactttttcaccaggtccgctgtcccctattctcccctatttccccgcgggttctccgggacggcctttccctcggctaatggaaaaggacattgcgcggtctgttcggtacaaagcgtttggaaacaaccaaagaccgaacggaggacacgcaatgccctacacccattttaccttagcggaacaaaaagtgctctattttatgttgtagcgggggtggcggcggatgagggcaaggatattgtcaccggagacgtgcaggcgagaggcccgcaccagaagttggggcgtgtttccgggtttggctttgtcgtaggatgccgcccgtcaccggctgaacatttctgtgcggaatctgcctccgttgggcgcgagtggccggcttgatgggcggggaggggtgtggcaagatgctcggcattcggcaaaggagggtaggaactcatgcttaagctggagcgcggacacgtggcgccgctgtcggtgctgttttcggtgctggtgcctttcagcgtgtattttggatatcgccggaactacgagtttctgctgtacgtggcggtgatagtgtttttcctcgtggtgatcgcgctgaccaacgatcgcgtgcgataccctttgcccattatctggggcctcgtggcatgggcgattctgcacctgtgcggcggggggattccgattggagacggggtgctttacggcgtaatgctggtgcctctgtcggacacggttcccatttttcgctacgaccagttcgtccacatcatcgggtttggcgtggccaccctggtgatgtatcacttactgcggccgctgctccgcgcggatctgcggggctggaccgcgctctcgatcgtggtggtcatggcggggctgggcgtaggcgcgctcaacgagatcatcgagttcattgcgaccgtgctggtacccgagaccggcgtgggcggatacgtcaacacggcgcttgatctggtctccgacctggtgggggcggttctcgcgatagtcttggtgcgtcttggctgcttgcgccctgcgactcaccactaaccttttcccttctgacttttagaagccgcggcgcccgcgagcccaggaagtcgtgagccaatgactgcgtgtagaccatgacgacttttaccacgggctggctagttaaaaggggagaagccgggtatccagccagcgggtcagcgcggggacaagaacttgaacgtcgttcgacttttctggccttacgggctcatcgggagccgatcaagcgttcaagatagggcaagctcgatcgggcttgcgcgagggtgtcgcactcgactgagagcacaccgtcgaaacctgcggaccggagtgcctcgacgatcccgggcaggtcgattacgccttggccggccgccacgccaacgcgggtgccggtgactttgccgcgttcgtgtaattgcgattccgggatgtctttaatgtggacatgtacgacacggccggcaacttgctggaggtaaccgacagggtcgttgcccgcaagaaacgcgttgccggtatcgaaattgacgccgaggtcgccgggaccgtaggcatcaagcaacctgaccaggtaatcggggcgcgccgtcagcgcattgtgcaattccatggcatataacacgccccgcctatgggcgtgccggacgacctcgtcaagacttacacgcatcaggtcgaagccgcgctcgagcgtcatccattcttcgggaaccggaccctcgtcggacattacaatggggcaagcgacttccgccgcgaaatcgatcgccgatttgagatagggcacgccgatctgcggcaacagcagcgtacagtgggcatcgatggctgagaatgacaggccgaggccttcccgcacggcgttgatcgccgcgggatcggtccgccctccatcgaagtggtgatagggcgactcggcgcgcacggtcaggtggctgttgatcggcaacgcgatggcggaatacacgtagggctcgacccagcgatacccggcgtccgccgcgcgcgccatcgcttgttccggcgcgaggcgttcggttcgggcgaattcgaggttgagcccgggcttcacggcgcgcgcctacagatgatacggatggcgctgcggcttgctgagcaggcggttcgcataggggtcgtcgacgatctcttgtttgttggcgtcccatcgcagcgtgcgtcccaatagataggacaggttgcccaagttgcacatcgtggcggtccgatggcctttctcgatgtccatacacggcgttgcgccagttcgaatggcctgcagccagtctgccttgtggttcatgttgtagtcggcatatttgtccatgcgatacacttcgacaccgccggcaggcactttgaagtttcgggccttttccggtgcgtcgtactgcgtgccgtcgcgatcgagcaccaacgtatcgtcctcgccgtggaataccatgccgaaatcatcgttcttgtcggggtaattgctctgccggtcaccgggctgcgcccagatgagttgccaatcggggtctttgaacgtgtagaccacctccatctccggcgggcagtcccaaatccccttgttgggcggatagcctttggcctcaatggtaaccggcatctgctcgtcggcgtcgaggcaccagcggatgatgctcatcacgtgcgcgccgcgatcccgaatcacgccgccgccggattccatgacccaccggaacacgccggggcagtaggccttgttgtagggacgccagcgcagcgggccgagccagaggtcccagtccaattgcgccgggggctcgccatccgggtccgtgccgcccgtcggattgagcttgtgccagcatgtggccttgtggaccttaccgagcatgccgttgcggatgtacgtgcacgcttggtgggcgggctcggccgatcgcgcctgcgaccccacctggaccacccggttgtatttcttcgtcgccgctaccatcgccttgccgtcgttgatcgtgaccgacgtcggtttctcgacgtagacgtgcttgccggattcgcacgcctggaccatctgcacggcgtgccagtggtcgggcgtggcgatcacgacggcgtcgatgtcgtcgcgctcgaggatgtagcggtagtcgcggtacgcgtctacaccggggccgcatttccctacggctgccgcgagccgtttctcgtccacgtcgcatagcgcggccaagtggacgtcgccatcgcgctcgaacttcaatgtctgctgcagatggttcgaccccatgcccccgatgccgatatgcgccagggaaaggcggtcgtttgcccccggcttccccggcgccgctatcgccgaaatatacggaaagcccaacactgcacccgcacttgccagaaatcctcgcctactgagtgtcatgacgtcatgtccttcattaagttgtcgagactatttctccgtcttgggttgaaccgcggtcttcttcgtcggaacaaatctcacgcacggcacaccgggcacgtccacgccccgttgtcgcaacgactgcgcgatgttgggtttgaaggcgtcgggggctgcatcgaacgcggccttgagcgcggccagcgagcggtcgccgggaatgcgttccaacgccatgcgcgcgtcttcgcggagggcctcgtctctgagcacactcgccacgggttcgacggctgcgtcgtccccgatctcggacaggatccagagcgcctcgctacgtgccggaacggactctgtttcgtcgttcaagagggcggccaatgccgccacaacggattgccgctcggcgtcggcgccgggccgagccgcgtaacgcgcgatctgccacagcgcccgcttggcggccagcgccgcctcgccgctgtgcgccgagataaccccggccaacggtttgaccgcggaggcgccgaccttgccggcgttgaaccaagcctcggtccgctcgtcgtcgttcccgccagtcaccttagcgatgagggtgtcaagtaaggcgttgttgtcagccatgtcctttgtctccatatgtatctggaaatccccaacgaatctgtcgaaccgattgtagataagccggtagcgccccgcaagcggtcaaatgcgtcttcaaggaacgtccttatccagcgcccagtagatcgcgttcttgagcaattggttgaacgcggggttcatgaaatcgtcccaatggccgagcgaggtgtagaacacgcggccgccgttatacgtgttcgtccaggccaccggctcggtcgcggcgtcttccgaccagcggccttgcatcagcagcgtggcggtgtccgacaatggattaagccggtacagccaactggggctatggaatgcggcgctttccagtcccttgaggacgggatggtccttcgcctgcgcggcgcaccacacgtcgcaccccgtcttgcgtgagcgcgaatcgtagcccttgtaatggcaccccagcacttcttcgtcgaacttctgccagaccacgtggccgctggggcattccgcggggtcgctcaactggaacgggacggtgctgacgcgcaccgccacaagcggcttgcccgcgcggatgaaccgttcgagatgatccatctgcacgaccggcaatgcccgccgccgcatgctcaacaccagcagatccgcgtcgtacaacgcgtcgagtcccggcacattgtcgcggcccgtgcctacatgggattccggggtcagaagcgtgcaacggaaatcgtccccaagatagcgttgaacgaaggccgggaacgttgcgtccgatttatattcctgttcggcgagtacgaagacaatgtgcgggcggcggtcttgcgttcccatactggccgcggccaacaactggcggctctcgaacgacggcgcgatgtgttgttcgatatatcgctggatgatggcgctgcccttcgccggcgtgaagttccggtccagttccctgcttccggggtcgatgccattggctgtgatggcctggaccaggtctgacacgaaacatagcctaagcccgtggcgtttcatgttgatcatgccgcactcgcgatagaggacgcacatgttgctggccacgcccatatagacaagtgtgtcgatgcctttgtcctggcagaaattcagcaactcccggccgttgttgcagtcgacgatgagatcgctctccgcgatgacaaggtccttgtgctgccgggtccagactcgagtgcccgtcgggcacggctgatccggcccgcactcgcatcggtccttgcccacgggttggggcggcggctcgaatgtatttggttccggcggcggatatgacggaacggcctgcatcgccttgcgctggggatagtccgcatagaaatcgaccacgtccgacggcgcaaagacgatggggatgccaagtttccgcgcggcgtcgagtgtctggttcatgcgcgggacgagattgcccacgcgcgcggtgtaggtcttgcaccagtgttggtcccacatatcaaccacgacgaccgccgtcttggtcgcgacaagcttccccgtgaccagtgttcgctcaccggtgaccggatcgtattgctgcaggctcagatcaaagcccatcccgtctgcccataacggcaacccgagtgagagaaagacccatacaagaataatgttccggaccgtcttgcgcattccggtctccttccgcagatgataggacaggcctaacccgtagaccagcgtagccgcgcgtgaattttttttcaagaatgcgggcttttcccgttccctacgggtcttcatgagttagacaagggcgaaggaggcctgtaccagagggtgatgaggaacccccggcgagctacacagccgaccaagatggtgatagccggatcatcctgtccgaactgcttcgcctgatccggttcttcaacagcgatgcccgcgcagcgattctcgccctgtacgcggcccctgtcctggccttattctgcctttacgcaagcgcccgaagagcgtcaactgttttgcaacatactgtcatgctgagctttacgtgccataagcaccaggctgcgtgtcgcacatacggcaagtaaatggctcataatgattgggcggtctgcgcgaattcgcatgaacagcgctgaggactgctcgcgaaaggtgttattgggccttgaacgccctccgaactggtcttgagggcgtcggtccgggcctgtatgatcgcggagaacttgcccgcgatggtcgcaggcagaacatatggtaaacgttggcttgtcggaaggaagggagatgtctcgtgagaagaatggcaattttggcggttttgatgatgcttgcaggctttacagtgtcggcgtacgcggcagattcaaatgatgttactgcaactaccaaggtaagcattaaagatgtcgagcatgtagtcgtgtacaaggatccaagtctggcccatgcatgcaatcaggtcagtatcgtcctgctgcaaaacggggagctctttttgggattcaacgaggaaagatatcccgtccatgccgacagcggccaatcttgctttatcaaatcgacggacggggggagaacctggaacactgccgccaagcgggtcatctggccctacaccgagtttaagggcaactgggactgtgccttttcccagaagtccgacgggactattctgatgcacactcgggtgtgtaatttcatcgcacccaggggaatcaattacgaaggcgaccaatcgcttgaaatgcctcctcccgggatgcccgaacgcctcaagaggcaaacggggtatgcgctgcttaaatccaaagacaacggcgtgacctggactgaccccattgaggtcaacacgaatcctatcgccagctcatcgttgtcctggtacgcttgcggcgggtcgggagcggggcacatcatggaacttcccgacggggggttgctcatgcccctgggcggaacactgtcggataaaggggaaaacggagccgagccgagccgctgcttcttgttgagatcggatgatggcggtgacaactgggagtactggtccacagtggcgtatgacgcggccggcattatcagcttctcggagccagggatggcgcggctcagcgacggcaccctggtgtgcttgatgaggacccaccacaaaccaaatcgacaggacaacatgtggttcacgtgttcggatgacgatggagtcacgtggagcccgcccaagagaacgtcgctctggggttatccggcggacgtcgtgcagttgaaggacggacgcgtactggcggtctacggctacaggaaggccccgtggggtgttcgcggctgcatctcgcaagacggccggacttgggagatcggtaaagagttcgtgatcagggaggggggcgtgccggcgccgtcgctgggcagcggttcgcgtactcttctggatgcattagttatgcagcagtattggcacatcgggtatccgagcgtgacccaactggctgatgggaccgtcgtcgttgcctaccacgagtacagcaatgatgagcagcccatccactacctgatgagcacgcgattcaacctataggttcggagacccgggcatcggggcgtactgaaggctggtgcggatttgggttgcacaaaccagttgctgattgtcagttttaagtctacactggtggaacaggtcatggagagtatcggttttcagccgccggtcacgacccggccacggaaggggagtaaatatgagtgagagcgtctacaaagttgtcgagattatcggcacctcgccgaattcatgggaagaggctgcaaagaacgccgtcgagaaggcgggcaaaaccttgcgcgagatgcgcattgctgaggtggcccaactcgatatgaaggtcgacaacaaccaagtcgttgcctaccgagcgaggatcaaggtatcgttcaggtatgaagactgagtccagtctgaatctcgagcgtttcctcggaagttgcctgtaatgatcatcctgctgcatagcggatgagctgaatatagtactggatcgcttccatatagcgccggatgctgacgcgctcgtttacaccgtgtatcatggccagttcttgttctgtaaaccaaaagggggtgaaccggtactggtttacggcaactttagcgtagttcctcgaatcgttgtcgccgatatcgaggctgggggctaccgcgaccgcgggccacacgtgtcgaatgcttttctcaatggcctgatagccccgcgccgcatgatctgaaacgggcgatgcgttatgtgcgccgggcaggacattcatctcgatgcggtcatcccccatgacttcgcggatatggttccttacgcgctcgattgtatctccagggagaagtcggcagttaacgaccgcccgtgcggtagacggcagcatattgtccttttctcccgcgttgaacattgtggcggtaatagtcgttcggaggccggcattcgtggcgggcgcttgttcaagctcccgcgtgatgagtccgccgaacagccagcgattggagaaaagcacgcgatacggcaggctcatctccggagtcgcgtagtccaacgtgaggcccatcagtccctcggaacgcacgggcatcgggtgacggttgatgcgagtcaatgcggccgccagaatctcgatcgaggtctcgggtgggggttgggaagaatggccgccctcctgcttgacgagaagctcgaagcttgcatagcctttgtcggcaagggctaccagcgcgagcggtcttgcgacgccaggtacgattccgtccgtgatcacgagaccctcatccacggagaattctgcctgcaccccgcgtatcttgaggagtgacgccatgtgggctgcgccctgctccccattcaactcttcatcgtgccctaacgcgagatagatagtgcgctggggcatgtagccggcttgcacaagggtttctgcggcttcaagaattgccatgagacgtcctttatcatcgagtgcgccacgtccccaaacgcagccctcagcaatgacgccgccgaacggcggatgcgtccacgccagtgggctttcctccgcagtgaccacgtccaggtgagccaggagaaggatgggctcgagcgtggggtcgtttcctggccacgtgtacatcaagctgtattggttgacgaactcgcgctgcatgcgggcatggataccgggataggcctttttgatgcaggcatgcagtttgcgaaactcatcgccgctaaatctagtttggtccatgtaggaaacggtcttgcactgcagcgcctccgagagatgggccgccgctgtttcatcgttcagcgtcattggttgccgcgtctcgggcggaaactgtcgcgacttagccagcacggcgcgcaggagcacagcggccgtcaggatggttgcgaggaggaatgcggcgagcatcaatctcttgaacatggaacgactcctcagatctcttgtcgctatgctaccatgccggcacaagaaagaggcaatcacggtcgggaacgcgatgatgagccttgaggtttcctggaccaaatggatattcattttcaaatccatgcccgcacaccgattttctacttgcgcacggcccacgccagggccttattctgcctttacgcgggcctttgccgagcgtcaataattttgcaggatactgcaatgtaaagttttaagcgttataagcagatgaatgcttattgcacatacggcaagtgcatggcgcatgggacctcgtgctcaacagccaatcactcagcaacttcgaccgccacaaacggtgctgcacttctcgaccggcgtttccagattgatatggaaagccaaaaacaacacgattagatgccagggtttgaggatgaattccggcatgagaacgggcaatcctttccaaatggaaaagaggcatgatgcccgcatgttgaggccgagtcaatcggttcagtgccgacacacaacttaagcgcaactcgtttggctagaattggttacacgttggctggatattttgaccctacgcgacagggaatttgtgttatgaaacaacggttcacgttatggaatatcgagcttttcgaagatttccaaggaggtcaaacatgaaagcatgtgtatgcgtctgcgccgtcctgatgtctgtgctgttttttatgtttgcagcgccacggattgcatgggctgaatcgccgcaggaaccggatactacgcactactcggttgtcgacgtctacaagtatccaggattcaaccttgtgcagtttacgttgcctgttttgagccactattcctacatggtggtaagcggcaaggaatcgctgatggtcgaccctggccgggatatattcgcttatctggactacgcgaagaaggaggggctgagtttcaagggcactttcctgacgcactcgcacgcggattttgtcgctggccatatggaaatggcgaaggcgaccggcagccccatctacgcgagcgccatcagcgaagccgaatatccgtttaagcctcttgaagacgggaccgtgattgagatcggcgaggcaaccgtcaaggctgtggccacgccggggcatacgccggacagcatgacggcctatgtcttcagcaaagacaaacccgatatgcctgaactggtcctgaccggcgacatgttgtttgtggggagtatcggacgaccggaccttctgggcgggacgatgacgggctcggaactcgcgggtatgagcttcgacacgtgggtgaacaagcttgccaagctcggtgacgcggtggttgtatttccggcgcatggtgcaggatccttgtgtggcgccaacctgagcgatgcgccctcatcgactatcggggcagaacgcgccaagaatccctacctccagcacaagggccgcaacgagtatattgcggcagacctcgcaggtctgcccgaagcgccgcagtatttccaccacgatgcggcattgaaccggaacgggccggacctggtggattggagcgcgccgatgccgaaggaagatccagccgatgtgaacctgacggacccggccaaggcctacgtggtcgatctccggagcgacgccgactatgcgatcgggcacattcccagttccgtcaatattggtctgacggaacggctggaaacgtgggtgggcatcatggtgccttggaatgccagactggttgtgtgcggcacggctccgcagatgaaagaggccatctaccggttgcacagggtcgggtatcacgcgggggttgtctcgattgactcttggctgaaatccagccagccggtggcgaagaatacgctcgtgaaaccggcggacctgaacgcacaggtagagaaggcggacgctccgataatcctggatgtgcggctggcggcggaattgtccaagggacgtatcgcggcctcactcaacttgccgcttcaacacctcgacacactgtcggcccagattgaccccgcgcaaccggtcgtcaccctctgcaactcggggtaccgctcgagcatggcggtgggtgtcctggaacgaaaggggttcaagaatgtggcaagtcttctcggcggaatgaccgcctggacggatgcggcactgccaaccgcattcgacacggccgcgtcatatcccgtggcattggccccgcagacggctcaattttccgcatcggcaacgccaccgccgccaagggtggcggtcaatctgccggaaaggatttcggcttcggatttgaaacggatgattgtggatttgcccgggaccttcgagttcgtggacatccggccgcccgcgatgtttgctgactacacgcttccaggggcgcgaaacgtcgatattggcgaccttatcaccaactcagaatatctgaatggcacgacgccgttggtcattgtagaccgggacggttccctggccatggcggctgcgggcattctctcgcagaagacgacgcggccgattcgggcgctctatggaggactggaagcatactgggcggcttcggaactgaacccagtggtcaaagaggtggctttgggcgcatctgccgctgcggcaggaagttccatgccgcaagcagctcccccggctccgccagcgtccgcgcctgcatcccaggcgcccgccgcccctcaaccggccaagaagaaaagcgcggggtgctaaccatgatagacgagaaaacaaaagtgaacccttattggaacccttatttggccggcattctgttgggactcacgttgttggcctcgttcttgttgcttggagccgggctgggcgcttccggcggaattgcacgagtcgccgcgtttaccgaaggatgtattgttcccggccacgtggcctccagcgaatattttggcccgtggagcggctcgcccttgaagtattacctcgtgtttatgctcgtaggcatcttcctgggaggattgttctcggcgctcctggccaaccgagtctcgttccagatcgagcgaggcgctgcgtatccggcgggacgccgagcccttttagccgtcgcgggaggtctcctcgtgggctttgccagccgcctggctcaagggtgcacgtcaggccaagccttgacaggcggggccctgctgctgacgggcagcctcatttttatggtgtgtttgtttgccgggggctatgccgccgcgtggttcgtgaggaggcaatggaatgattgagacattctacggttcggattccctcggggccagctcggctcttttcgtggcgttactggtggggtatttcttcgggttttcactcgaacgcgcggggttcagcagttcgcggaaattggcgggcattttctattttcgcgacatgaccgtcctcaaggtcatgtttaccgcgctgataaccgcgatgctgggtttgtgttattgcctggcgtttggctgggtccgcccagaaagcatcttctttatggataccgtctacggcgcccagatagtgggaggcttgatattcggcgtcggctttgtcatgggcggatggtgtccgggcacggccgccgcgggactcgccgcaggcaagatggacgctctcttgtttcttgttggtgcgattggcggcagcgtcctgttcaacgaacttttctggctggtcaaacctttgtatacctctggcgaaaggggcgtgcagttcgtttacgacacgctccacgtgtccaagccgttgtttgccgtcgccttcacgcttgccgccgtggtctgtttctggggcgccgagtacatcgaaaaagcgcgcgccacgggcggcgccctattccgttcgcctttcctgaaggccttcagccttgcacttgttgttgccgccgccggactgttcctggtgccggtaaccggaacccctgccacagccgcggtagcccaactggcgacacacgagcaatcggctcttggcgaggaatcgctgctcaaagaagtcgagcagggcggcgatcatatcgagccggaggaacttgcggatcggttgctggcgggtgatcccaatttgctcctgatggatgtgcggactgatggcgaatacaaggcctttcatctgccgggagcggttaatgtcggtctcgcccagttaccgcagtacctggcggcgcacaaggggcaaaagacggttgtcctctactcgaacggcatgacgcaccccgcccaggtgcgtgacgcactggaaagaatgggatacgccaacatctatatgctcaccgacggtttgaagggcttcatagagcggtgcctgaaaccggtgtccctgcgtggagaaccaatcccgcaagcgttggctgcgaaggtgacggcatggcgcaacttcttccttacggcaagatcggctacggcggtaacaccgacggccgcggcaactcgggcggtcgccacgccggtaccggcagcatcaccggcaccccctgtagccatggacaatcaacgactgcctggcctggtggagacgcagtggctcgcggacaaccttgggaaatccggagttgtcgtgatcgacatgaggccgcagcccgaatacaacaccagccacattcccggggcactcagccttgccgtggagagcttccgcggcaacgtcaaaggactaccgtcgatgttgctgccggcggacctgctggcgcgccacttgtccttgatgggcataacgccggacaatctgctcgtttttatctacagcgataaggcgcatgacgccaccttgccctgcatggggctcgaacggctcggccatctccgctacgcggtgctcaacggcgggtttgggaaatgggccgccgaaaagcgacctatggataccgtgctgccgtcggtacaggagtcggagtataagcccatgccgggggcagatacgttcactgttgatgccgcgactgtgctcaagcaccagcaggataaatccgccatcatcatcgatgtgcgtccccctgaatacttcagcggcgccaagtctgacgaggcccgcgccggccacatccccggcgccattaaccggccctacaccgaagacgtggtgaagaacgaaggagtgctgacgttcaaaccggttgccgatctttcggcggcctatgcagccattgttccgtcaaaagatgcaaccgtgattgtccattgccgcaccggccaccaggcgagccagacattctttgtcttgaaacggttgcttggttacaaggatgtcttgtactacgacgctggctggaccgaatgggctgcacgtcccgagttgccggtggagaagtagacggaaactggcgcgtacggaaatcaaggtcaggatgcgaaatgattatgacaggatttcaacagaactggaggccgggtttttatttgtctgtatgctcttgattccgcgagtaaggatgggacccaaaaatagagagagtagccccggaattcgttatgcgatcgttgcagacaagtcagagcaacctacgcccgtatggtcagctaaccaggcgctgaataatgattgagaggaaagatgttcggatgacatagtggaagcctccccgggtaaggccgatccagccgcccggatacatttccacatccttgctcgcgtaccgattctcatcttgcatccgatttatgcagggccttattctgcccttccaagaacctctgaagatcgtcaatggttatgcaacatactgtcatgccaagcattacgtgccatgaccacccgactgcgtgttgcccatacggacagccctttgcgctttagggaaaagctgagccccacgcgcgttcaagcagtagtccgccgacgactccaaggcgccgtacctcgaaaaacgtgaggctagcaagggtgtttaatttctcgaccggcgtttacacaagatgtcaacaaaatgacgcttatcggtctattatatgagctacaggagaacaaacaatgctcgggcgagaagtcatattggataaacaggcgatacaggacgtcctttccggtgagcgggagcgcttcggggaactggtcgagcgatatatgcccgttgttcaggccacagctatggcccggctccgaaatgtgtcagatacggaggacgtggttcaggagacgttcctgcgggcctttcagtctcttgaccggcttcgcgttaaagagaagttcggggcgtggctgctgacaatcgcacggaacgtgtgtaacaccttgttggcccggcgagggcgcgaagcgtccctgcatgaagcaacgccgccgttggctgtcgagccatctgcgagtggggaggcggctgaattggacgggctgttgcacgaggagcttctgaaactcggcgagaaccatcgcgaagtgctattgatgcattactttgccgggcgttccctcacggagatggaatccttgctcggcgtgagtcgtctcgctttggcaaaacgactgcaacgggcgcgggaagccctcggcgagcgcatgctcaaacgcgtcgaggcgggccggtacagggtgtcccaggaaaaggtctcgacggtcatgaaagcgattgttgtggcgccggtttcgtggggtctgacggagacagccagtctgacacgtattctgtatccggcaagacaactgggagaactcgtcatagcgcacaaacttatcgcggttccaatacttcttgtcgctggacttgtggtcacactagccatcggaccgatggaggcacttgagaaaccgattccggctgttgttacgagcaccgcggacttggccgccgtcccgccggctgcagccactgtaaccgagacagttgccgacgtcgcggctgcggctgcggaatcggccgacgcctccacggaagccgttgagaaaccggtggacctgtccgatcccaaagatgtctggagaaaggtggttgaggtaaaccgcgtgtggctcgacccgcgaccaacgtatctgcgatacacgctaaacatgggggggcccgagccgggaaacacgcccgagttggtgcaccgcgtttggattgacggcgataaaggccgctgggagactgagggcagccagatggtgtttgacagccagaatgcggtctatttgcagccctacggccttctccagcggagtcccatgccgatggagaacgcgtcgacgtaccggcagggattgatgtggcacacggcgctccacgcatttgccaggcgcggcctgccggagaatgcgcgcattgtcgagtcgaccgatgcgccttctgaaaacatcgtagtgattgaggcggaaccggagaagactggcgcggcagtgggattcggcctgggcggaacatggttcggaaaaagctcgtaccccgtcagccgggtgcgactgcacattcagacgccggaatttgtgcccgtgctcgaggaggacttcgcgcaactacccgatggtggcgagagaagagaactgatcgaaattggcccggaattcctggccttcggaagccaatccgcgcccaaggttctggcctaccacagtacgctgttggacgaccgggagtgggtattaagggccgagttccaaaaaaaggatgacgcgtggattctgcgcgagggcctcaacctgcaagaaggcaagccatccaaacgcatttatgtcacgaacgtctcgacggcggcgttttcgccggccctcgtcgagatgccgagtgaggaggaattggccgcactcaagacggccctcccaaaacaggagcccgcccaggcgtccgctgaaggccagccggttgtggtcggtgtcttcccggcgcacgcagccaagaatgtggccgtgcaaacggaactgaggatccaatttgaccggcctatggatccggacagaatggggattgccttcgagaagggcggcctgagagacttttcggcggcacagtacgatgccgagtcgtacgagttcgtggttcccgtacggttaacgccgggtgaacaacaattcattgccgttaacagtgatgacgacggattcctttccgcggatggcgtgaaggccgcgcagtaccgttggggctttgagacggcggctgtaccgagccgggcggacgcccctgaaccgcgcgtcgcatcgctctcgcccgcgccgggtgacacggttgcgtgtcttacgttcatagaggtggtttttgaccagccgatggatccgtccgcgggttacattgttgacttgagcaaggacagatccttgatgggcggcgcacaactgctggcggacgtgcagtatgacgagcgtggaaagcggtttctcttgccggtatcgtttccgcctgattggcagggggatatcgaacttcgggggtttcgcacggtcgagggggcggcagccgcgccggtcccgctgcacctgtccacaacgcgcgaaccgttttccgagagctcactcgaacggttcaaaaaggcggcgaaagatccccggttgctcacggtgctgagcgagatgcgccaggcgcggcagcatctgacgtctgtgtccgagcatgtcatggtaacgtacgcgtttggcgtcgtgcccgtcgaattggcgccgtttattaaagccgatggcggcacgttcaggtttcaggggaatcgccagttctacggcgacgtgaacctatccacaaacaggttcgttgtagccggggatggggaccagtgctggtggctgtgtaccaccaccgataagaatgggcagacagaggaatccgtgcaggctgcgccgcacgacacaatcggcaagaaaaacatcttgatatgcgatccctttgaccttgaaggtcatgacgtagacgcggctactgcggaactgcatctcgaatacgaagggatggtcagttttaacggccgccaagcccacgtgattaagtcgactacagccgaccttcccggcgactggacggaggccaggatcattcgatggtggatcgactcgcaccagttgatgcccgttcaggttgccgtcaatcaactatgcatgcgcagcctgtatacgtttgcctacgagggcatgaacgagccgattccggacacggagttcgcgctgccgccccgcgacgatgccgcttcacaaccttttgaaccgctgacggatggtgacacaacgcggttcctaaccgtagtcgacggcggcaacggccggatgtccgtgcgatggggcaatgcagcgagcagcagcgggttaaattgactgcggaagaacgcctcgcccgcgcgttggttcaattgcggttggcggcgaggtaaaaggcgacgttgtttcggtattcggcggtgagtttgccttgttggagcaggtgctcgacgtgtttcatggcttcgagaacggggattgacaggccggcggcgatatcttggagtgagcaggggtgtcggcgcacgagggcgaggatttcgtcttcggagacgtgcaggcgagacgcctgcgccacaatattcggaaagttggcgatgacttcggcgttgggcccgatgcggcgtgcgatcttttgcatgatgttgggggcgacgggaacggcggtcgagcctggtgcgggtcgggcgagggtgttgaggtggattttgtcgggccggatgcggccgatacagtcgatgaatcggtctatggcggggctttgaggttcgatgggggcggtgagaaagatttcgagccagatttggccggagtaagtctcgcggaaggattccaggcccgcgatcattctctcatacgtaatggcggctatcggctggttgacggcgaggaacgtctgcgcgtcagaggcgtcgagggagggcaggacgacgttggcgaggttcagtgcgtcgcggacctccgggtcccacaggagcgacccgttggtgaggacggctacgggcgttggcgtgagggatttgatgccggtgatgagcgggccgatctcggaatagagggtgggttcgccggacccgccgatcgtgacgtaatcgggtaggacgccggtttcgagcttgctccggagttcgtcgagtacctcgtcgagtggcacgtagggcttgcgttcgagcgtatggacagtagtaggtccgagttggcagtagacgcagtcgtaggtgcaggtcttgaacgggacgacgtcaatcccgagcgagcgccccagccggcgggaaagggcggggccgaatacgtatttctgagccatagatttacagtacctgcgggagagcgggtgcgtcaagcgtggacccgaatcgtggacccgaatcgccggcaatagcaggtcaaatgattttggacctacaggcgcgtctcgaaagaggaggcgtagttgtttttttgccgtcaggatcggaaggtcgtggcccatgggagcttccccggctatttcgacggttttgatgcctattacttccggatactgggttttagtatcgaggccgttttcgcgcatctcgcgcacgcacatctcgatgacttcgcggatgctggctggtcattgcctccgtcctcgaacgttctgccctgggtgtggcaaccgcggaacgcgggaacatccgcgacgtagtaaccgtcttcgtcttggtctggtgggatggagaaccacacgggcagacaggagatcgactggttggccaggcacatactacccccgcgcgctgcccattcacgacctcaaagaccattcgaaaaagccggagaggcatatgcagcaggaatcttcaatggtggcccgagaacggatgacattacagacttctcttaagggcatgctgttcatggaatcattgcgcaaagagaatcgcgcccgacggccacaaggtttggaatattcagcccttaatccctgtgagtacgatgcccttcacgaagtactgctgggcaaagaaaaagaggttcctcacaagaatttgtgcacgagtttgggctccggcaggtcgcccaggcaatgatatagggcggtgatgtaatggggggcggtacggaacccgtagcatcggtggctgacgactttggccttgttgttcatgccttcgacggcgcggttgtcgatgcgcatctcaaagtagttgaggaggtcgtcgaggtggttcttcatcgtccaggcaaagtcgcgcatgggcttgagccgggagtgtgtcgcccaccagaaccacttcttgagaaagcggcgggcgccgtctttgctgtcatagtcccagaattcacggaagctttctttgagaagataggcgcggttgctgcgcaggttcaactgctccaaatgcccaagtcgcgcgcgttgcttgtcggtgaggttctcggggttcttcagccaaatgtagcgggtctttttgagcagttcgggattggtcttgcgcaattcttgggcttcgtcgcgcggcacctggtcggcggccgtctggctgaccagcaggaggggcagtttcatcccgtagtcgccgacgacccactcgaacttgatacggactttgggatgacttttctcaaaggattccgcgacttcgcggaaaatggcgtcatcggctatgtttccccaataggagaagcggatcacggtagtgccgccatcgtcgtcccctatcggcgtggcatgcgccgcgcccagaatcagggccgcggccaacaccaaacattcgggtacccaacagattttccgcgccgtagtttcaacgatgcccgttgggcagggcgcaagtcaaactcagcaggagtcgccatactctgagtctttacccttttgttgcacaccagcgtaatcgcggggaattgcatgcgacggtacacctttcgcgtcgatgcgttcgttttgatgcatgcgccgctcgggggcggtgagttcgtcacgaagccgattcggttcaaaggggaaaaactggtcctcaactacgccacgcccgcagcgggaagcgcgcgtgtcgaactcgaagatatcgacggaacaccggtcgacggatactcgttgaacgactgccctgagatctacggagacatgatagaccaaacgatccgctggaagtcgggccctgacgagatcagcctggtagggaagaccgtaccctacggccccgagcggtgtcaaaagaaaggacggcggaccgcgacaagagagaacgtcggccggcttcggcgtgtttcgtggtccacccgtcctcgcaggctaacgcaacgtaacgtttgcgtcggttgtgccgatgccgatatccttgagttccgctttcccggcgcccttgaaccagatcgcacccgctacatcccccgcgatgcctcttatcaagtagtgtccctcgctgtcggtggtggtcgatgatcgggagtagtccgcgaggcccatggcttccaccgccacgccggcgacgggacgggcttgcgcatcccgcacgtagccgcccaccgagtgggccgccagcgatggcacgacaatggtgagttcggaggcggcggcccccggcgagacatccagccagaacttctgcgcgtcgaggtagaggtttcccttgtcccctccgtccttccaatagaactgcaaggtgtaggtgcccggactgacgctgctgaaggagaacttgccctcgccatcggtttccgtattctgcatgggcatgctggcgcggtcctgtccccgcttgtccggatggccgatggcaggatgaagatagacgcgggcatccgcgaagggttttccgtttgtatccaccaattgtgcggagaacgacgaggcaaccgcggcgtcaccaatactcggctccagcttgccccccgacatcatgtacgcgatcacagggatcaccaacaaagccgcaagcagcacgcccacgccaatcagcacctgtttcatatttcgtctccttccaggctgtaacgttgtcttccggtggcccctattccgcagcggcccccgccggggttgccccggagctcaggtcgatgtccaactcgagggtttcgccctcgcggactgtggtgacgcgggtttggtcccccacgcggtactttaccttcaactcctttaccacaccgtcgatgggatcgccggcaaggtcattgaatctactgacggtcagtttgtttccttggatgcgttgcttcaacggctcggtcacgtcgacccacttgtcctgcgcaccgtactctgcggagaggacttccaagggcgctccttccgggacaccacgcgaaatctggcccggcaaacggtccgggacgtcgtagtcgaggagttccacctcgtagggttcccggtgacggacgatgcgcacgacgatgtgattgtccagaacccaaaggtccgtgacatggccggcgcgcttcttgaaccacgtgtcggcgctggtgagttgcgtaaggacgaggtggttggtattgaacgccccggccgggactacaatctcctctttgcccttgttttcgacgcgcacacggtacgagggaaacgtgccttggccatgcggcccgttgccccaatcgcacatgatgaactccttgccctcgcctgccttcagcccgaacccgcgtatgagaacgttgataaccgcgtatgggtcgggccgcgagttcagggagaacagggcgccctcgtcgatagggaattccttatcgtcggtctcctcaccccaatgacggatctggaccgccttgttggcatggaagtcaatccttgcctggaacgcgggatagcggtccgatgccttgcgggtcgcggcgtagtgggcgggccggtgattctcatcacccacggccaaggctgtttcgttgaagaaggtcaaatgcgatagggcgctgacagccccgttttcctgctctttgacccacaaagacgagggctggtcgtactcgcggccgcggctccggtgaacatagcggccgtggaacacgagccttccgggaagttcgtctatggcgggaataggttccacaccatcggagaaacccatttccggcgccttcgcggcagtatccttcggtgcagcatccggctttgcaggcgtggcatcgtgcggggctttttcgtcgggcaacacgagttcgatcccttcgatgtcatccgggccttcgactcgaagcggcgggttcgccgcatccaccgtccgatacggaccgaaccccatattcaaggtacacagctcgaacgtgtaggtcccgggacaggcgccctcccgcatcgcaaagcgcccttcaacgtcgctgagagcgtcgggtaaccgctgtgacgcacgaccttcggtaatcttcatgcttacggcaacggtggggacggggcgaccctggctgtccacgacgcggcccgagatcgtcgcgcacctctggaccacgaagtccttgccatcaatctcgcccgtcacttggaatggatcagactcaatccgtccatatccgtccgcacttacgactaactgataggtccattcctcggaaggcgccaggccccagaggcaataggccccgtcctccgcggtcaccgtttcggacgtagtgaggcggcgactgggccgcagttggttacgatggctattcgaagcgtgcaggcgcgcacccttgacgggatcgcctgcttgatcgacgacgcggcccgacacgcacgcgccgcgttcgaaggtgaagtccacgtccgtcaactgctcgtccgggccaacagagacagtcttcgccaccaagggtccaatgtccgagggacgaggctctcgcacgacgccatccgggacggcgtaggccacggcgaattcccctgcaggcaaatgctgcagccggtaagtcccatcggatccggtgaccgcctctcgcaacaccgtaggcgggcggacgttcggcacccacagccggactgcgggtatcggctcgcccgtttcttgaaacgtcacttttcccgagattgttgcgccgtgcgagatctgcatgtcgaggccgacaacatcctggccgtcgagaaggttcagccggggatgctccagcgccgtgtagcccgcctcggcatcatagatgacgagttgatactgaaaaggacagagacgctcgaaaacaaagcgcccggattcatcggtgcgcgtagtgatgtcgggcatgtcgttgtccgcgggcgtgccgcgtaacatcacgggaatgccgcgagccggtttcccggaatccttgaaacagaccgtgccggaaacgcggacgccgtcatcgagaacgagcgtgagcggctcgccttccggcagtttacccaggagtacgccggggtcctgccgctcagcaaacgccgcgagggtcggcggtaacagaatttgcgatccccggccgtatggccatgtccatctcgggatcgcgaatcggcccttctggtctgttcttatctgcagggccagactcatgccgtaggaactccattcgcggatagaaagaaccagcgtgccaggaacgggttcacccgtcttgcttaaaacggttccttcgagcgggtcggggtcgaacggcgtgagggttaagtctcgcgacacgttttcgtctggcaaaagaggacttcccagcgtaaggggagcggccccgaacgcgtcggcggtgaccgcaaacacgttgtacgccccatcgggcaggccggtgatctcgtacgtcccgtcatcggccgtaaaggtgtccttgtaaccccactgccacgcttccccgcggaataccgccaccttgaccccggccgccggtgcgccgttttggtcgcggaccgttccgtgcaaccggtagggacccggctcgagttgaggcatgagatactcatacccttcaggaacaaccgtctccgcgccgcggcggttcgtccccgttgcgtcgtgttctgcttcgacggggcggagtcccgggaggacggccagtcccagcagtacgacggcgatggcgccggcaatggagagtctgggcgaacggcggagggtcacgtccatgatgcgcttcatgcggcgaccgagggggtggagcatctcggcggttccgacggcggggcggagcctgccgaaacctgcgatgctcgaggcggcgcggacaaggctttcgcagtaggcggtgttttccgcgaggcgcagatggaggatcaaatcgtcgcagcagtcctcgcgtgtccggcggagtgcgcgcataacgagccagaagacggggttgaaccaccacaagagcagaagcagattctcgaacacgataacccaaaggtcccaccgacggaggtgggcgagttcgtgggccaggatgctgccgagttggtccgtggagagttcgtccattatggaggcgggcatgaggaccttagggcggaacaaaccgaacgctatgggggacgttttgtcctcggaaatgaagaggtccacgcgctggctgaggtccaattccgcacagaggctcaggaactgttcgtacaatggtcctgcggtgaccatccgggcgcgtctcctcattgcccaaatccgccacgtccagccgaggatccaaaggcacgcgacaaacgcccccgccaggtgcagtgccaagattctcgtgtgccaggccatgtggtgctgaggcgccgccggcagcatcggcggcattggagtctgtggttgttctggaggcgcttgcgaagaaccaacgtacgaaggtggccgaggctcctcgacaggtacagcgctcacgtcgatgacagggacctgggaggactccttcggcagaggcgcgacggcctcccgcaccggtacctctgcaggtgtccaatgcgataggtcaatcgggacggccacaagcggcggtacggcgaacttcaccagtgcaaggatcaacaaggcgtagcgcagcgacgcggaccgattccgcagcagccatacgatgccgaggatgagcgcaccggccagcatcgactgccaggtggcatggaagacgtagggccagacgacctctgaaaacgtctcgattgaatgcagcaactgcatggtattcagttctccccggtgtgtttctcccgcaactttcgtagcagcctttcaagcgcatccagttcctcggacgtaggcgggcgcgactcgaagagcgacgccaccatggcaacgccactcccgccgaagacacgctcgtataggtcccgcatgattcgtctatacgtcggctcaggtggccgggtagggcaatacacgaatgcctttcccaccggccccttctctttcgacacgaggttcttgccttccaggcgtttgagcagcgagaccatcgacccgtgcgtcatgggccggtagccctgcatcgcctcgcggatctcgcgggctgtggccttcccctgttgccagagggaagccagcacttccaattccgcgcttggcagcttctccagcacaggtcgtccagccggtttgtcttgacgtttctctctcgacacatcctgctccttgctgttcaagcacgctagcacccgcgacggcgtcaaatatatacgattgcctattttgtgtcaaccaaaaatgcgggcgcctattttcccctgagtttccaccgtgtcttatgacttgaagcgctacgacaggatccgcatctggaagtcggccaagaatagttgcactccttggccgaccgggcaaggcccagataaacggacgcgttcgagcgtgtggacggtggtagggccgagttggcagtagacgcagtcgtaggtgcaggtcttgaacgggacaacgtcaatcccgagcgaacgcccaagccggcgcgatagcgcgggaccgaagacatatttgaacgcaagttcgctcacaaaagaacagtaccccggtgaatctggctgcgtcaaaccaggcagggacgggtagggactagcgcggcgcggatcctcatttagcgggaaggcagtttcaggatttcgtttttcaactcaataaccttgatggggcagcccggccaatcatttgcccagcaaacaatgaaatcgcattgattaggatcgtgtccgtgttgctcaaaattcgacgcttggcactcaaactctatgcgagccttagcccaaaggtttttcttagaatcaaacagatattttccctcgcaatccggaaaaccttgttgcaccgattcgacattaaaacccagttcccggctcaccatcgcaaagaggaatacaacgccttgttcattgatgggggcgtgtcgcaaacctcgaaaatcaatgggttcgccgtatagttgttccggtgtcttctttcttgtcgtaccgatggaaatcatacgttgagttccggagctctcctgtccttcgctgccttcttcgacgactcgttcgccttcaggggttgagacgatcatgtggctgttctccgatttccatttccggtaatgcgcaaggacatcggcccatttcccaaatcgtttgaagtagggctttgtagaatatttgcactgggcagaacaatcattgtagccgggctcgtgaccaattttcttttcaaggtcatacaacgctaagaaaagggcgcgctccgttagaacagggcctcggtttcttaaatgctcccctggagccactcgatcaaggcctgctgcctccaatgcatttccaatattcccaaatcgatacttcaaagtagacacagccattaccgaagcgatgtctttcttcgataggcttttctgcccaagccgttgcgcaaggttcttcagcatctcaataatttgtttttcagtgtttcgaggcatggagaacaccttgttcggacgctgcgcctataagagacgtttaaactcttccggtgttatttcgatatccttcaagatctttcgcagcaacccgcgccctatgtcttgtccagcatgaaatgggacggtagttctgcgcccatcgggatggacatagcggcggtgactggttgcccccaacggtcgaggctgaaagcccaaacgttccaatactgcgacgagttcttttaccctcagcatcggaaggtcgtgggccatgggtgcttacaccgctatctcaacggtctttatgccgatcacttccggatactgcgtttcaatctcgaggccgtcttcgcgcatctcgcgcacgcacatctcgatgacttcacggatattcgtcatcgcctcttcgaacgtcttgccctgagtgtggcaaccgcgcaaagcgggaacatcggcaacgtagtagccgtcttcatcttgctcgataatgacttgaaatcggtacaggcccatgctgcggctccttatcgtagacgtttccagttataagagtagcacatacggccccggccccgaaaggttgaggcgtcccgatggctgtgaaaaataaaacgggggccgttgcgggaacgggttcgagcaggcataatttaagggtgatttgattgaccgccggaattttggtaggttgcggtgggtgtctttttttcttttcagcggtgctacaaaacagcgcaggacatattatgaccgacacaagtggtaagaaccgaatgttgttgagcgggaatgaggcggtggcgcttgccgcccgggacgcgggggtcgctttggcttcggcatatcccggcacgccgtccacggagattctcgagagtctggcggctttgggcgggccggcccaatgggcgcccaatgagaaggtggcgtatgaagtggcgctgggcgcggcgttcggcggtgcgcgtgcgctggcttgcatgaaacacgtgggggtgaacgtagcggcggacccggtgttcacgtcgacctacacgggggtcagcgggggtctggtgctggtatcggcggacgacccggggatggcctcgagccagaacgagcaggacaaccggcggtacgcagtcgctgcgggcatgccgatgatcgagccgtcggactcgcaggaggcgtatgagttcctgttcgcggcgttcgagatttcggagcggtggaaacttccggtgatgctgcggatgacgacgcgtgtttgccattcgcagacggtggtgacgccgcgggcaaaccggctcgagccgctggcggcgcatttcgagcacgatatccggggccgcgtgatgatcccggggtttgcgcggcccgcacaccggcgcctgcgtgcgaagctcgaggaaatctacgcgtggggcgagacgatgccgctccaccggcggttcgacggcagcaagaagctgggcatcatcacggcgggcgtgtgttacgttcacgcgcgggaagcggcgccggccggcagcttcctgaagctgggcatgacgtacccgctgccgtacaccatgatcaaagagttcgcgaaaagcgtcgagcgctgcgtggttatcgaggagaacgacccgtatctggtggacgcgtgccgggcgattggggtggcgtgcgaaggcaaggctgagatgtaccggtttgatgagatgaacgtggaccgggtgagacggatcctggcgcatgatgaatcgcccgagccgatccggccgccggggaagccgccgcaactgtgcgtgggttgcccgcaccggtcggcgctgtcggtgttgaagaagctcgattgcatcatcatgggcgacatcggctgctatacgctgggggtcctgccgccgatcgacgcgatggattcgtgcgtgtgcatgggggcgagcatcggcaacgggctgggcttgcgacatgtgctgccgccggacgaagcgcggcgggtggtcagcgtgatcggggacagcacgttcgtgcacggcggcattacgggcctcgtcgagatggcgtacaatccgccgccgaccggccacgtggtcctcattctcgacaacgggaccaccgccatgacgggcttgcaggaccaccccggcaccggcgtcaggctcaacaaaaaagatacccacaagctgagctttgaagacttggcgcgatcgattggcatcaagaacgtgcacgtgtttacgggggtggacccggcgggttttgaggcgctggtcaaagagagcctggccagcgaggaactgacgctgattatcgcgcggcgcccgtgcctgctgtcggtgaaaaagcagaaagcccggactgcgtccgtgacggagaaagccaatgcctgaaaaaaacgaggtgaccaacgtggtgttcgccggcctgggcggccagggcattatcaaggcttccaacatgctggcggaagcggcgttccggtccgggcatgacgtgaagaaaagcgaaatccacgggatgagccagcgtggcgggtcggtgaccagcgacgtgcggtttggcaaagaagtgttcagcccgatggttccgtcgggcgaggcgcagttcatggtagcgctcgacagtacgcagatcgaggcggcccagcacgtgatgcggcccgacgggttgatttttaagcccgagatgttcctcaaggacggccagacgttcggcgacctggacaaagaccccgattcgcccgtgaaccgccgcaatctgaacgtggcgctgctgggcgtgctgagcacgcacctggacctcgaggagagcgtttggatcgaggccgtttatgccaacctgccggaaaaactccacgagcagaatgccgcggtgtttgcttacgggcgcgaggtggggcggaaggcataggcgcgggttacgcccttccccaggctgtctgagaagtcaagacaagggacataagggaccaaaaggacctaagatttctgctgatagtttgtcccgcgcgaccgggtggcggcggtggagggctttggcgggttagtttggtcgatgccatttgtggtgcgggcgtcccgcctgcacgtggcatcttggcggcgcgcgttttcatggccttgcctgctaaactgctgcccaaggttaccaaaaaaatcttatatgtgcaggcgagacgcccgcaccacaatacagcccggacttgcatgggctctttacataggtagcagcaatggaacgacagcccgagcctgaggcgatggatctggaggaagaggcggcggcctatgcggcggccgatttcgcggatgtgaatgaggcgtttgtcgagcggctggtggagcttgcggggccggtggatcgggcgctggcgctggatttggggacgggcccgggggatatcccgcttcggctttggcggcgccggggcggctggaagatcgtggcgggggatgtgtcgcacgcgatgctggagttggcgcgaagcgcaatcaagaaagccggcgcggccgattccctgtggccggtcgagcaagacgcgaaggcggcgccgtttaagtccagagcgttcgatgtggttttctcgaacagcatccttcaccatatcacggatacggggcggctgtggggggaagtcgggcgcgtaagccttccggggacgctgatttttctgcgcgatctcgcccggccgcggtcggcgcaggcggcctccgagatagtccggcgatacgcgggggcggaatcggccctgttgcaggaagaatattaccgctcgttgctgtcggcgtatacgccggacgaggtgggtgcgcaactggcttgtgcgggcctggatgggctgcgtgtcgagatggttacggaccggcacctggacgttttcggccgggttgacggataagagtggttttggttagagtcgtgtaagtgtgggcggttttaaagtcgagttggacacgaatttgttgggtttgggcgaataggacctatacgacttataggacctataattggtttgtttgttgattgttttttggctatattcggcttgagagccaaaccccgggagggacgatgtgaacgcattcaggcatgacgctggaagttcgtttaatccggtgagtgcaccggattatctgccggtggtccagttgcgggcgctgcaattgcaccggcttaagacgatcgtgaagcgggcgtacgaccaccaggcgctgttccgcgaacggctggacgccaagggtgtgaaaccacaggacctacagaagctcgaagacatccacaacctcccgttcacggtgaaaacggacctgcgcgacacctatccgttcggcctgttcgccagccccatgagcgagattgtgcggctgcacgcatccagcgggacaaccggcaaaccgatcgtcgtcgcctacacccaggacgacatcgacgtgtggtcgagcgtgatggtacgttcgtttgcggcgtgcgggcttgggcagggcgacatcatccagaacgcatacggctacgggctttttacgggcggtttgggggcgcattacggggccgaggcgctcggggcgactgtgattccgatctcgggcggcaactcggatcgtcagatcatgatcatgcaggatttcggcgtgaccgccatctgctgcaccccgagttatttcctccacctgatcgagcggtctcgggagatgggtattgacatgcggaaactgcccatcaaagcgggtgtgttcggcgcggaaccgtggacccaggcgatgcgggaacggatcgagcccgaagccgacatcaaggcctacgacatctacggcctgtcggaaatcatcggtccgggcgtcgccatggaatgccaggagcaggcggggccgcacctgtttgaagaccatttctattgcgagatcatcgatccggagacgtgcgagccgctgccggacggccaggaaggcgagctggtgatcacgacgctgagcaagctggccatgccgatgatccgataccggacacgcgacatcacctcgctgatgcccgagccgtgcgagtgcggcaggaccatccgcaggatgcgccgtatcggaaggcgcagcgacgacatgttcatcatccgcggcgtgaatgtgttcccgtcgcaggttgaatcggccctgctcaaagtggaaggcaccctgccccattatcagatcattctggagcgggaaaaagggctcgacaacatggaggtccaggtcgaggttaccgccgacgtgttcggcgacacgatcggcgccatggaaactgtccgcaaaaagttgtcggatgaaatagcccacattttgggcattcgagtgaaactgagcctggtccagcctcacacgatcgagcgaagccaggggaaagccaaacgcgtgattgaccggcgcaaaatgtaagccgttggcaaagaggaagggatttcggcaatgaaaatacaccaattgtcgttgtttttggagaacaagccggggcggctgagcgagccgtgccgagtcctggcggatgcgggcatcaacattctgacgttgtcgctggccgacacccagcagttcggcatcatgcggctgatcgtccgcgactggatgaaagcgaaagaggtgtttgagaaggccgggttcgtggtgaacgtgacggaggttgtggctaccgaagtggccgacaaacccggcggcctcgccaacgtcctggccatcatggaaggcgggggcgtcaacatcgaatacatgtacgccttcaccgtccgtagcggggataaagcggtgctggtgttccggttcgacaacccggataccgcgatcgaactgctcaaggccaagaatatcaatgttgtgggcggcgtcgagctttacgaacgggccgaacggtagccgggatcaggcggtgcggaacacaggcatagtaggtgcgtaatgccggattttgccttggaaaacggggtctggtcccctgaagagacgcttgatcggccgcagttgcaggatctgcaactcgatcggctcagggacgtggtacggcgagtcggcagcgtccccttttaccgggaatcgcttgcgcgcgaaaagatctcggcggagtatcttcgttcgctggacgacctgcggcggattccgtttacgatcaaagaagacctccgccggcaatacccgctggggtttctggcggtgccgcgcgagcaggtagcccgattccacggctcgtccgggaccaccggcaagcccacgttcgtcgcgtatacgcgcgaagacctcgatacgtgggccaacctctgcgcccggtttctctacgcgggcgggctgcggtcgcaccacaccgtgcatattgcatttggctacgggcttttcacgggcgggtttggcctccactacggggtggaaaaagtgggggcggcggttttgccggtcgcttcaggcaatacgccgcgtcaggtgatgctgctcgaggacatggaagcggacgcgctggtctgtacgcccagctacgccctcaacattgcggaagcggccagggcccagggcgttgacccgcgcaagtttaacctcaagtacgcccatttcggcggcgagatgtggaccgaagacatgcgccgcaaaatcgaagatgagcttgatgtctatgcgtttaacaactacgggttaagcgaagttatcgggccgggcgtcagcggcgagtgctacaaacgcgacggcatgcacatccaggaagatcacttcatcgttgagtgcgttgaccccaccacgctcgagcctgtggcggatggcgagtacggggagttggtttttacgacgttgaccaaacaggctatgcccattttgcgttaccgcacccgcgacattgccgccctggacagccagccgtgcccctgcgggcggacgaccgtccggatgagccgagtcgccggccggacggacgacatgctgataatccggggcgtcaacgtgtttccgtcgcaaatcgaggaggcgctgctacaggtggaaggtattgcgccgcactatgttatagaaattgaccgtccgggtgcgctcgaccaaatgaccgttaaagtcgaggtccgccccgagatgttttcagacaaaatgagccagatgcaggccctgcgggaccgtatcgaccggaaaatccaggccatcacgaatatccgcgctacggttgaacttgtgcccccacagacgctcgaacgatcggcaggcaaggccaggagagttattgataatcgcaacctgcggatccagtagggacccgtggcaagagtctcgattacgtccctacgcataccggatgcgatatggggcccgacatatttggcgcggcttagtacgtctattcgtaaatacggtgacgtatggagtgtggacgctcttagcgcgtttgccaccgctttttatagtgcaaggctttcctcgcgaacaatgtcgcacttgtcaggcaaggcctccctgccgaaaaagcggcagcaagctgccgcgctccacacagcgccatgccttgtgggtattctgaagtccatttcattagcccgaagttccagaggctggtttcatttcttgtagtgtgtgagggggcgtaaacattggtttgttgcatggttataggcgtgttgttgtgtgaacaatgcgcccatgcaactagaagctatcccaaaaccgaataaaagcgctcctcccataccgatgtcgggaaaaataccggggggattcccacgtcgcgctggactcaggcttttgaattaagaatagaggccatgtgccagcgctcctcggaatgacacgttcgggcgccttttggttgcggctatgccgcgccgtgctctttgcgttctttgtggttttcaatttccgttacagcacgccgtacttggactgccgcacaaactctgcggccgtgcgctctgtcgaaggctggtaaccgggtagaggctttatttgtgcgtgatacgcgtcgaggagccaggccggctgcgggaagtactctttttccaactcggccggcggcacgatcccgttgttggccccgacaacgcatacaggcgcgtcaaggtggtcgaacgcgatctgcgcgatctgccccgcgatggtgtggagataacttccgcgttcacaggcgtcgctggccaggatgagcttggcagtcttcttgaccgactcgaacaacacctcatggtcaaacggaagcggcgcaccaacaaaccgcttaaggccaccgagatcggcctgaaagtcggcaaggttctcaaccacttcaaggccggcaaacacttcgtgctcgacatacaagacggccatttcgcgttcgcccgcaacgccaaacgcatccagcacgaagagcggctcgacggcatctacattatccgcacgagcgagtcgaaacaagagctcagcgccgaagacaccgttcgtgcgtacaagagcctggggcaagtcgagcaggcgttccggtgcatcaagcgcctcgatatccgcatccggcccatccaccaccgcaccgtggaccacgtgaaagcccacgtctttctctgcatgctggcttactacgtcgaatgggagttgcgcaggaaactcgcgcccgttctgttccaagacgaagaacttcacgccgctcgctggacccgcgaccccgtcgccaagcctcagcccggcgaggccgtacaacgggaaaagcgaaccaagcagactcaagacgggtggcccgtccacagcttacagaccctgatggatgcactcgccacgcgctgcaaaaacatctgccgagtcggccaagggaaaaacgccgcacggtttaccacattcacggaacccaccgatttccagcgccacatcttcgacctgctcggactcaagtgtggatagaaacgcctgttcccagtaaacctgcatttgaatacaaggttatttcccatgcaggataaaacgtgcattcgatctggctctggaacttcagtttaagtcttacggggcggcggatatgccgtcgttttccctgctcaaccggcgggcagcgtgaagtagaaggtagcgcctacgccgggtgtggattcggcccagatacggccgccgtgctgttcgacggcccgtttgcagatggccaacccgattccggtgcccggatactccccgcgcccgtgcaggcgctgaaacacctggaagattctctcggcgtactcctgttggaatccgatcccgttgtcttttacccaaacctgccactcgttgccgtcgatccgggatccgatctggatgtccaaggggcgttcggcgcggaatttgaggctgtttccaatcaagttttggaagacttgggtgaggagtgtggagttgccgggaacggagggcaattcgccgagagtgatttttgcgccggtttcgctgattcgggcggccagattgatcatggcggtccgtgcggccttctcgaggctcaccttggaggcgaccacgccgcttcgtccaaccctcgagtaatcgagcaggccctggatgagcaattgcatccgtaaggcggcatccgtgacaaaggcaaagtactcgccggcggtggcgtcgaacaagggggcataatcccgccgcaggagttggacaaacccgccgatctggcgcaacggctcctgcagatcgtgcgacgcgacataggcaaactgttcgaggtcctcgttggaccgcatcaggacggcttcgttttggcggagggcatcctcggcgcgtttacgttccgcgatctcggcggccagttggatgttcctgttttccacctcggcggtgcgctggcgaacctcctgttcgagatgttcctggtagtgacggacttcgtcttccgacctcttgcgttcggtgatgtcgatgcccatttccagaataagaacagcgcccgtggtgtcggtgaaaggaaagtcaaagacctggtaggtgcgtgcatcgggcccgacccattcccagtcatggggcgccatcgtctggaggacgccataggcttcgcagatttcgcacggctcgctgcgcccaaacaggtgttcgtaacagcgcttttcggactgcccgaaacgctctcggaatacgcggttcgcgaaactgacccggtagtcgggagtcaacaggacaacgtaaaccggcagcgtctccagaacgtcgtagaataattgccgctcggccagcacggctccttccgcgcgccggcgctcggccatttcccgctcgagcgtgacgttggccagttcgagttcagccgttcgttcgctgacgcgggtttcgaggttttcattggcttcgcgcaacgcctctgccgcctgcttgcgttcggtgacgtcttggactgtcccaaacccccctaacaactcgccttctggaccgacctcgagttcggcccgctcccggacccacttcacggccccgccgaccacaatccggtgctcgatatcgtacgctgtttccccccggatggctgccatccagttttcgtcgacgtactgccgatcatcggggtgtacggcatccaggaacgtctcataggtcaagggggtgcccgtggcaatgccgaacatcctgtacgtctcgtccgaccacgacaatcggttgtgttggacgttgaggcgccaactgcctgtatgggcaacagcctgcgcgtgcttgaggtcggtttggctttcgcggagggctttttcggcttcctgacgttcggtgatgtcgcggatgcgaatcccggcaattatttcgccgtgcgaactgacttccacggggaatatcgacccgtccttgcgcttgtggaaggtctcgaagaggatacccgtggcaccggctttcgccatttgcgcttcgacggcatcgcgatcgcgatcgctccacaggtcgcgccccatcatttcgagcagttcctcgcgcgaatagccgtaggcgcggatggcggcggcgttggcctcgaggatgcggccgtcgtcccgccgcataaatagaataatgtcacggctgttcgccgccagcagttcgtatcgctgcaagacttcctcagcctgcttgcgcctggttacatccaggaagacgaccgcgacctgccgcggcgcagggctgtacgcataaacctcgtaccagcggcccaaaggcgcggcgtaattctcaaaacgggcgggcgtgccggtgagtgccacctgcccaaaatgctccacccagtacggctcgaccgttggcagcacttccttaacgcggcgccctatcacatcttcgcgcttcagccccgtgaggacttcgaatgccgggttgatatcgagaaaaacatagtcgcagggcttgccttgcgcatccgtaacgatttcgtgcagcgcaaacccttccgtcatcctgtcaaacaacgcgcggtagcggtaattgtcgtcatgcaagaccacttcttgaccccctctggtctttgcacgcttccttggttcgtggtgtgctgtaccggtcatgactttttgttccgcaagaaaaagcggggcctctccgtaaccgccgtttcccgtaacaggatgaacccaagcccaaaaactatagcagatcacgcctcacccgccaaataggcgtgccacatcattccacagccggatagagcgagtggtaggcggcgtaggcgcccaggacggttttgacgtagttgcgggtctcgccgaacgggatgttttcgacgaacgtctcgaggtcggctttcggccaccttttgagccatttcgagcagtttccggggccggcgttgtacgacgccagggcgtgcacgaggttgccgctcgagcgctcgaccatccgcaacaggtaaccaatcccgagccggaacgagttgtcggggttttcgaggttggcgatgcaggccgcgtcaatcgagggatcaaccttggccagccactgggcggtgggcggcatgacctgcatgatgccgcgggcgccggcgtgggaggtcagggcgggccggaacgtgctttcctgccgggcaatggccagcacgaggtacgggtcgattccggtgccgcggcatttggcccgcacctgttgccagtacgaccggggatactcgatccgcatgcgcgcgggtgtccgcttgccgtcggccaccccccagttgtacgcctcggcgaaatccatcgccgccttggcatacccggcttcacacatgacccggtaaacgggggcgtcttcggccccgttgccgagccgcttgccgaggtacaacgcttcccactcgccctcttcgagcccgttcttgccaaaaaacatcagccgctcgaactgcgggtccatggcggggtcaggaacgtttacacgttcttccgcggcgatttccagcggcgctatgtacgagccggtgccgtccacccggaggttttggccattggatgggctgtcgtcgtcgcgcgcgcgcgccttggccagacggtatgcggcgcaatgggcgtaatagttgcccggcccgaattgggctgcgttctgaaaggctttagcggcgtcttttttatgccccgcggcctcgtggtgttttcccagccaataccatgcgttggcggcatggcgcccctggggatagcggccgaccagttgttcgagcgagtggacgcagcccttgaggtcgccggttttcttctggagtccggcggcggcgagcagggcgaaatcggcccgcgcatgatcgggacaatgtttggccaggcgcaggtactgctcgacggcgctcttgtctttttcgtctcgggcaaaacggcttgccagccaatacagcgcatccccggcctgatccgatttttcgaaatgcttgaggagcaggtcgcacgccaacgccgcgacctccggcttgccaacgctcgaatggctgcgggcgacgcaggccagaaccaggcgcatccagcgcgcgcgcgcgtcgctgtcgccgtgctcgttgacgagtttctggaacgcttcgcgctgcgcgtccgtcagggcccgtttgttcgacgtcagcaggggcgcgagcacgttaatgttcaccgggctaccgccgccaaccgcctcgggcaggagccgcaacgccagtttccacgcatcggtgcattcggctgacttgatcagcccatcgagcgccacaaaccggtcggccatatcaggcgacttctcgaggtaacgcgccgcatcgatgcgccgctgacggagcacggtggttgccacgttatcgcggaagtaggcataggcccgctgttcaaattccggcacgcggacgtacacctccgccgccgcccaatcatactgatcgacgatccacgttttcgggctccacgtcttcggggccgccgtcttcggcgccgccgtcttcggcgcaaagtcgagcgattcggcataaagggccgcggccgcgggaaactgcgagtccagcgccagcaggcccgccagatcgagtttcgctggaagaacccacggcccctccggcacctcggcgagcacgctgcgtaacgcctgcaccgcctgtgtgcggctgccggtcgcgcccaggcacctggccgcactgatccgggcgtagggcgccagcaacggatccgcggatgcactggccgtataggcgccgatggcttctttgaactttccggtgcgttcagcattatgtccggcgaggtacgaatccgcccccggcaacccacccaacaacacaacgacagcaaaaactgcgttaaccaaaaccgattaccttcccgtcctccggctaatcttcaatccgcaatcgacaatcagtactgtcccgttaaaaactgctgttgttgctgtaaagcatattttaacaaggtcttacaaatgagtttgggcgatatcgatttcaattcggcgcagtctagaggccatgattcttccacc

SEQ ID NO: 535 - DNA, 62870 bp, Artificial Sequence
  Synthetic Oligonucleotide
ggtggaagaatcatggcctctagactgcgccgaattgaaatcgatatcgcccaaactcatttgtaagaccttgttaaaatatgctttacagcaacaacagcagtttttaacgggacagtactgattgtcgattgcggattgaagattagccggaggacgggaaggtaatcggttttggttaacgcagtttttgctgtcgttgtgttgttgggtgggttgccgggggcggattcgtacctcgccggacataatgctgaacgcaccggaaagttcaaagaagccatcggcgcctatacggccagtgcatccgcggatccgttgctggcgccctacgcccggatcagtgcggccaggtgcctgggcgcgaccggcagccgcacacaggcggtgcaggcgttacgcagcgtgctcgccgaggtgccggaggggccgtgggttcttccagcgaaactcgatctggcgggcctgctggcgctggactcgcagtttcccgcggccgcggccctttatgccgaatcgctcgactttgcgccgaagacggcggcgccgaagacggcggccccgaagacgtggagcccgaaaacgtggatcgtcgatcagtatgattgggcggcggcggaggtgtacgtccgcgtgccggaatttgaacagcgggcctatgcctacttccgcgataacgtggcaaccaccgtgctccgtcagcggcgcatcgatgcggcgcgttacctcgagaagtcgcctgatatggccgaccggtttgtggcgctcgatgggctgatcaagtcagccgaatgcaccgatgcgtggaaactggcgttgcggctcctgcccgaggcggttggcggcggtagcccggtgaacattaacgtgctcgcgcccctgctgacgtcgaacaaacgggccctgacggacgcgcagcgcgaagcgttccagaaactcgtcaacgagcacggcgacagcgacgcgcgcgcgcgctggatgcgcctggttctggcctgcgtcgcccgcagccattcgagcgttggcaagccggaggtcgcggcgttggcgtgcgacctgctcctcaagcatttcgaaaaatcggatcaggccggggatgcgctgtattggctggcaagccgttttgcccgagacgaaaaagacaagagcgccgtcgagcagtacctgcgcctggccaaacattgtcccgatcatgcgcgggccgatttcgccctgctcgccgccgccggactccagaagaaaaccggcgacctcaagggctgcgtccactcgctcgaacaactggtcggccgctatccccaggggcgccatgccgccaacgcatggtattggctgggaaaacaccacgaggccgcggggcataaaaaagacgccgctaaagcctttcagaacgcagcccaattcgggccgggcaactattacgcccattgcgccgcataccgtctggccaaggcgcgcgcgcgcgacgacgacagcccatccaatggccaaaacctccgggtggacggcaccggctcgtacatagcgccgctggaaatcgccgcggaagaacgtgtaaacgttcctgaccccgccatggacccgcagttcgagcggctgatgttttttggcaagaacgggctcgaagagggcgagtgggaagcgttgtacctcggcaagcggctcggcaacggggccgaagacgcccccgtttaccgggtcatgtgtgaagccgggtatgccaaggcggcgatggatttcgccgaggcgtacaactggggggtggccgacggcaagcggacacccgcgcgcatgcggatcgagtatccccggtcgtactggcaacaggtgcgggccaaatgccgcggcaccggaatcgacccgtacctcgtgctggccattgcccggcaggaaagcacgttccggcccgccctgacctcccacgccggcgcccgcggcatcatgcaggtcatgccgcccaccgcccagtggctggccaaggttgatccctcgattgacgcggcctgcatcgccaacctcgaaaaccccgacaactcgttccggctcgggattggttacctgttgcggatggtcgagcgctcgagcggcaacctcgtgcacgccctggcgtcgtacaacgccggccccggaaactgctcgaaatggctcaaaaggtggccgaaagccgacctcgagacgttcgtcgaaaacatcccgttcggcgagacccgcaactacgtcaaaaccgtcctgggcgcctacgccgcctaccactcgctctatccggctgtggaatgatgtggcacgcctatttggcgggtgaggcgtgatctgctatagtttttgggcttgggttcatcctgttacgggaaacggcggttacggagaggccccgctttttcttgcggaacaaaaagtcatgaccggtacagcacaccacgaaccaaggaagcgtgcaaagaccagagggggtcaagaagtggtcttgcatgacgacaattaccgctaccgcgcgttgtttgacaggatgacggaagggtttgcgctgcacgaaatcgttacggatgcgcaaggcaagccctgcgactatgtttttctcgatatcaacccggcattcgaagtcctcacggggctgaagcgcgaagatgtgatagggcgccgcgttaaggaagtgctgccaacggtcgagccgtactgggtggagcattttgggcaggtggcactcaccggcacgcccgcccgttttgagaattacgccgcgcctttgggccgctggtacgaggtttatgcgtacagccctgcgccgcggcaggtcgcggtcgtcttcctggatgtaaccaggcgcaagcaggctgaggaagtcttgcagcgatacgaactgctggcggcgaacagccgtgacattattctatttatgcggcgggacgacggccgcatcctcgaggccaacgccgccgccatccgcgcctacggctattcgcgcgaggaactgctcgaaatgatggggcgcgacctgtggagcgatcgcgatcgcgatgccgtcgaagcgcaaatggcgaaagccggtgccacgggtatcctcttcgagaccttccacaagcgcaaggacgggtcgatattccccgtggaagtcagttcgcacggcgaaataattgccgggattcgcatccgcgacatcaccgaacgtcaggaagccgaaaaagccctccgcgaaagccaaaccgacctcaagcacgcgcaggctgttgcccatacaggcagttggcgcctcaacgtccaacacaaccgattgtcgtggtcggacgagacgtacaggatgttcggcattgccacgggcacccccttgacctatgagacgttcctggatgccgtacaccccgatgatcggcagtacgtcgacgaaaactggatggcagccatccggggggaaacagcgtacgatatcgagcaccggattgtggtcggcggggccgtgaagtgggtccgggagcgggccgaactcgaggtcggtccagaaggcgagttgttaggggggtttgggacagtccaagacgtcaccgaacgcaagcaggcggcagaggcgttgcgcgaagccaatgaaaacctcgaaacccgcgtcagcgaacgaacggctgaactcgaactggccaacgtcacgctcgagcgggaaatggccgagcgccggcgcgcggaaggagccgtgctggccgagcggcaattattctacgacgttctggagacgctgccggtttacgttgtcctgttgactcccgactaccgggtcagtttcgcgaaccgcgtattccgagagcgtttcgggcagtccgaaaagcgctgttacgaacacctgtttgggcgcagcgagccgtgcgaaatctgcgaagcctatggcgtcctccagacgatggcgccccatgactgggaatgggtcgggcccgatgcacgcacctaccaggtctttgactttcctttcaccgacaccacgggcgctgttcttattctggaaatgggcatcgacatcaccgaacgcaagaggtcggaagacgaagtccgtcactaccaggaacatctcgaacaggaggttcgccagcgcaccgccgaggtggaaaacaggaacatccaactggccgccgagatcgcggaacgtaaacgcgccgaggatgccctccgccaaaacgaagccgtcctgatgcggtccaacgaggacctcgaacagtttgcctatgtcgcgtcgcacgatctgcaggagccgttgcgccagatcggcgggtttgtccaactcctgcggcgggattatgcccccttgttcgacgccaccgccggcgagtactttgcctttgtcacggatgccgccttacggatgcaattgctcatccagggcctgctcgattactcgagggttggacgaagcggcgtggtcgcctccaaggtgagcctcgagaaggccgcacggaccgccatgatcaatctggccgcccgaatcagcgaaaccggcgcaaaaatcactctcggcgaattgccctccgttcccggcaactccacactcctcacccaagtcttccaaaacttgattggaaacagcctcaaattccgcgccgaacgccccttggacatccagatcggatcccggatcgacggcaacgagtggcaggtttgggtaaaagacaacgggatcggattccaacaggagtacgccgagagaatcttccaggtgtttcagcgcctgcacgggcgcggggagtatccgggcaccggaatcgggttggccatctgcaaacgggccgtcgaacagcacggcggccgtatctgggccgaatccacacccggcgtaggcgctaccttctacttcacgctgcccgccggttgagcagggaaaacgacggcatatccgccgccccgtaagacttaaactgaagttccagagccagatcgaatgcacgttttatcctgcatgggaaataaccttgtattcaaatgcaggtttactgggaacaggcgtttctatccacacttgagtccgagcaggtcgaagatgtggcgctggaaatcggtgggttccgtgaatgtggtaaaccgtgcggcgtttttcccttggccgactcggcagatgtttttgcagcgcgtggcgagtgcatccatcagggtctgtaagctgtggacgggccacccgtcttgagtctgcttggttcgcttttcccgttgtacggcctcgccgggctgaggcttggcgacggggtcgcgggtccagcgagcggcgtgaagttcttcgtcttggaaccgaacgggcgcgagtttcctgcacaactcccattcgacgtagtaagccagcatgcagagaaagacgtgggctttcacgtggtccacggtgcggtggtggatgggccggatgcggatatcgaggcgcttgatgcaccggaacgcctgctcgacttgccccaggctcttgtacgcacgaacggtgtcttcggcgctgagcgcttgtttcgactcgctcgtgcggataatgtagatgccgtcgagccgctcttcgtgctggatgcgtttggcgttgcgggtgaacgcgaaatggccgtcttgtatgtcgagcacgaagtgtttgccggccttgaagtggttgagaaccttgccgactttcaggccgatctcggcggccttaagcggtttgttggtgcgccgcttccgtttgaccatgaggtgttgttcgagtcggtcaagaagactgccaagctcatcctggccagcgacgccggtgaacgcggaagttatctccacaccatcgcggggcagatcgcgcagatcgcgttcgaccaccttgacgcgcctgtatgcgttgtcggggccaacaacgggatcgtgccgccggccgagttggaaaaagagtacttcccgcagccggcctggctcctcgacgcgtatcacgcacaaataaagcctctacccggttaccagccttcgacagagcgcacggccgcagagtttgtgcggcagtccaagtacggcgtgctgtaacggaaattgaaaaccacaaagaacgcaaagagcacggcgcggcatagccgcaaccaaaaggcgcccgaacgtgtcattccgaggagcgctggcacatggcctctattcttaattcaaaagcctgagtccagcgcgacgtgggaatccccccggtatttttcccgacatcggtatgggaggagcgcttttattcggttttgggatagcttctagttgcatgggcgcattgttcacacaacaacacgcctataaccatgcaacaaaccaatgtttacgccccctcacacactacaagaaatgaaaccagcctctggaacttcgggctaatgaaatggacttcagaatacccacaaggcatggcgctgtgtggagcgcggcagcttgctgccgctttttcggcagggaggccttgcctgacaagtgcgacattgttcgcgaggaaagccttgcactataaaaagcggtggcaaacgcgctaagagcgtccacactccatacgtcaccgtatttacgaatagacgtactaagccgcgccaaatatgtcgggccccatatcgcatccggtatgcgtagggacgtaatcgagactcttgccacgggtccctactggatccgcaggttgcgattatcaataactctcctggccttgcctgccgatcgttcgagcgtctgtgggggcacaagttcaaccgtagcgcggatattcgtgatggcctggattttccggtcgatacggtcccgcagggcctgcatctggctcattttgtctgaaaacatctcggggcggacctcgactttaacggtcatttggtcgagcgcacccggacggtcaatttctataacatagtgcggcgcaataccttccacctgtagcagcgcctcctcgatttgcgacggaaacacgttgacgccccggattatcagcatgtcgtccgtccggccggcgactcggctcatccggacggtcgtccgcccgcaggggcacggctggctgtccagggcggcaatgtcgcgggtgcggtaacgcaaaatgggcatagcctgtttggtcaacgtcgtaaaaaccaactccccgtactcgccatccgccacaggctcgagcgtggtggggtcaacgcactcaacgatgaagtgatcttcctggatgtgcatgccgtcgcgtttgtagcactcgccgctgacgcccggcccgataacttcgcttaacccgtagttgttaaacgcatagacatcaagctcatcttcgattttgcggcgcatgtcttcggtccacatctcgccgccgaaatgggcgtacttgaggttaaacttgcgcgggtcaacgccctgggccctggccgcttccgcaatgttgagggcgtagctgggcgtacagaccagcgcgtccgcttccatgtcctcgagcagcatcacctgacgcggcgtattgcctgaagcgaccggcaaaaccgccgcccccactttttccaccccgtagtggaggccaaacccgcccgtgaaaagcccgtagccaaatgcaatatgcacggtgtggtgcgaccgcagcccgcccgcgtagagaaaccgggcgcagaggttggcccacgtatcgaggtcttcgcgcgtatacgcgacgaacgtgggcttgccggtggtcccggacgagccgtggaatcgggctacctgctcgcgcggcaccgccagaaaccccagcgggtattgccggcggaggtcttctttgatcgtaaacggaatccgccgcaggtcgtccagcgaacgaagatactccgccgagatcttttcgcgcgcaagcgattcccggtaaaaggggacgctgccgactcgccgtaccacgtccctgagccgatcgagttgcagatcctgcaactgcggccgatcaagcgtctcttcaggggaccagaccccgttttccaaggcaaaatccggcattacgcacctactatgcctgtgttccgcaccgcctgatcccggctaccgttcggcccgttcgtaaagctcgacgccgcccacaacattgatattcttggccttgagcagttcgatcgcggtatccgggttgtcgaaccggaacaccagcaccgctttatccccgctacggacggtgaaggcgtacatgtattcgatgttgacgcccccgccttccatgatggccaggacgttggcgaggccgccgggtttgtcggccacttcggtagccacaacctccgtcacgttcaccacgaacccggccttctcaaacacctctttcgctttcatccagtcgcggacgatcagccgcatgatgccgaactgctgggtgtcggccagcgacaacgtcagaatgttgatgcccgcatccgccaggactcggcacggctcgctcagccgccccggcttgttctccaaaaacaacgacaattggtgtattttcattgccgaaatcccttcctctttgccaacggcttacattttgcgccggtcaatcacgcgtttggctttcccctggcttcgctcgatcgtgtgaggctggaccaggctcagtttcactcgaatgcccaaaatgtgggctatttcatccgacaactttttgcggacagtttccatggcgccgatcgtgtcgccgaacacgtcggcggtaacctcgacctggacctccatgttgtcgagccctttttcccgctccagaatgatctgataatggggcagggtgccttccactttgagcagggccgattcaacctgcgacgggaacacattcacgccgcggatgatgaacatgtcgtcgctgcgccttccgatacggcgcatcctgcggatggtcctgccgcactcgcacggctcgggcatcagcgaggtgatgtcgcgtgtccggtatcggatcatcggcatggccagcttgctcagcgtcgtgatcaccagctcgccttcctggccgtccggcagcggctcgcacgtctccggatcgatgatctcgcaatagaaatggtcttcaaacaggtgcggccccgcctgctcctggcattccatggcgacgcccggaccgatgatttccgacaggccgtagatgtcgtaggccttgatgtcggcttcgggctcgatccgttcccgcatcgcctgggtccacggttccgcgccgaacacacccgctttgatgggcagtttccgcatgtcaatacccatctcccgagaccgctcgatcaggtggaggaaataactcggggtgcagcagatggcggtcacgccgaaatcctgcatgatcatgatctgacgatccgagttgccgcccgagatcggaatcacagtcgccccgagcgcctcggccccgtaatgcgcccccaaaccgcccgtaaaaagcccgtagccgtatgcgttctggatgatgtcgccctgcccaagcccgcacgccgcaaacgaacgtaccatcacgctcgaccacacgtcgatgtcgtcctgggtgtaggcgacgacgatcggtttgccggttgtcccgctggatgcgtgcagccgcacaatctcgctcatggggctggcgaacaggccgaacggataggtgtcgcgcaggtccgttttcaccgtgaacgggaggttgtggatgtcttcgagcttctgtaggtcctgtggtttcacacccttggcgtccagccgttcgcggaacagcgcctggtggtcgtacgcccgcttcacgatcgtcttaagccggtgcaattgcagcgcccgcaactggaccaccggcagataatccggtgcactcaccggattaaacgaacttccagcgtcatgcctgaatgcgttcacatcgtccctcccggggtttggctctcaagccgaatatagccaaaaaacaatcaacaaacaaaccaattataggtcctataagtcgtataggtcctattcgcccaaacccaacaaattcgtgtccaactcgactttaaaaccgcccacacttacacgactctaaccaaaaccactcttatccgtcaacccggccgaaaacgtccaggtgccggtccgtaaccatctcgacacgcagcccatccaggcccgcacaagccagttgcgcacccacctcgtccggcgtatacgccgacagcaacgagcggtaatattcttcctgcaacagggccgattccgcccccgcgtatcgccggactatctcggaggccgcctgcgccgaccgcggccgggcgagatcgcgcagaaaaatcagcgtccccggaaggcttacgcgcccgacttccccccacagccgccccgtatccgtgatatggtgaaggatgctgttcgagaaaaccacatcgaacgctctggacttaaacggcgccgccttcgcgtcttgctcgaccggccacagggaatcggccgcgccggctttcttgattgcgcttcgcgccaactccagcatcgcgtgcgacacatcccccgccacgatcttccagccgccccggcgccgccaaagccgaagcgggatatcccccgggcccgtccccaaatccagcgccagcgcccgatccaccggccccgcaagctccaccagccgctcgacaaacgcctcattcacatccgcgaaatcggccgccgcataggccgccgcctcttcctccagatccatcgcctcaggctcgggctgtcgttccattgctgctacctatgtaaagagcccatgcaagtccgggctgtattgtggtgcgggcgtctcgcctgcacatataagatttttttggtaaccttgggcagcagtttagcaggcaaggccatgaaaacgcgcgccgccaagatgccacgtgcaggcgggacgcccgcaccacaaatggcatcgaccaaactaacccgccaaagccctccaccgccgccacccggtcgcgcgggacaaactatcagcagaaatcttaggtccttttggtcccttatgtcccttgtcttgacttctcagacagcctggggaagggcgtaacccgcgcctatgccttccgccccacctcgcgcccgtaagcaaacaccgcggcattctgctcgtggagtttttccggcaggttggcataaacggcctcgatccaaacgctctcctcgaggtccaggtgcgtgctcagcacgcccagcagcgccacgttcagattgcggcggttcacgggcgaatcggggtctttgtccaggtcgccgaacgtctggccgtccttgaggaacatctcgggcttaaaaatcaacccgtcgggccgcatcacgtgctgggccgcctcgatctgcgtactgtcgagcgctaccatgaactgcgcctcgcccgacggaaccatcgggctgaacacttctttgccaaaccgcacgtcgctggtcaccgacccgccacgctggctcatcccgtggatttcgcttttcttcacgtcatgcccggaccggaacgccgcttccgccagcatgttggaagccttgataatgccctggccgcccaggccggcgaacaccacgttggtcacctcgtttttttcaggcattggctttctccgtcacggacgcagtccgggctttctgctttttcaccgacagcaggcacgggcgccgcgcgataatcagcgtcagttcctcgctggccaggctctctttgaccagcgcctcaaaacccgccgggtccacccccgtaaacacgtgcacgttcttgatgccaatcgatcgcgccaagtcttcaaagctcagcttgtgggtatcttttttgttgagcctgacgccggtgccggggtggtcctgcaagcccgtcatggcggtggtcccgttgtcgagaatgaggaccacgtggccggtcggcggcggattgtacgccatctcgacgaggcccgtaatgccgccgtgcacgaacgtgctgtccccgatcacgctgaccacccgccgcgcttcgtccggcggcagcacatgtcgcaagcccagcccgttgccgatgctcgcccccatgcacacgcacgaatccatcgcgtcgatcggcggcaggacccccagcgtatagcagccgatgtcgcccatgatgatgcaatcgagcttcttcaacaccgacagcgccgaccggtgcgggcaacccacgcacagttgcggcggcttccccggcggccggatcggctcgggcgattcatcatgcgccaggatccgtctcacccggtccacgttcatctcatcaaaccggtacatctcagccttgccttcgcacgccaccccaatcgcccggcacgcgtccaccagatacgggtcgttctcctcgataaccacgcagcgctcgacgcttttcgcgaactctttgatcatggtgtacggcagcgggtacgtcatgcccagcttcaggaagctgccggccggcgccgcttcccgcgcgtgaacgtaacacacgcccgccgtgatgatgcccagcttcttgctgccgtcgaaccgccggtggagcggcatcgtctcgccccacgcgtagatttcctcgagcttcgcacgcaggcgccggtgtgcgggccgcgcaaaccccgggatcatcacgcggccccggatatcgtgctcgaaatgcgccgccagcggctcgagccggtttgcccgcggcgtcaccaccgtctgcgaatggcaaacacgcgtcgtcatccgcagcatcaccggaagtttccaccgctccgaaatctcgaacgccgcgaacaggaactcatacgcctcctgcgagtccgacggctcgatcatcggcatgcccgcagcgactgcgtaccgccggttgtcctgctcgttctggctcgaggccatccccgggtcgtccgccgataccagcaccagacccccgctgacccccgtgtaggtcgacgtgaacaccgggtccgccgctacgttcacccccacgtgtttcatgcaagccagcgcacgcgcaccgccgaacgccgcgcccagcgccacttcatacgccaccttctcattgggcgcccattgggccggcccgcccaaagccgccagactctcgagaatctccgtggacggcgtgccgggatatgccgaagccaaagcgacccccgcgtcccgggcggcaagcgccaccgcctcattcccgctcaacaacattcggttcttaccacttgtgtcggtcataatatgtcctgcgctgttttgtagcaccgctgaaaagaaaaaaagacacccaccgcaacctaccaaaattccggcggtcaatcaaatcacccttaaattatgcctgctcgaacccgttcccgcaacggcccccgttttatttttcacagccatcgggacgcctcaacctttcggggccggggccgtatgtgctactcttataactggaaacgtctacgataaggagccgcagcatgggcctgtaccgatttcaagtcattatcgagcaagatgaagacggctactacgttgccgatgttcccgctttgcgcggttgccacactcagggcaagacgttcgaagaggcgatgacgaatatccgtgaagtcatcgagatgtgcgtgcgcgagatgcgcgaagacggcctcgagattgaaacgcagtatccggaagtgatcggcataaagaccgttgagatagcggtgtaagcacccatggcccacgaccttccgatgctgagggtaaaagaactcgtcgcagtattggaacgtttgggctttcagcctcgaccgttgggggcaaccagtcaccgccgctatgtccatcccgatgggcgcagaactaccgtcccatttcatgctggacaagacatagggcgcgggttgctgcgaaagatcttgaaggatatcgaaataacaccggaagagtttaaacgtctcttataggcgcagcgtccgaacaaggtgttctccatgcctcgaaacactgaaaaacaaattattgagatgctgaagaaccttgcgcaacggcttgggcagaaaagcctatcgaagaaagacatcgcttcggtaatggctgtgtctactttgaagtatcgatttgggaatattggaaatgcattggaggcagcaggccttgatcgagtggctccaggggagcatttaagaaaccgaggccctgttctaacggagcgcgcccttttcttagcgttgtatgaccttgaaaagaaaattggtcacgagcccggctacaatgattgttctgcccagtgcaaatattctacaaagccctacttcaaacgatttgggaaatgggccgatgtccttgcgcattaccggaaatggaaatcggagaacagccacatgatcgtctcaacccctgaaggcgaacgagtcgtcgaagaaggcagcgaaggacaggagagctccggaactcaacgtatgatttccatcggtacgacaagaaagaagacaccggaacaactatacggcgaacccattgattttcgaggtttgcgacacgcccccatcaatgaacaaggcgttgtattcctctttgcgatggtgagccgggaactgggttttaatgtcgaatcggtgcaacaaggttttccggattgcgagggaaaatatctgtttgattctaagaaaaacctttgggctaaggctcgcatagagtttgagtgccaagcgtcgaattttgagcaacacggacacgatcctaatcaatgcgatttcattgtttgctgggcaaatgattggccgggctgccccatcaaggttattgagttgaaaaacgaaatcctgaaactgccttcccgctaaatgaggatccgcgccgcgctagtccctacccgtccctgcctggtttgacgcagccagattcaccggggtactgttcttttgtgagcgaacttgcgttcaaatatgtcttcggtcccgcgctatcgcgccggcttgggcgttcgctcgggattgacgttgtcccgttcaagacctgcacctacgactgcgtctactgccaactcggccctaccaccgtccacacgctcgaacgcgtccgtttatctgggccttgcccggtcggccaaggagtgcaactattcttggccgacttccagatgcggatcctgtcgtagcgcttcaagtcataagacacggtggaaactcaggggaaaataggcgcccgcatttttggttgacacaaaataggcaatcgtatatatttgacgccgtcgcgggtgctagcgtgcttgaacagcaaggagcaggatgtgtcgagagagaaacgtcaagacaaaccggctggacgacctgtgctggagaagctgccaagcgcggaattggaagtgctggcttccctctggcaacaggggaaggccacagcccgcgagatccgcgaggcgatgcagggctaccggcccatgacgcacgggtcgatggtctcgctgctcaaacgcctggaaggcaagaacctcgtgtcgaaagagaaggggccggtgggaaaggcattcgtgtattgccctacccggccacctgagccgacgtatagacgaatcatgcgggacctatacgagcgtgtcttcggcgggagtggcgttgccatggtggcgtcgctcttcgagtcgcgcccgcctacgtccgaggaactggatgcgcttgaaaggctgctacgaaagttgcgggagaaacacaccggggagaactgaataccatgcagttgctgcattcaatcgagacgttttcagaggtcgtctggccctacgtcttccatgccacctggcagtcgatgctggccggtgcgctcatcctcggcatcgtatggctgctgcggaatcggtccgcgtcgctgcgctacgccttgttgatccttgcactggtgaagttcgccgtaccgccgcttgtggccgtcccgattgacctatcgcattggacacctgcagaggtaccggtgcgggaggccgtcgcgcctctgccgaaggagtcctcccaggtccctgtcatcgacgtgagcgctgtacctgtcgaggagcctcggccaccttcgtacgttggttcttcgcaagcgcctccagaacaaccacagactccaatgccgccgatgctgccggcggcgcctcagcaccacatggcctggcacacgagaatcttggcactgcacctggcgggggcgtttgtcgcgtgcctttggatcctcggctggacgtggcggatttgggcaatgaggagacgcgcccggatggtcaccgcaggaccattgtacgaacagttcctgagcctctgtgcggaattggacctcagccagcgcgtggacctcttcatttccgaggacaaaacgtcccccatagcgttcggtttgttccgccctaaggtcctcatgcccgcctccataatggacgaactctccacggaccaactcggcagcatcctggcccacgaactcgcccacctccgtcggtgggacctttgggttatcgtgttcgagaatctgcttctgctcttgtggtggttcaaccccgtcttctggctcgttatgcgcgcactccgccggacacgcgaggactgctgcgacgatttgatcctccatctgcgcctcgcggaaaacaccgcctactgcgaaagccttgtccgcgccgcctcgagcatcgcaggtttcggcaggctccgccccgccgtcggaaccgccgagatgctccaccccctcggtcgccgcatgaagcgcatcatggacgtgaccctccgccgttcgcccagactctccattgccggcgccatcgccgtcgtactgctgggactggccgtcctcccgggactccgccccgtcgaagcagaacacgacgcaacggggacgaaccgccgcggcgcggagacggttgttcctgaagggtatgagtatctcatgcctcaactcgagccgggtccctaccggttgcacggaacggtccgcgaccaaaacggcgcaccggcggccggggtcaaggtggcggtattccgcggggaagcgtggcagtggggttacaaggacacctttacggccgatgacgggacgtacgagatcaccggcctgcccgatggggcgtacaacgtgtttgcggtcaccgccgacgcgttcggggccgctccccttacgctgggaagtcctcttttgccagacgaaaacgtgtcgcgagacttaaccctcacgccgttcgaccccgacccgctcgaaggaaccgttttaagcaagacgggtgaacccgttcctggcacgctggttctttctatccgcgaatggagttcctacggcatgagtctggccctgcagataagaacagaccagaagggccgattcgcgatcccgagatggacatggccatacggccggggatcgcaaattctgttaccgccgaccctcgcggcgtttgctgagcggcaggaccccggcgtactcctgggtaaactgccggaaggcgagccgctcacgctcgttctcgatgacggcgtccgcgtttccggcacggtctgtttcaaggattccgggaaaccggctcgcggcattcccgtgatgttacgcggcacgcccgcggacaacgacatgcccgacatcactacgcgcaccgatgaatccgggcgctttgttttcgagcgtctctgtccttttcagtatcaactcgtcatctatgatgccgaggcgggctacacggcgctggagcatccccggctgaaccttctcgacggccaggatgttgtcggcctcgacatgcagatctcgcacggcgcaacaatctcgggaaaagtgacgtttcaagaaacgggcgagccgatacccgcagtccggctgtgggtgccgaacgtccgcccgcctacggtgttgcgagaggcggtcaccggatccgatgggacttaccggctgcagcatttgcctgcaggggaattcgccgtggcctacgccgtcccggatggcgtcgtgcgagagcctcgtccctcggacattggacccttggtggcgaagactgtctctgttggcccggacgagcagttgacggacgtggacttcaccttcgaacgcggcgcgtgcgtgtcgggccgcgtcgtcgatcaagcaggcgatcccgtcaagggtgcgcgcctgcacgcttcgaatagccatcgtaaccaactgcggcccagtcgccgcctcactacgtccgaaacggtgaccgcggaggacggggcctattgcctctggggcctggcgccttccgaggaatggacctatcagttagtcgtaagtgcggacggatatggacggattgagtctgatccattccaagtgacgggcgagattgatggcaaggacttcgtggtccagaggtgcgcgacgatctcgggccgcgtcgtggacagccagggtcgccccgtccccaccgttgccgtaagcatgaagattaccgaaggtcgtgcgtcacagcggttacccgacgctctcagcgacgttgaagggcgctttgcgatgcgggagggcgcctgtcccgggacctacacgttcgagctgtgtaccttgaatatggggttcggtccgtatcggacggtggatgcggcgaacccgccgcttcgagtcgaaggcccggatgacatcgaagggatcgaactcgtgttgcccgacgaaaaagccccgcacgatgccacgcctgcaaagccggatgctgcaccgaaggatactgccgcgaaggcgccggaaatgggtttctccgatggtgtggaacctattcccgccatagacgaacttcccggaaggctcgtgttccacggccgctatgttcaccggagccgcggccgcgagtacgaccagccctcgtctttgtgggtcaaagagcaggaaaacggggctgtcagcgccctatcgcatttgaccttcttcaacgaaacagccttggccgtgggtgatgagaatcaccggcccgcccactacgccgcgacccgcaaggcatcggaccgctatcccgcgttccaggcaaggattgacttccatgccaacaaggcggtccagatccgtcattggggtgaggagaccgacgataaggaattccctatcgacgagggcgccctgttctccctgaactcgcggcccgacccatacgcggttatcaacgttctcatacgcgggttcgggctgaaggcaggcgagggcaaggagttcatcatgtgcgattggggcaacgggccgcatggccaaggcacgtttccctcgtaccgtgtgcgcgtcgaaaacaagggcaaagaggagattgtagtcccggccggggcgttcaataccaaccacctcgtccttacgcaactcaccagcgccgacacgtggttcaagaagcgcgccggccatgtcacggacctttgggttctggacaatcacatcgtcgtgcgcatcgtccgtcaccgggaaccctacgaggtggaactcctcgactacgacgtcccggaccgtttgccgggccagatttcgcgtggtgtcccggaaggagcgcccttggaagtcctctccgcagagtacggtgcgcaggacaagtgggtcgacgtgaccgagccgttgaagcaacgcatccaaggaaacaaactgaccgtcagtagattcaatgaccttgccggcgatcccatcgacggtgtggtaaaggagttgaaggtaaagtaccgcgtgggggaccaaacccgcgtcaccacagtccgcgagggcgaaaccctcgagttggacatcgacctgagctccggggcaaccccggcgggggccgctgcggaataggggccaccggaagacaacgttacagcctggaaggagacgaaatatgaaacaggtgctgattggcgtgggcgtgctgcttgcggctttgttggtgatccctgtgatcgcgtacatgatgtcggggggcaagctggagccgagtattggtgacgccgcggttgcctcgtcgttctccgcacaattggtggatacaaacggaaaacccttcgcggatgcccgcgtctatcttcatcctgccatcggccatccggacaagcggggacaggaccgcgccagcatgcccatgcagaatacggaaaccgatggcgagggcaagttctccttcagcagcgtcagtccgggcacctacaccttgcagttctattggaaggacggaggggacaagggaaacctctacctcgacgcgcagaagttctggctggatgtctcgccgggggccgccgcctccgaactcaccattgtcgtgccatcgctggcggcccactcggtgggcggctacgtgcgggatgcgcaagcccgtcccgtcgccggcgtggcggtggaagccatgggcctcgcggactactcccgatcatcgaccaccaccgacagcgagggacactacttgataagaggcatcgcgggggatgtagcgggtgcgatctggttcaagggcgccgggaaagcggaactcaaggatatcggcatcggcacaaccgacgcaaacgttacgttgcgttagcctgcgaggacgggtggaccacgaaacacgccgaagccggccgacgttctctcttgtcgcggtccgccgtcctttcttttgacaccgctcggggccgtagggtacggtcttccctaccaggctgatctcgtcagggcccgacttccagcggatcgtttggtctatcatgtctccgtagatctcagggcagtcgttcaacgagtatccgtcgaccggtgttccgtcgatatcttcgagttcgacacgcgcgcttcccgctgcgggcgtggcgtagttgaggaccagtttttcccctttgaaccgaatcggcttcgtgacgaactcaccgcccccgagcggcgcatgcatcaaaacgaacgcatcgacgcgaaaggtgtaccgtcgcatgcaattccccgcgattacgctggtgtgcaacaaaagggtaaagactcagagtatggcgactcctgctgagtttgacttgcgccctgcccaacgggcatcgttgaaactacggcgcggaaaatctgttgggtacccgaatgtttggtgttggccgcggccctgattctgggcgcggcgcatgccacgccgataggggacgacgatggcggcactaccgtgatccgcttctcctattggggaaacatagccgatgacgccattttccgcgaagtcgcggaatcctttgagaaaagtcatcccaaagtccgtatcaagttcgagtgggtcgtcggcgactacgggatgaaactgcccctcctgctggtcagccagacggccgccgaccaggtgccgcgcgacgaagcccaagaattgcgcaagaccaatcccgaactgctcaaaaagacccgctacatttggctgaagaaccccgagaacctcaccgacaagcaacgcgcgcgacttgggcatttggagcagttgaacctgcgcagcaaccgcgcctatcttctcaaagaaagcttccgtgaattctgggactatgacagcaaagacggcgcccgccgctttctcaagaagtggttctggtgggcgacacactcccggctcaagcccatgcgcgactttgcctggacgatgaagaaccacctcgacgacctcctcaactactttgagatgcgcatcgacaaccgcgccgtcgaaggcatgaacaacaaggccaaagtcgtcagccaccgatgctacgggttccgtaccgccccccattacatcaccgccctatatcattgcctgggcgacctgccggagcccaaactcgtgcacaaattcttgtgaggaacctctttttctttgcccagcagtacttcgtgaagggcatcgtactcacagggattaagggctgaatattccaaaccttgtggccgtcgggcgcgattctctttgcgcaatgattccatgaacagcatgcccttaagagaagtctgtaatgtcatccgttctcgggccaccattgaagattcctgctgcatatgcctctccggctttttcgaatggtctttgaggtcgtgaatgggcagcgcgcgggggtagtatgtgcctggccaaccagtcgatctcctgtctgcccgtgtggttctccatcccaccagaccaagacgaagacggttactacgtcgcggatgttcccgcgttccgcggttgccacacccagggcagaacgttcgaggacggaggcaatgaccagccagcatccgcgaagtcatcgagatgtgcgtgcgcgagatgcgcgaaaacggcctcgatactaaaacccagtatccggaagtaataggcatcaaaaccgtcgaaatagccggggaagctcccatgggccacgaccttccgatcctgacggcaaaaaaacaactacgcctcctctttcgagacgcgcctgtaggtccaaaatcatttgacctgctattgccggcgattcgggtccacgattcgggtccacgcttgacgcacccgctctcccgcaggtactgtaaatctatggctcagaaatacgtattcggccccgccctttcccgccggctggggcgctcgctcgggattgacgtcgtcccgttcaagacctgcacctacgactgcgtctactgccaactcggacctactactgtccatacgctcgaacgcaagccctacgtgccactcgacgaggtactcgacgaactccggagcaagctcgaaaccggcgtcctacccgattacgtcacgatcggcgggtccggcgaacccaccctctattccgagatcggcccgctcatcaccggcatcaaatccctcacgccaacgcccgtagccgtcctcaccaacgggtcgctcctgtgggacccggaggtccgcgacgcactgaacctcgccaacgtcgtcctgccctccctcgacgcctctgacgcgcagacgttcctcgccgtcaaccagccgatagccgccattacgtatgagagaatgatcgcgggcctggaatccttccgcgagacttactccggccaaatctggctcgaaatctttctcaccgcccccatcgaacctcaaagccccgccatagaccgattcatcgactgtatcggccgcatccggcccgacaaaatccacctcaacaccctcgcccgacccgcaccaggctcgaccgccgttcccgtcgcccccaacatcatgcaaaagatcgcacgccgcatcgggcccaacgccgaagtcatcgccaactttccgaatattgtggcgcaggcgtctcgcctgcacgtctccgaagacgaaatcctcgccctcgtgcgccgacacccctgctcactccaagatatcgccgccggcctgtcaatccccgttctcgaagccatgaaacacgtcgagcacctgctccaacaaggcaaactcaccgccgaataccgaaacaacgtcgccttttacctcgccgccaaccgcaattgaaccaacgcgcgggcgaggcgttcttccgcagtcaatttaacccgctgctgctcgctgcattgccccatcgcacggacatccggccgttgccgccgtcgactacggttaggaaccgcgttgtgtcaccatccgtcagcggttcaaaaggttgtgaagcggcatcgtcgcggggcggcagcgcgaactccgtgtccggaatcggctcgttcatgccctcgtaggcaaacgtatacaggctgcgcatgcatagttgattgacggcaacctgaacgggcatcaactggtgcgagtcgatccaccatcgaatgatcctggcctccgtccagtcgccgggaaggtcggctgtagtcgacttaatcacgtgggcttggcggccgttaaaactgaccatcccttcgtattcgagatgcagttccgcagtagccgcgtctacgtcatgaccttcaaggtcaaagggatcgcatatcaagatgtttttcttgccgattgtgtcgtgcggcgcagcctgcacggattcctctgtctgcccattcttatcggtggtggtacacagccaccagcactggtccccatccccggctacaacgaacctgtttgtggataggttcacgtcgccgtagaactggcgattcccctgaaacctgaacgtgccgccatcggctttaataaacggcgccaattcgacgggcacgacgccaaacgcgtacgttaccatgacatgctcggacacagacgtcagatgctgccgcgcctggcgcatctcgctcagcaccgtgagcaaccggggatctttcgccgcctttttgaaccgttcgagtgagctctcggaaaacggttcgcgcgttgtggacaggtgcagcgggaccggcgcggctgccgccccctcgaccgtgcgaaacccccgaagttcgatatccccctgccaatcaggcggaaacgataccggcaagagaaaccgctttccacgctcgtcatactgcacgtccgccagcagttgtgcgccgcccatcaaggatctgtccttgctcaagtcaacaatgtaacccgcggacggatccatcggctggtcaaaaaccacctctatgaacgtaagacacgcaaccgtgtcacccggcgcgggcgagagcgatgcgacgcgcggttcaggggcgtccgcccggctcggtacagccgccgtctcaaagccccaacggtactgcgcggccttcacgccatccgcggaaaggaatccgtcgtcatcactgttaacggcaatgaattgttgttcacccggcgttaaccgtacgggaaccacgaactcgtacgactcggcatcgtactgtgccgccgaaaagtctctcaggccgcccttctcgaaggcaatccccattctgtccggatccataggccggtcaaattggatcctcagttccgtttgcacggccacattcttggctgcgtgcgccgggaagacaccgaccacaaccggctggccttcagcggacgcctgggcgggctcctgttttgggagggccgtcttgagtgcggccaattcctcctcactcggcatctcgacgagggccggcgaaaacgccgccgtcgagacgttcgtgacataaatgcgtttggatggcttgccttcttgcaggttgaggccctcgcgcagaatccacgcgtcatcctttttttggaactcggcccttaatacccactcccggtcgtccaacagcgtactgtggtaggccagaaccttgggcgcggattggcttccgaaggccaggaattccgggccaatttcgatcagttctcttctctcgccaccatcgggtagttgcgcgaagtcctcctcgagcacgggcacaaattccggcgtctgaatgtgcagtcgcacccggctgacggggtacgagctttttccgaaccatgttccgcccaggccgaatcccactgccgcgccagtcttctccggttccgcctcaatcactacgatgttttcagaaggcgcatcggtcgactcgacaatgcgcgcattctccggcaggccgcgcctggcaaatgcgtggagcgccgtgtgccacatcaatccctgccggtacgtcgacgcgttctccatcggcatgggactccgctggagaaggccgtagggctgcaaatagaccgcattctggctgtcaaacaccatctggctgccctcagtctcccagcggcctttatcgccgtcaatccaaacgcggtgcaccaactcgggcgtgtttcccggctcgggcccccccatgtttagcgtgtatcgcagatacgttggtcgcgggtcgagccacacgcggtttacctcaaccacctttctccagacatctttgggatcggacaggtccaccggtttctcaacggcttccgtggaggcgtcggccgattccgcagccgcagccgcgacgtcggcaactgtctcggttacagtggctgcagccggcgggacggcggccaagtccgcggtgctcgtaacaacagccggaatcggtttctcaagtgcctccatcggtccgatggctagtgtgaccacaagtccagcgacaagaagtattggaaccgcgataagtttgtgcgctatgacgagttctcccagttgtcttgccggatacagaatacgtgtcagactggctgtctccgtcagaccccacgaaaccggcgccacaacaatcgctttcatgaccgtcgagaccttttcctgggacaccctgtaccggcccgcctcgacgcgtttgagcatgcgctcgccgagggcttcccgcgcccgttgcagtcgttttgccaaagcgagacgactcacgccgagcaaggattccatctccgtgagggaacgcccggcaaagtaatgcatcaatagcacttcgcgatggttctcgccgagtttcagaagctcctcgtgcaacagcccgtccaattcagccgcctccccactcgcagatggctcgacagccaacggcggcgttgcttcatgcagggacgcttcgcgccctcgccgggccaacaaggtgttacacacgttccgtgcgattgtcagcagccacgccccgaacttctctttaacgcgaagccggtcaagagactgaaaggcccgcaggaacgtctcctgaaccacgtcctccgtatctgacacatttcggagccgggccatagctgtggcctgaacaacgggcatatatcgctcgaccagttccccgaagcgctcccgctcaccggaaaggacgtcctgtatcgcctgtttatccaatatgacttctcgcccgagcattgtttgttctcctgtagctcatataatagaccgataagcgtcattttgttgacatcttgtgtaaacgccggtcgagaaattaaacacccttgctagcctcacgtttttcgaggtacggcgccttggagtcgtcggcggactactgcttgaacgcgcgtggggctcagcttttccctaaagcgcaaagggctgtccgtatgggcaacacgcagtcgggtggtcatggcacgtaatgcttggcatgacagtatgttgcataaccattgacgatcttcagaggttcttggaagggcagaataaggccctgcataaatcggatgcaagatgagaatcggtacgcgagcaaggatgtggaaatgtatccgggcggctggatcggccttacccggggaggcttccactatgtcatccgaacatctttcctctcaatcattattcagcgcctggttagctgaccatacgggcgtaggttgctctgacttgtctgcaacgatcgcataacgaattccggggctactctctctatttttgggtcccatccttactcgcggaatcaagagcatacagacaaataaaaacccggcctccagttctgttgaaatcctgtcataatcatttcgcatcctgaccttgatttccgtacgcgccagtttccgtctacttctccaccggcaactcgggacgtgcagcccattcggtccagccagcgtcgtagtacaagacatccttgtaaccaagcaaccgtttcaagacaaagaatgtctggctcgcctggtggccggtgcggcaatggacaatcacggttgcatcttttgacggaacaatggctgcataggccgccgaaagatcggcaaccggtttgaacgtcagcactccttcgttcttcaccacgtcttcggtgtagggccggttaatggcgccggggatgtggccggcgcgggcctcgtcagacttggcgccgctgaagtattcagggggacgcacatcgatgatgatggcggatttatcctgctggtgcttgagcacagtcgcggcatcaacagtgaacgtatctgcccccggcatgggcttatactccgactcctgtaccgacggcagcacggtatccataggtcgcttttcggcggcccatttcccaaacccgccgttgagcaccgcgtagcggagatggccgagccgttcgagccccatgcagggcaaggtggcgtcatgcgccttatcgctgtagataaaaacgagcagattgtccggcgttatgcccatcaaggacaagtggcgcgccagcaggtccgccggcagcaacatcgacggtagtcctttgacgttgccgcggaagctctccacggcaaggctgagtgccccgggaatgtggctggtgttgtattcgggctgcggcctcatgtcgatcacgacaactccggatttcccaaggttgtccgcgagccactgcgtctccaccaggccaggcagtcgttgattgtccatggctacagggggtgccggtgatgctgccggtaccggcgtggcgaccgcccgagttgccgcggccgtcggtgttaccgccgtagccgatcttgccgtaaggaagaagttgcgccatgccgtcaccttcgcagccaacgcttgcgggattggttctccacgcagggacaccggtttcaggcaccgctctatgaagcccttcaaaccgtcggtgagcatatagatgttggcgtatcccattctttccagtgcgtcacgcacctgggcggggtgcgtcatgccgttcgagtagaggacaaccgtcttttgccccttgtgcgccgccaggtactgcggtaactgggcgagaccgacattaaccgctcccggcagatgaaaggccttgtattcgccatcagtccgcacatccatcaggagcaaattgggatcacccgccagcaaccgatccgcaagttcctccggctcgatatgatcgccgccctgctcgacttctttgagcagcgattcctcgccaagagccgattgctcgtgtgtcgccagttgggctaccgcggctgtggcaggggttccggttaccggcaccaggaacagtccggcggcggcaacaacaagtgcaaggctgaaggccttcaggaaaggcgaacggaatagggcgccgcccgtggcgcgcgctttttcgatgtactcggcgccccagaaacagaccacggcggcaagcgtgaaggcgacggcaaacaacggcttggacacgtggagcgtgtcgtaaacgaactgcacgcccctttcgccagaggtatacaaaggtttgaccagccagaaaagttcgttgaacaggacgctgccgccaatcgcaccaacaagaaacaagagagcgtccatcttgcctgcggcgagtcccgcggcggccgtgcccggacaccatccgcccatgacaaagccgacgccgaatatcaagcctcccactatctgggcgccgtagacggtatccataaagaagatgctttctgggcggacccagccaaacgccaggcaataacacaaacccagcatcgcggttatcagcgcggtaaacatgaccttgaggacggtcatgtcgcgaaaatagaaaatgcccgccaatttccgcgaactgctgaaccccgcgcgttcgagtgaaaacccgaagaaataccccaccagtaacgccacgaaaagagccgagctggccccgagggaatccgaaccgtagaatgtctcaatcattccattgcctcctcacgaaccacgcggcggcatagcccccggcaaacaaacacaccataaaaatgaggctgcccgtcagcagcagggccccgcctgtcaaggcttggcctgacgtgcacccttgagccaggcggctggcaaagcccacgaggagacctcccgcgacggctaaaagggctcggcgtcccgccggatacgcagcgcctcgctcgatctggaacgagactcggttggccaggagcgccgagaacaatcctcccaggaagatgcctacgagcataaacacgaggtaatacttcaagggcgagccgctccacgggccaaaatattcgctggaggccacgtggccgggaacaatacatccttcggtaaacgcggcgactcgtgcaattccgccggaagcgcccagcccggctccaagcaacaagaacgaggccaacaacgtgagtcccaacagaatgccggccaaataagggttccaataagggttcacttttgttttctcgtctatcatggttagcaccccgcgcttttcttcttggccggttgaggggcggcgggcgcctgggatgcaggcgcggacgctggcggagccgggggagctgcttgcggcatggaacttcctgccgcagcggcagatgcgcccaaagccacctctttgaccactgggttcagttccgaagccgcccagtatgcttccagtcctccatagagcgcccgaatcggccgcgtcgtcttctgcgagagaatgcccgcagccgccatggccagggaaccgtcccggtctacaatgaccaacggcgtcgtgccattcagatattctgagttggtgataaggtcgccaatatcgacgtttcgcgcccctggaagcgtgtagtcagcaaacatcgcgggcggccggatgtccacgaactcgaaggtcccgggcaaatccacaatcatccgtttcaaatccgaagccgaaatcctttccggcagattgaccgccacccttggcggcggtggcgttgccgatgcggaaaattgagccgtctgcggggccaatgccacgggatatgacgcggccgtgtcgaatgcggttggcagtgccgcatccgtccaggcggtcattccgccgagaagacttgccacattcttgaacccctttcgttccaggacacccaccgccatgctcgagcggtaccccgagttgcagagggtgacgaccggttgcgcggggtcaatctgggccgacagtgtgtcgaggtgttgaagcggcaagttgagtgaggccgcgatacgtcccttggacaattccgccgccagccgcacatccaggattatcggagcgtccgccttctctacctgtgcgttcaggtccgccggtttcacgagcgtattcttcgccaccggctggctggatttcagccaagagtcaatcgagacaacccccgcgtgatacccgaccctgtgcaaccggtagatggcctctttcatctgcggagccgtgccgcacacaaccagtctggcattccaaggcaccatgatgcccacccacgtttccagccgttccgtcagaccaatattgacggaactgggaatgtgcccgatcgcatagtcggcgtcgctccggagatcgaccacgtaggccttggccgggtccgtcaggttcacatcggctggatcttccttcggcatcggcgcgctccaatccaccaggtccggcccgttccggttcaatgccgcatcgtggtggaaatactgcggcgcttcgggcagacctgcgaggtctgccgcaatatactcgttgcggcccttgtgctggaggtagggattcttggcgcgttctgccccgatagtcgatgagggcgcatcgctcaggttggcgccacacaaggatcctgcaccatgcgccggaaatacaaccaccgcgtcaccgagcttggcaagcttgttcacccacgtgtcgaagctcatacccgcgagttccgagcccgtcatcgtcccgcccagaaggtccggtcgtccgatactccccacaaacaacatgtcgccggtcaggaccagttcaggcatatcgggtttgtctttgctgaagacataggccgtcatgctgtccggcgtatgccccggcgtggccacagccttgacggttgcctcgccgatctcaatcacggtcccgtcttcaagaggcttaaacggatattcggcttcgctgatggcgctcgcgtagatggggctgccggtcgccttcgccatttccatatggccagcgacaaaatccgcgtgcgagtgcgtcaggaaagtgcccttgaaactcagcccctccttcttcgcgtagtccagataagcgaatatatcccggccagggtcgaccatcagcgattccttgccgcttaccaccatgtaggaatagtggctcaaaacaggcaacgtaaactgcacaaggttgaatcctggatacttgtagacgtcgacaaccgagtagtgcgtagtatccggttcctgcggcgattcagcccatgcaatccgtggcgctgcaaacataaaaaacagcacagacatcaggacggcgcagacgcatacacatgctttcatgtttgacctccttggaaatcttcgaaaagctcgatattccataacgtgaaccgttgtttcataacacaaattccctgtcgcgtagggtcaaaatatccagccaacgtgtaaccaattctagccaaacgagttgcgcttaagttgtgtgtcggcactgaaccgattgactcggcctcaacatgcgggcatcatgcctcttttccatttggaaaggattgcccgttctcatgccggaattcatcctcaaaccctggcatctaatcgtgttgtttttggctttccatatcaatctggaaacgccggtcgagaagtgcagcaccgtttgtggcggtcgaagttgctgagtgattggctgttgagcacgaggtcccatgcgccatgcacttgccgtatgtgcaataagcattcatctgcttataacgcttaaaactttacattgcagtatcctgcaaaattattgacgctcggcaaaggcccgcgtaaaggcagaataaggccctggcgtgggccgtgcgcaagtagaaaatcggtgtgcgggcatggatttgaaaatgaatatccatttggtccaggaaacctcaaggctcatcatcgcgttcccgaccgtgattgcctctttcttgtgccggcatggtagcatagcgacaagagatctgaggagtcgttccatgttcaagagattgatgctcgccgcattcctcctcgcaaccatcctgacggccgctgtgctcctgcgcgccgtgctggctaagtcgcgacagtttccgcccgagacgcggcaaccaatgacgctgaacgatgaaacagcggcggcccatctctcggaggcgctgcagtgcaagaccgtttcctacatggaccaaactagatttagcggcgatgagtttcgcaaactgcatgcctgcatcaaaaaggcctatcccggtatccatgcccgcatgcagcgcgagttcgtcaaccaatacagcttgatgtacacgtggccaggaaacgaccccacgctcgagcccatccttctcctggctcacctggacgtggtcactgcggaggaaagcccactggcgtggacgcatccgccgttcggcggcgtcattgctgagggctgcgtttggggacgtggcgcactcgatgataaaggacgtctcatggcaattcttgaagccgcagaaacccttgtgcaagccggctacatgccccagcgcactatctatctcgcgttagggcacgatgaagagttgaatggggagcagggcgcagcccacatggcgtcactcctcaagatacgcggggtgcaggcagaattctccgtggatgagggtctcgtgatcacggacggaatcgtacctggcgtcgcaagaccgctcgcgctggtagcccttgccgacaaaggctatgcaagcttcgagcttctcgtcaagcaggagggcggccattcttcccaacccccacccgagacctcgatcgagattctggcggccgcattgactcgcatcaaccgtcacccgatgcccgtgcgttccgagggactgatgggcctcacgttggactacgcgactccggagatgagcctgccgtatcgcgtgcttttctccaatcgctggctgttcggcggactcatcacgcgggagcttgaacaagcgcccgccacgaatgccggcctccgaacgactattaccgccacaatgttcaacgcgggagaaaaggacaatatgctgccgtctaccgcacgggcggtcgttaactgccgacttctccctggagatacaatcgagcgcgtaaggaaccatatccgcgaagtcatgggggatgaccgcatcgagatgaatgtcctgcccggcgcacataacgcatcgcccgtttcagatcatgcggcgcggggctatcaggccattgagaaaagcattcgacacgtgtggcccgcggtcgcggtagcccccagcctcgatatcggcgacaacgattcgaggaactacgctaaagttgccgtaaaccagtaccggttcacccccttttggtttacagaacaagaactggccatgatacacggtgtaaacgagcgcgtcagcatccggcgctatatggaagcgatccagtactatattcagctcatccgctatgcagcaggatgatcattacaggcaacttccgaggaaacgctcgagattcagactggactcagtcttcatacctgaacgataccttgatcctcgctcggtaggcaacgacttggttgttgtcgaccttcatatcgagttgggccacctcagcaatgcgcatctcgcgcaaggttttgcccgccttctcgacggcgttctttgcagcctcttcccatgaattcggcgaggtgccgataatctcgacaactttgtagacgctctcactcatatttactccccttccgtggccgggtcgtgaccggcggctgaaaaccgatactctccatgacctgttccaccagtgtagacttaaaactgacaatcagcaactggtttgtgcaacccaaatccgcaccagccttcagtacgccccgatgcccgggtctccgaacctataggttgaatcgcgtgctcatcaggtagtggatgggctgctcatcattgctgtactcgtggtaggcaacgacgacggtcccatcagccagttgggtcacgctcggatacccgatgtgccaatactgctgcataactaatgcatccagaagagtacgcgaaccgctgcccagcgacggcgccggcacgcccccctccctgatcacgaactctttaccgatctcccaagtccggccgtcttgcgagatgcagccgcgaacaccccacggggccttcctgtagccgtagaccgccagtacgcgtccgtccttcaactgcacgacgtccgccggataaccccagagcgacgttctcttgggcgggctccacgtgactccatcgtcatccgaacacgtgaaccacatgttgtcctgtcgatttggtttgtggtgggtcctcatcaagcacaccagggtgccgtcgctgagccgcgccatccctggctccgagaagctgataatgccggccgcgtcatacgccactgtggaccagtactcccagttgtcaccgccatcatccgatctcaacaagaagcagcggctcggctcggctccgttttcccctttatccgacagtgttccgcccaggggcatgagcaaccccccgtcgggaagttccatgatgtgccccgctcccgacccgccgcaagcgtaccaggacaacgatgagctggcgataggattcgtgttgacctcaatggggtcagtccaggtcacgccgttgtctttggatttaagcagcgcataccccgtttgcctcttgaggcgttcgggcatcccgggaggaggcatttcaagcgattggtcgccttcgtaattgattcccctgggtgcgatgaaattacacacccgagtgtgcatcagaatagtcccgtcggacttctgggaaaaggcacagtcccagttgcccttaaactcggtgtagggccagatgacccgcttggcggcagtgttccaggttctccccccgtccgtcgatttgataaagcaagattggccgctgtcggcatggacgggatatctttcctcgttgaatcccaaaaagagctccccgttttgcagcaggacgatactgacctgattgcatgcatgggccagacttggatccttgtacacgactacatgctcgacatctttaatgcttaccttggtagttgcagtaacatcatttgaatctgccgcgtacgccgacactgtaaagcctgcaagcatcatcaaaaccgccaaaattgccattcttctcacgagacatctcccttccttccgacaagccaacgtttaccatatgttctgcctgcgaccatcgcgggcaagttctccgcgatcatacaggcccggaccgacgccctcaagaccagttcggagggcgttcaaggcccaataacacctttcgcgagcagtcctcagcgctgttcatgcgaattcgcgcagaccgcccaatcattatgagccatttacttgccgtatgtgcgacacgcagcctggtgcttatggcacgtaaagctcagcatgacagtatgttgcaaaacagttgacgctcttcgggcgcttgcgtaaaggcagaataaggccaggacaggggccgcgtacagggcgagaatcgctgcgcgggcatcgctgttgaagaaccggatcaggcgaagcagttcggacaggatgatccggctatcaccatcttggtcggctgtgtagctcgccgggggttcctcatcaccctctggtacaggcctccttcgcccttgtctaactcatgaagacccgtagggaacgggaaaagcccgcattcttgaaaaaaaattcacgcgcggctacgctggtctacgggttaggcctgtcctatcatctgcggaaggagaccggaatgcgcaagacggtccggaacattattcttgtatgggtctttctctcactcgggttgccgttatgggcagacgggatgggctttgatctgagcctgcagcaatacgatccggtcaccggtgagcgaacactggtcacggggaagcttgtcgcgaccaagacggcggtcgtcgtggttgatatgtgggaccaacactggtgcaagacctacaccgcgcgcgtgggcaatctcgtcccgcgcatgaaccagacactcgacgccgcgcggaaacttggcatccccatcgtctttgcgccgtcggacgtggtcgatttctatgcggactatccccagcgcaaggcgatgcaggccgttccgtcatatccgccgccggaaccaaatacattcgagccgccgccccaacccgtgggcaaggaccgatgcgagtgcgggccggatcagccgtgcccgacgggcactcgagtctggacccggcagcacaaggaccttgtcatcgcggagagcgatctcatcgtcgactgcaacaacggccgggagttgctgaatttctgccaggacaaaggcatcgacacacttgtctatatgggcgtggccagcaacatgtgcgtcctctatcgcgagtgcggcatgatcaacatgaaacgccacgggcttaggctatgtttcgtgtcagacctggtccaggccatcacagccaatggcatcgaccccggaagcagggaactggaccggaacttcacgccggcgaagggcagcgccatcatccagcgatatatcgaacaacacatcgcgccgtcgttcgagagccgccagttgttggccgcggccagtatgggaacgcaagaccgccgcccgcacattgtcttcgtactcgccgaacaggaatataaatcggacgcaacgttcccggccttcgttcaacgctatcttggggacgatttccgttgcacgcttctgaccccggaatcccatgtaggcacgggccgcgacaatgtgccgggactcgacgcgttgtacgacgcggatctgctggtgttgagcatgcggcggcgggcattgccggtcgtgcagatggatcatctcgaacggttcatccgcgcgggcaagccgcttgtggcggtgcgcgtcagcaccgtcccgttccagttgagcgaccccgcggaatgccccagcggccacgtggtctggcagaagttcgacgaagaagtgctggggtgccattacaagggctacgattcgcgctcacgcaagacggggtgcgacgtgtggtgcgccgcgcaggcgaaggaccatcccgtcctcaagggactggaaagcgccgcattccatagccccagttggctgtaccggcttaatccattgtcggacaccgccacgctgctgatgcaaggccgctggtcggaagacgccgcgaccgagccggtggcctggacgaacacgtataacggcggccgcgtgttctacacctcgctcggccattgggacgatttcatgaaccccgcgttcaaccaattgctcaagaacgcgatctactgggcgctggataaggacgttccttgaagacgcatttgaccgcttgcggggcgctaccggcttatctacaatcggttcgacagattcgttggggatttccagatacatatggagacaaaggacatggctgacaacaacgccttacttgacaccctcatcgctaaggtgactggcgggaacgacgacgagcggaccgaggcttggttcaacgccggcaaggtcggcgcctccgcggtcaaaccgttggccggggttatctcggcgcacagcggcgaggcggcgctggccgccaagcgggcgctgtggcagatcgcgcgttacgcggctcggcccggcgccgacgccgagcggcaatccgttgtggcggcattggccgccctcttgaacgacgaaacagagtccgttccggcacgtagcgaggcgctctggatcctgtccgagatcggggacgacgcagccgtcgaacccgtggcgagtgtgctcagagacgaggccctccgcgaagacgcgcgcatggcgttggaacgcattcccggcgaccgctcgctggccgcgctcaaggccgcgttcgatgcagcccccgacgccttcaaacccaacatcgcgcagtcgttgcgacaacggggcgtggacgtgcccggtgtgccgtgcgtgagatttgttccgacgaagaagaccgcggttcaacccaagacggagaaatagtctcgacaacttaatgaaggacatgacgtcatgacactcagtaggcgaggatttctggcaagtgcgggtgcagtgttgggctttccgtatatttcggcgatagcggcgccggggaagccgggggcaaacgaccgcctttccctggcgcatatcggcatcgggggcatggggtcgaaccatctgcagcagacattgaagttcgagcgcgatggcgacgtccacttggccgcgctatgcgacgtggacgagaaacggctcgcggcagccgtagggaaatgcggccccggtgtagacgcgtaccgcgactaccgctacatcctcgagcgcgacgacatcgacgccgtcgtgatcgccacgcccgaccactggcacgccgtgcagatggtccaggcgtgcgaatccggcaagcacgtctacgtcgagaaaccgacgtcggtcacgatcaacgacggcaaggcgatggtagcggcgacgaagaaatacaaccgggtggtccaggtggggtcgcaggcgcgatcggccgagcccgcccaccaagcgtgcacgtacatccgcaacggcatgctcggtaaggtccacaaggccacatgctggcacaagctcaatccgacgggcggcacggacccggatggcgagcccccggcgcaattggactgggacctctggctcggcccgctgcgctggcgtccctacaacaaggcctactgccccggcgtgttccggtgggtcatggaatccggcggcggcgtgattcgggatcgcggcgcgcacgtgatgagcatcatccgctggtgcctcgacgccgacgagcagatgccggttaccattgaggccaaaggctatccgcccaacaaggggatttgggactgcccgccggagatggaggtggtctacacgttcaaagaccccgattggcaactcatctgggcgcagcccggtgaccggcagagcaattaccccgacaagaacgatgatttcggcatggtattccacggcgaggacgatacgttggtgctcgatcgcgacggcacgcagtacgacgcaccggaaaaggcccgaaacttcaaagtgcctgccggcggtgtcgaagtgtatcgcatggacaaatatgccgactacaacatgaaccacaaggcagactggctgcaggccattcgaactggcgcaacgccgtgtatggacatcgagaaaggccatcggaccgccacgatgtgcaacttgggcaacctgtcctatctattgggacgcacgctgcgatgggacgccaacaaacaagagatcgtcgacgacccctatgcgaaccgcctgctcagcaagccgcagcgccatccgtatcatctgtaggcgcgcgccgtgaagcccgggctcaacctcgaattcgcccgaaccgaacgcctcgcgccggaacaagcgatggcgcgcgcggcggacgccgggtatcgctgggtcgagccctacgtgtattccgccatcgcgttgccgatcaacagccacctgaccgtgcgcgccgagtcgccctatcaccacttcgatggagggcggaccgatcccgcggcgatcaacgccgtgcgggaaggcctcggcctgtcattctcagccatcgatgcccactgtacgctgctgttgccgcagatcggcgtgccctatctcaaatcggcgatcgatttcgcggcggaagtcgcttgccccattgtaatgtccgacgagggtccggttcccgaagaatggatgacgctcgagcgcggcttcgacctgatgcgtgtaagtcttgacgaggtcgtccggcacgcccataggcggggcgtgttatatgccatggaattgcacaatgcgctgacggcgcgccccgattacctggtcaggttgcttgatgcctacggtcccggcgacctcggcgtcaatttcgataccggcaacgcgtttcttgcgggcaacgaccctgtcggttacctccagcaagttgccggccgtgtcgtacatgtccacattaaagacatcccggaatcgcaattacacgaacgcggcaaagtcaccggcacccgcgttggcgtggcggccggccaaggcgtaatcgacctgcccgggatcgtcgaggcactccggtccgcaggtttcgacggtgtgctctcagtcgagtgcgacaccctcgcgcaagcccgatcgagcttgccctatcttgaacgcttgatcggctcccgatgagcccgtaaggccagaaaagtcgaacgacgttcaagttcttgtccccgcgctgacccgctggctggatacccggcttctccccttttaactagccagcccgtggtaaaagtcgtcatggtctacacgcagtcattggctcacgacttcctgggctcgcgggcgccgcggcttctaaaagtcagaagggaaaaggttagtggtgagtcgcagggcgcaagcagccaagacgcaccaagactatcgcgagaaccgcccccaccaggtcggagaccagatcaagcgccgtgttgacgtatccgcccacgccggtctcgggtaccagcacggtcgcaatgaactcgatgatctcgttgagcgcgcctacgcccagccccgccatgaccaccacgatcgagagcgcggtccagccccgcagatccgcgcggagcagcggccgcagtaagtgatacatcaccagggtggccacgccaaacccgatgatgtggacgaactggtcgtagcgaaaaatgggaaccgtgtccgacagaggcaccagcattacgccgtaaagcaccccgtctccaatcggaatccccccgccgcacaggtgcagaatcgcccatgccacgaggccccagataatgggcaaagggtatcgcacgcgatcgttggtcagcgcgatcaccacgaggaaaaacactatcaccgccacgtacagcagaaactcgtagttccggcgatatccaaaatacacgctgaaaggcaccagcaccgaaaacagcaccgacagcggcgccacgtgtccgcgctccagcttaagcatgagttcctaccctcctttgccgaatgccgagcatcttgccacacccctccccgcccatcaagccggccactcgcgcccaacggaggcagattccgcacagaaatgttcagccggtgacgggcggcatcctacgacaaagccaaacccggaaacacgccccaacttctggtgcgggcctctcgcctgcacgtctccggtgacaatatccttgccctcatccgccgccacccccgctacaacataaaatagagcactttttgttccgctaaggtaaaatgggtgtagggcattgcgtgtcctccgttcggtctttggttgtttccaaacgctttgtaccgaacagaccgcgcaatgtccttttccattagccgagggaaaggccgtcccggagaacccgcggggaaataggggagaataggggacagcggacctggtgaaaaagtcatcttgcaccataaaatctacgtggcttccaccaaaatctggcaaaaaactgggactgactcgatttcggctgtttgaaatcgtgtctgtccctgcttttcgcggcccttcaatagagttgcctggctttttcaccaactccacagccacctattctcttgacttttctccccccaagggtgctggaaagttgtgacgcgcccacgcccgcgtgatgcccaacaacacatcgggagtaggcccgtcccacccctgcaacaccccctgccaccgcccactcgcatcccgccacaacgccacatccacacgcgccggcagttcaatctccatacgccccgccttgaaacgcttcagcccgcccgccgccatcgccgcaacctgtcccgtcctgtccagccgcaccgccgccacacccaccgcatcaaacttcacctcatgcccattcaggctcaccgttgcccggatcggatcccccatcacatcatccttgcctgacgccagaatcagcgtaccgtccagcagccggcaccggccgctcggctccggcatcaccgattgcgtaaatcccgccacacccctccgcgtacccagcgtctgcgcttccacccccgacgccctcaggtgcgcaataatatcccgcgcgcaatcggccgcactcccgttgatcatcgccgtcggcagggccgcagacccatcaaactcctcgccctcaaaatcgcgcgtccattccccgacccggtacaaccgcgtcggacctcccgccgccttcctgaaaaactccgccacagccggccgttcccactgcgggtggtacaacaccgccgctttgtaacgctgcggcccatatcgcacgctgccatcgcgggcgatcgtcaacgccccgctcgatatctcgctgctcggaatcaaatcggcgtagtagccttccgcccacatcgcatccgtgacctcgagcccaacgtccgcaaaccctgaccccgtccagttcaacgccgacggatgaccaaagatcaccgcaaccgggcaatccaccggcgccgtcgaaatcaggttcagcaggcgcacccggcaatccgctcgaagcaaatcgccccccagcagcgacgtcgcacggtccaccgcatcgttcggatacagcggatgaaaattcatccggcccccgcccagcgcgtggcgccaaagatcttcttcataagccttgatgtccccgtcgtaatacatgttgtaccagagaggcgaccgccactttttcgacagcgccgtccgcgcgcaaaacggcgtcgactcgtcggtctgcgccaaatcccgccgcaccccccaccagtccaacccgttcttgaacgcctcctccggcgtcggaaacggaaaccacgtcgggtgtgtcccgctcatcacctgcggaccaaacacctccttgatgcccgcataaaaagaattctcgacctccgcgttccgctcacggttcatctccatgtagtgattgatcgcccccgcacgctcacccacccgcccgcgctcccccacaaccatcagcaacacgtcccgcgccaggtcacgccccggccgccgccgcttgtacgccctcgccatccaatccgaataccacacgtcatccgcccgcggcttgaaccgacccggaaaaccccactcatccttacacgcccccgccaaccccacgtccctgtactgttcgagaatcccccgctcaaacccgatcaagtgcggcgcatatacgtccggtgtaaacaacgtaaatgccgccagcacaaacaccgtccgaccctcatcccccggaccgcacgggatcgcaaccgccacgccgtctttgtccgcctgctccacacgacaccggcccgtgatgtcctccaccgagtccggctcaatccccgccggccccgccacacccgaatagacccgcagcacccgcccaccaatcgagtcataaccccgcgcccggtgcgtgtaatgatcgcccaggttcaaaggttccacccccaccgtcacttcgcccaaccccaacatctccacctcacgcacccgcacaatctcctgcatctcccccggatacttgtccataaacgcctgccgagccagacgcacatccagatccatcaccatcgacatccccttctcccgcgcgtacgccgccgcagctttaatctgatcgtgtaccgcagggtccgtcacttccaccggataacggatgctcgtcgtcaacagatcaaaatccgtgtgcgacgcgtgcacgtccaagaaacgcttgtaaccctccggcccaaactcctcctccgaccagaaccagcaaccgatccccggccacgacgcctgcaccgcgttctcctcctgacccgccaacgccacacgcagcgaaccatccaaaaccgccactccgcgcgcctctgaaaccagctcactgaaaaacaagaccgccgcgatcattgtttcccctccatgccacgaagtgtgcaaaatcaccatggcccgctgcaactcgccccactgaattccgcagcgtccaccatctccactctgtccattccaccccccaaaaaaaacttgccacaacatcttgacgtgagggggccgaccgtgtacaatatctagtgtaacctcggggggacccgagaaacttaaaataaggaggagaaacgcaatgccagtaaagaagaaagcagcgcccaagaagaaagcagcgcccaagaaaaaagcagcgcccaagaagaaagccgccgcgaagaaaaaggttgtgaagaaggcggcgaaaaagcgctaagtagtattgcgcgagttttagcagggccggtgttgtttaccggcaagattgcgccggacgcgaagcagtttccgcgtccggtgctctttttctccccgcgatgaggccgaggaaggcgacgaggaacgggtcgatctcgaaccggtaccggttggtttcagcgagttcgacgatgatgctgaggccggtgacgtagatgacggtgaaggccatgaacagcagtgcggcccgctgggcggccgtgtggcggcgcgaccacaccccaagccacgcgccgtacgccatcagcagcggcatgccgatcagcagcgtgaggtaggggacgtgacgggacgctccgagttgggggatcagtcggcttacggggatgttgatcttgagagtgaggacgtcgtaggcgcgcaccagccattgaagccgcggcacggtgagcggcatcggcgagaaatacgtgagcccggcccacgcggtggtgcacaaaaacaatttcggccgcacccggatcacgtagagggcgtcctcgaggtagatgtcggacacggcgatctgggagaggtggttgtagttgacctcgccggtggatttggtggtctggcgcagcaccgggatgttttcgtaaccggcgatattgcgtatctccggggggtaatactcgattgcgtagaaccgctcgaccagcgacaccttcgagatcttcccttcatttgccaggcgcacgcgttcttcccacggcaggttgccgaccgttttgatccacgggcttttcccgagaaacgaaaacaccgaaaacttgtcgaaaagcacgtaattcttcgcgtaaaacgaaaacagaatcaccccgggtatcagcgccatccacaaaacctgcctgcggtttcctcgcatcacggcggcgactgcgcacgccatcaacacgtaatacgccaagtggtacatcgaccggattccgcacagcagaaacaggctgatgaaaaacccccagccgtacaccgcgcgccgagtccgcacgtagatctcgagtaacagcgcggcgatcacgagaagcgtcgcgcattggagcgtatagatcaggacgtgctcgaacacaaggaacgtcgggcttagcacaaacagcgtcgacgtcaggagcgcgacgcttttccggaccccgagccgcgtctgcaacagcgtcacgaggaggtacagggccagcccgttgatcagaaagagggcgtgaaacaccggcgccgcgtggcccgggaaaagttttaggatcacgccaagcgcgaggttgtacagcggcggctggacgtggaggtaaaatacgctctcgatcaggcgcgtccgcagcagcaccgggtcggcgtagtgggcgaacatccccagaggcgccatgtcgaaccgcagcccaagcgaattcaccagggcgtgaaacacaatgaacagccccgcctggaaacccaacagccacttccagcgagccgcgtcaataaatcggagcaaccgccgcatgaagagcaaggtatccgatttcgggccacgacgcaaaccggatgagaccatcgggccgttggctgcgaggtaggcggaactggttcgagttgaggcgcatgcgcatgttgttagaatctttgttcacgacatctgcgcacggcgcgtagatattgagtcaaggtcgcgaacaaagattctgaatgcgacttcttagtcgccttagtcgtcggagccggagagttctggttgttcttcttcgggatcgaccgcgatggcgttgcggtcggtggtcaggaaggtgagcacgccgaatgtgaggcaggataccgctacgccgaacacggatgcgtccacctgttccatgaagcggtaggcgccgtcgccgaggggggcgatatcgagccggtttttgagtatggcgaagcccttatagatcatggtcagggcgcttgcggtaagcatcgtgatgaatatgttgcgcgtgagcgcgggcgaccttttctttgagaggacgccaacgcacacgggcaggatgatcgcgggcgcccagaggtggtacgtgaacaggagaagtccgatgatgtcggaccacagcaccgccaccagtatggcggcgccgccgagcagcgcggagcagatgcgcgcgagccggagcatccgaccgtcgttgcggtctttccagccaagctggtgttcgaagaggtctttgatgaagatcgccgtggacgagttgagcgcggagtcggccgatgacatgacggccatcatgagcgcgccgatgacgaggccgccgatgacgggattgttcattttgcggatgaccatggggagcgcctgctggggggcgatgtcgggaaagtggatccgcgcgtagagggctatgaagaacagtacgacgggaaacgtgagcgccaggaagatcccgacgccggcaatgccgatccgcgtttcgcggatatcttttccaacgcagtatcgggtggcgtagccgggggcgaacgtttcgccgaggaagaaagcgaggaaggtggtgaccagaaaaatccagcctttcccgccttcgatctggaagaacgtgtgagggatggccgaggtggcctctttccatgaggagatgatgtcgggtatgcaggccgccagcgtgacgaggaagccgaaaataaggataacgaactggtagacgtccgtgtggatgacggccaggagcccgcccgcggtgctataggtgaccacgactgccccgccaatgatgatggcgagggcgagcaccaggggcgagttggtaaactcggggaggatagccgtcagcacacttccgaacgcggccatctgtgcggcgacgataaaaacggagaacagaagcgacagaatcagcacgagaaaacgcggaccttcgccaaaccgatgaccaaaatagcccgcgaccgtgtaaagttccgcgtcgcggaatttcggcgcgaccaccaggcccgagaacaggaagtggaggtaccagccggtggacacgacaagcatcagcacgccccactcgtaggttcgcccgatggcgccgatgctcgaaccgccgccgataacagtcgcccccatcgtgcaaaacaggaaaaaccagccgatgttgcgcccggccacgaggaaatcgtcggtgtcgcggatcttcctggctttaagcacgcctttgaagaagatgaagatcatgtaggcaatgatgatgccccaggtgatcaggccccccgccatgacgcctaggcctcccgggtcgagatgcgccagcgcccgaaaagatcggccagccgccgttgagggtcgtagacggcgatttgggcgggtgcggcccgcaacgcatccagttcgatgcccgcgaggtgccaggaggtgtcgcggccccagtatgcgtcgatccaccgggcaatcgtgtcaaacccgtaccagtacgactcgtaccgggaccacgtgcgaatgtggcccgtttcgattgtacgttccacttcgtcgttgacgcgggtgagcaggaacccgtcgcagactttttggccgttgcggtcgaacacgtcgacgaggatggatttgctggagtcccacgcccgcttgtaccggcgcgggacgagcgtgaacccgttgttgcgggcgtatgtctggggggcgagccagcgcggctgcccggagacgttcatggtggactcgtagttgccgagcgcgtgcgactggacggcttctttgcggtaggcgctgatgacggcgataccggaggcggtttcggcggcgcgccgcagcgatttgaacagttgctgcgcaccttcgggcccctgcatgacgccgatgctgttgcatacggtgacgagcacgggcagaggttccgggtccagcggttcgaggtcgaacgcggaaccctggcgaagccacaatcgctggcccagcagcgttccgaggccggcttcccccagtttcccggcggcaaggttgatcagttcggaggaaagatcgatcccgccgatcaactcgatcccgccgccggtttcaccggccaggacggggtcgtagtccaggtcgcggcgtgaggcgcgggcgcgggcgagattctcggcgtcggcagcgggcaactgatcgccgcgcgtggttttaaggccgtaacgcaggtgcaaccggcccgaaccgcagccaacatcgatcacgtgcagcggctttccggatcgttctgccagaaaagccaggacgcggtcaaggaattcttcttcaaatgcttcgtaagccacgacgtcgggatggccgtgaacgatattgcgctcgtacgcggcggcacattggtcccacacgccgcggtcgcggtcgcacgcctgcgtgagcccggtgtcgttcgtcatgggcttctcctcacgcgggtttggcggaggctaccccgtccaacatcgtggccgcgccgaaagcggcttcggataggggggatatgtggtcccgaatctcgtccagcgggggtagtatctctttggcgacgtattttgaatccatcaggcgcagcagcgcggaatagttgacgcggaaggcgatgcgctcgccgacttggagtttatcgacgttttcaccgaggttgaccacggagatatcgctgctggcgccggcaattttgtaccgggtatcgagaggcgtaatgccgttgatgtcggtgtcgagatggccgatgctgaccagtgcccggtacccgcgctggccgggcgaggtgtcggggcatgcttcggtttcgaacggcgtcatggtggtggtttcaccgagtggcgccaagccctttttcttgacttcagcgatttcggcctcgagccgcatcacgtcgtttcgcagttccgggagcgtgccgccgttgatcaggtcggtgccaaggaaggccgcctcgccgatgcgcgagtggtttacggcggatggcatctggccctccagcaaaaggggcagggtcgcggtgactcccgcggagataatgggcagcggctggcggaacttcaactcgagcagttcgcggtacagcacgagctgcatcagatggtcgacggtgggaacggtccccgccaggcacccgaggttgccgccgattccggcaacttcgatgttgggcagttcgaagactttcttgtagaagttgacgagactgccaggcaggatgccctcgcgcaggtcgccgagttcgatcatgatgatgatgcggtggatcttgtcgagccgtgccgcgtgatcgttgatggcgcggatcacctcgatttcactgttgaggctgatgtcggacagggcggccacttcgcccgccctggacaagtcgggtattcggagataccatttttcggcgcccggcatgcaccggctgacttgattcaggttcgagaggcgcgagtcgcccacgctggtgacgccgagcgcgtggagggcgcgcagcgtatcggcatggccgcacagcaccttggtaaccagcgtccacgaactgccgttggcgcggatccacctgtcgatcactttcaaattatagtggagcgcttcgatgttgatgacgagccggttcatggcgaatacctcatctccgcgtatttgctcgtgaatccgacacgctcgtacaggcgccgggccggattgtcgtattcgacgtgtagcttcacactcccttccgccagacacagcccgcgctccacaagctgccggcccaggcctttcccccgcaacggcgggtcgaccgccacaaacagcagcagattctcgggcacgtacccgcccatccccgtgcggagcatcaccagcgcccccgccgtcttcccgtcatgttccgccaccaggataaacccgccgccgttgagcgcgtcgcgcaggccccgagcaatgtcttcgaacgtgtcgctgtacggtttgagcgcctcctgcagaaatgccgccaggtcgtgcaatccgccccgcgcggcaaaatcggccggctgccgaagttcccgaagccggaactcggccgcatcgaccgatcgcggcggcgcgtcgccatccgcgggtgcggcggcatcggcatgtttcgcgccgtggccgtctgccgaccgcaacgtgtcctccgtcgcatcgagcggatagatcgccagcatgggcgccgcgtccagatgttcggcgttcatcatacaggctacgcgttccagcgacgacaggatctgcgcctgttcccactcgtgcagtttctccaactcccgcacaaaccgctcctggagcaacggcggtgcgccgcttaggacctgcctcgcgccgtccgtgcacgtcaccagcacgttgcgccggtcacgcccgttgcggccccgccgaaccagatcccgctgctcgagccggtcgactatgcccgtcgccgtggcgttgccgatgctgatgcggcgcgcaagctcgcctatcgcgatttcaccgttccgttcaatctcgcgcaacaatatgagctgcggactcgtaagactgtgagtctgcacaagacgacgggagtgaaggtctaccgcgcgcataactctgcgtaacgccaccagaatccgctcggtgagccctaacgcattgggattaaccatgaagagtcctttgcgtaaagatattttgtgtgcgaaacattgtagcggacacacactcccacgtcaactaaacaacaggatttctaaccacctcgatagatggatatcttgtaaccccaggtgtatcaataggttggctctcggccaactcccccattcaggcgtgcggatggctgtcccggtagacctgtttcagccggtcgatgctgacgtgggtgtagatctgggtgctcgagaggctttcgtgcccgaggagttcctggacgacccggaggtcggcgcccgcgttgagcatgtgcgtggcgaacgtgtggcggagcgtgtgcggcgagatttcccgccgcccaggcaggatttggcggacatatttctcgacgatccgctggacgctccgcgtcgtgagcggcccgccgcggtggttgacgaacagccggtcgtgctgcggctcacccaactgtggccgcacccggaggtagtcgcgcaacgccaggacggcgtattggccgagttggccgagccgctctttgcggcgtttgccgagcacgcgcatcaggcccgtgtcgaggtcgagactctcgatgttaagcgcggccagttccgcggcacggatgccgctgctgtacaggacctccagcaacgccctatcccggacgccgagcggctgggacgtgtccggcgcctcgacaagcgccgtgacttcggggattgtgagcgcctcgggcaggttgcggcccagtttgggcgaccggaccgtctgcgccgggttgtcctcgagcaagcccgaccggacgcagaacttgtacacggcccggatcgacgccagcttccgcgcggacgtacgcgcgctgccgccgcgcgtctggacatgcgccaggtacccccgcacgtcattccgaaccgcacggccaagcacgtcgagcgacgccggcgggtgcggctccccttcatcccgctcgaacgccgcgggcccgtgtgcgacgtagtcgcagaactggtccaggtcggaaaggtacgcacgcaacgtgtgcggcgaataacctttctcggcctcgaggtagtctacaaaaggctccaatcccgggcgcatgatcgagattatagcagcctcgaacgaagtccgaaattgtcagtcaaaaagtccgccgttatagctgctaacttaaccgtaggccagagtcctataagaggtttccggttttctggcaggggtggtgtcagaaaaactttttatctcgcgctcgttcaaccacttacgtttctcgaaccatgccaaaatggcaaaaagagagcaccaaatgcacatatgaaatagagggagttgatcaaggatcaattaagaattaagaattaagaatggtgcgaggatgacggacaaagggtaggggacgaaggatgaatggattgcggattgcagattgcggattggggattgcagattttttgaagcagaaggggcagaagagcaggctggaggaaaggatgaaggatagaaggacagcggggaaagggaaaaggcgatggaaaaggggagtgtaaagaagactcggaaacccagttacaagccgaaagctgggatgatgaatataccggtagggtggatgtttgagaaggctacgcgccgtcttgttgaaaacccggtggaacagggggcgatcgtgctggcgaaggaactggaggaagccgggctgagccagtcggcgatcatgcggaagttgaaggaggatggagtgccgaaccggggggaagggctttggacttcggcgatggtgcgaaagcttctggattacgatgggttgaaaggtcgttgggcggagcggaaggcgaaactggatgaggagtacgggacgcgtgtggccgccgccgaagccgacgcccgcgagatcgccgagggccggacgcccgcctcaccgctcgacaagtgcgaccccgtcgcctggggccagaaatggctggcgaaccgcgacgggtcggcccgcgcttattggcggcaccaaatcgaggatctccgcgcagccgacgacaacatcgtccatctcgacggccgcgacgtcggcaagacggccaacctgaccacgctggcgctccattatgcgatgaccacccggaaaggatcggggctggtagcggcggcgctcgcgggccagttgctcgccatttgggaggaaatcgagttccagctcgaaaacaacccgcggctcgaagcctgcatcgcccgcggccgcaacggccaccgcaagatgcagcggtttccctacccgcgcctcgagttcaccaacggcagcgtcctctacttccggcccgcgggcacgtacggcgaagcgttccgctccctccacgtcgaccgcgtctgggtcgacgaaggcgcgtggctcagcgaagacgcatggcgcgcgctgcgccaatgcctaaaagccggcggcaaactccgcgtatactcgacccccaacggcatgcgcaacgccacatactaccgcctcacaaactcgccccgctggcgcgtgttccgatggccgtcctggctcaaccccaactggacacccaaccacgaagccgacctgctcgaattctacggcggccgcgcaaccgccggctggcagcacgaagtcgccggcgaacacggcgcgccaagctacggcgcgttccaccccgaacacctcgcactcgcgctccaagacgtgcccgagtaccgcaaaatcgtcatcaccaacgccgaactcgaagactgccaatccgaactcgaaaccgaacaacggttcgagacgctactcaacatctggcccgactccgcccaatactacctcggcgcagacctcggatacacaaacgacccaaccgaaatcctagtcttccgccaagacacccccaaaaaatctcctgattgttctcctccagactccagactccagactccagactgcagtttaaggcttgttttgcgcgtccacatggagaaagtcgcttacccccacatcgcccaatgtctcgccgtcatcgactccctactcgcgcccgcagcaatcggcatcgacaacggcggcaacggactcgccgtcatccaggaactcatgtcgctcgacaaatacaagccacgcgcgttcgacggacgcctcttcggcttcgatttcggcggagtcacaccattcgaactccccaacggcgcccaaacgaaaaaacgaacaaaagaactcatgacctcgctcatcaacaaggcgctacaacggcgcgagatcgtcttccccgccaccgaccccgaaatacccgaccagttcctcacacaaacctactcactcaacaacggcgccgtcacctactcaaaaggaaacgaccacatcatcgacgcaacccgatgcatggtcctcgcccaagaaaaaaccgcacccaacgcaccatacaacgaccccgactacaccatccgccccccgctacccctgatggtcgaaatcttcaccctccccagcatgaaaaacttcccctggtaagcgcgaagttcaaagttctgagtgcgaagttgaccgggcgaagtgcgaacttgaccgtgcggcagcatatgacaactgatgaatgatgaatacgctgaaagcgcaagttacgccggaggcgtaagttacgctgaaggcgtaacacatattagcctggggcaacgccccaggaaatgaatacacaaccaaaaagcaccctgaaggggtgcaacaactccccccgcccctacagggccaagtgcgaacttgaccgtgcggcagcatatgacaactgatgaatgatgaatacgctgaaagcgcaagttacgccggaggcgtaacacatattagcctggggcaacgccccaggaaatgaatgcacaaccaaaaagcaccctgaagcggtgcaacaactccccccgcccctacagggccaagtgcgaagttcaccgtgcggcagcatatgacaactgatgaatgatgaatacgctgaaagcgcaagttacgccggagccgtaacacataatagcctgaggcaacgccccaggaaaggaatgcgtaaagatagtgcaccctgaaggggtgcaacaactcctgccgcttcactcttccaccccggaggggtgggtcaattgtcagcccagggttgcgaccggcccgtaccaatggccctgtacccgtcacctaccacgagcatccaacgaagaccccggcgaccactccacaccggtccagggccgggcgctaccctgggcacaagtcgcgccaacgaagtaccccggcaggggttcgacagcttgtccctccccacccgtatcatgcgttgttgcctttttctccaccgggtactaaactagcttcctcaagccactatgctaaacggggatgtttaggggccggcggccgatacccggcgccggaaaacggaacggagcggatttctgtggctacatattcaaccgccctaatcgtgaagcgggtcgccaaagccagaagaagcggctgggtaactctgagccttatggactgcggcgtgaaggacagcgacctccgcacgcttctcgacgcgccgggtgtcgaacagcttcaggggctgaacctcagcggaaatcagctttccacgcttcccccggagatcggccgcctcaccgcactcgataggctgtacctcgtcaacaatcagctttccgcgcagccgacttcgtcggccgccctgccagacagtcaacaatatcagcacataacgattctatacagcacgaccgaattttcccaccttcctgtaggtccggaataattccgggccctcgagtttctacattatcacgcggcagcggcggcagccagacccctttctgagcaacgtatgcctaagcgtaggtccggaataattccgggccctcgagtttctacattatcacgcggcagcggcggcagccagagccctttctgagcaatgtatgcctaagcgtaggtccggaataattccggacccacattcagcaaaaattatgtcgtcatatataaaggcagcgcggcccagctgtggtttgaggagaatctccgctcacgtatactcaccctggcccattcagcccttccggcttggcgagacaattcatcgagcctcccaataccgccgctgaccccaacttccacatcaaaatcgctcacttagataacccctcaatctacttgatttaaacagaacccccgcgtagactcactgcagggcgcgcaaaaaggggctgtctatgaactcgtacaacttgctttcccaaaactggattcccgttctctatcacaatggcgatttcaaacgcgtcggtatcctcaaagcattccaagacgcacacagaatccgccaagtcgccgcatccaatcccatggaccgcctcgccatactccgctttctcctcgccctgctctactggtgcaagggaaacccggcgaacggcccacaggccgcgccttacgaaccattccctccggattggttcttgaaactcgaacagaataaagaatgctttgacttgtttggagagacccggcgattttatcagtacaagaaacctgtgggcgaagataaacggctgaccgccaactaccttgtccatgaggtgccgaccggtacgaatgcgtggcattttaggcattcaacggacgaagtaaacggtttgtgtcgcgcatgttgtgcaatgggcttgctaaggcttccagcatttgcgacttccggtgggcgtggtaaaccgcctggaatcaactcaaagcctcccctttacgtcataccgctgcgcggttcacttgcggccactgtacggctttcctggcggccggtcggcccgttaggaacgcccgcatgggaaaaaccggacgtccaactgcctggcataggcgaggtgccactgctcacaggtttgacctggctgccgcggcgagtgtggttagactctcctgcggaacgggcagaaacctgcatctcatgcgggcgcagcgagaggctaatcctgcgtactgtatttgccccaattggcagcaccaagacggaagaaggagaaccggtcagggcgtggtgcgacccgcatgtcatctacgggatgtccgccaagggcgaaatcagcagcctgcatgcgcgggacgctcttggcgcaccagacgccgcggcggggcagtgggccaatatccttgccggcctgcttcgaaaggggcaaacaggaaacgcatctccttgctggatagtgggcttttctaccgtccagaacgacaagtatcttgaggctgtcgaatgccagatcccttgcgatatcgaccaggcgccacaagaacagcgggacgaatgcctcaacaacttggaacaatggcgcaagggaaaatggggtttcgccaaaaacctgggatcggacaacgaaaagggcgagcggcgtgagcatcgagagattacctctatgcttgcgtccattggaccgcacgttgaaaagcaggtgtcggagaaaagtggatcgttgatagcgggcggcgaaaccgcatggcaggaagcggccaaggcgttccgcccgatgatgcgcttagccgcacaatcgctgtccccagggtttacgatccaagcagccagaatacgcaagcgcattgccaatgccatgccaaacatgacacccaaggccgcgaagaaggggcggggaaaaggacgggataaatgaccgcgacggaagaattcattcgcgtattgagtggcctcaagtcaggggatcttggtctgctgcggacttattcccaacacggcttggatgaatccgtggatgggtttgacctcttttcggggctttggtggccgttacgggcgaagaaccagcgggcgccgcgccgggaagtggcgtggcttatagctaaactctacgctgcccacccaattccccaggcccgcgaggccacgcttgcgcgtcaactccgccggtgcctcccgaccgatgagaacggtagaaatcggtttgggcggaagctcgacaacatattgatgctgccgctcgacaagatcgaggcggaacttcgttgggcgatcgggcaggttgcctcgagaggactttcactcgattgggtaagactcacggatgaactctccgtgtgggaatacgaatccgtccacctgcgatgggcggaacaattccttcaaaccgaagattaaggatgaaaggggtccatcatgctgatcgagattcacgcaatacaaaaccatagtccgtcaaacctaaatcgggacgacctgggtgcgccgaagacgtgctattttggcggtgctctgcgctcgcgcatctcaagtcaatgcatcaaacgaagcatccggatgagcagggagttccaagcgctttgcgggggaattcgcacgcgccagttggccagactgatcgccgagaaggttcaagggaagccagacgtccagaagcgcgccgagaagatactcgaactatgcggtttcaagcccaagaaggcgaagaaggaagaaacggacgacgcagcagatagcgaaaaaagcaagatgctcgtttatacgagccgccaagccatcgaggaaatggccgcactactccaaaacggggacggaaggactgagaaacaactggccgcggacttctgcgcgttgatcagtaagcatgtggcagtccccgatatggcactatccggacggatgctggagccggacaaatcttcaaacgacctttggaaggagcttgacaagaccgtcgaggccgcccttcaggttgctcacgcgatttcaacgcacgaggcgctgcccgaggtggactattatgtggccgccgatgacattccaggcgaagatgcaggggcgggctacgtggatgaatccatgtttgcctcggcatgtttctacaagtacttctcgatcaattgggacaagcttgtggaaaacctcaatggccagaaagaacttgccgcacatacggtaggggcttttatccgtggagcagcgctggcaaatccttcgggcaaacagaatagttttgcggcgcacaatccgcccgatggcctgctgatccaattcgccgacaccccgacgagctatgcgaatgccttcgccgctcccgtgtcgggcaagggcaatcctgacgtcatttcacaaagtgtggcgcagttggcgcattatgttcgcgacttggacacggggtacggcaagccccagaagcgtttctggttctcgccgaatctgcgttatccgctttgcgtcatcgaagccaagaaaacgattccggtggccgaggtaaacctcaaatcgctcgatcaactgattccggccgtcatcggcggcttgggctttgattggaattcggttcagaagaaagtgacaagccaacaggtggcgccatgacggccaacacgctgtttcttcggtttgaaggaccgctgcaggcgtggggtaatcaggagtcgaagttcgttgtacggcgcacggctgaagggcccactaaatcgggcgtgatcggactgttgtgtgcggctttgggcgtgacgcgggcggaagcgcaggaatgccggttgcctcaactggccgaactgcgtatgggcgtccgggtggatgcgcccggataccggtggtgggactatcacacggtaggcgcggggatggacatgcgcatcgccgaagccgaggggaagacaaaacccggcgcaatgctcacgcggcgggagtatctttgcgacgccactttcctggtggtgcttcaggggaatccggccctgatcaaagaactccggcaggtgatcgaaaagccgcgctggacgctctatttgggcaggaaatgctgtccgccgtcgcggcgggtgctcgaggaggcgccggcggcgcatccggacctgatttcggcgcttgtgtcggttccgtggcagcggcgctttgaaagggataatcccccggaaacactcgagtatctgctggattggtttccgtcgcccgaccagccggaggcgccggatgacgccgaggtgtggtacgacgtgccgttgacgttcgagccgccgtcgcatggtgcgcgctttgttgtgcgcgggcagttccgcgtgggcgccggggggcaggtcccggtggcggaatcggcgttgcagcgccaggtgccctcgccacaacgcccgcgggcagattatggcaattccgagtaccggaagatgcgcgcgcagcggctcgagaaggactcgcatctttgcgtgttctgcagatcgcgtgcaacgaccgtgcagcacgtcacgtaccgccacgccggcggcgatgagcggatcggcgagctgcgttccctttgccgcttgtgccacgacgccgtcaccatgctcgagtatgggctgaacatggggctggaccgcatcgacccggaggatgctcgatggcgggagcggattatcgagaaacgcgacgagatcgtcaagttccggtcgctcgagacgcggcggcgtcggcttagccccgaggaggtcgagtgatgtatctatcgagtctgatgatcaacaccggcgacaatccggatcgggagcggccgggccggcggtggctgcgcgacatctaccacgtccaccagcggctgtcgatggcgtttccatcgaggtcgcacggaagcccgtccggttttctgttccgcatcgacaaccagatcgaggagaactcgccgcgcgcgatcgttcttgttcagtctcaattggccccggactgggatagcgcattttacaatgcgggcatgcttctggcggcgccgccggaggttcgcgaatatgccccgtctttcgcgcccggcgaccaccttcggtttcgcatcagaatgaatttaagcaagaagaccaagacggcgcgcgatggtacagatctgtgcacgccgcacgagggtgtcgacaccttcggccgccccaaatctcagtcgaaacgcgtggccgtgacctgggacggcgatcaaggcgaaaccccggaccgggcaatccgccaatggtttgccgcgaaggcccaacacgccgggtttgcactccagaacgaattcaacgtggttcacctcggctgggtggcgggacacaagccgggaacggccgagaaccggctgcggtttcgttccgcgctgctcgagggagacttgacggtggcggacgggccggctttcatgctatcggtcgagagcgggctgggctcggcgaaagggtttgggttcgggctgctgtctgtggttcgtgcaggcgggacgcccgcaccacaatcgaggcgtggcgaatgctgacgcgtgacttgcacgacctcgccaaggtgcgcgaccggctcagctacctttatgtcgagcacgcccggatcgatcaggaagacaaagccatcgccattcacgacgcccagggactcaccccggtgccgtgcgccacgctcgccctgttgatgctggggcccggcaccgccatcacacacgccgccgtcctcgccctcgccgacaacggctgcctcgtcgtgtggtgcggcgagcagggggtccggttctatgccgcggggcacggaaccacgcgaaactcccagaaccttctgctccaggcgcgcctctcgagccgccgctccacgcgcctcgccgtggttcgccgcctgtacgagatgcgctttccgggaaagctcgattcgagtctgacgctccaacagatccgcggcatggaaggcgtgcgcgtgcgcgaagcctactcgagcctgtcccgccaattcggcataccgtggacgggccgggcgtacgaccgccagaactggcgcgacgccgatcccgtcaaccgcgctctctccaccgccaattcctgcctctacggaatctgccacgccgccatagtcggcgcaggctattcgcccgcgctcgggttcatccacaccggcaaacagttgtcgtttgtctacgatatcgccgacctatacaaggccacgaccaccgcccccgccgcgttcgaaaccgccgcccgctcggcccgaaacatcgagcgagaggtccgaatcctgtgccgcgatgcttttgcggcgcagcgcctcctcgaacgcgttgtgaaggacctcgagtacgcgctggacgtgaagccggccgatgacgacgaagccgagaccgatttcgactcggatcccggcacgcccggaggcctgtgggaccctgacgccggcgaagtggccggcggcgtgtcctatgccgaacccgacgaacacacagaggatgaaccctaatggtcgtcatggtgctcgaacgcgtatcgccttcgctccgcggtgaactcactcgatggctgctcgaaccaaaatccggcgtgtttgtcggcaccgtctccgccatggtaagagaaaaactatgggaaaaggtttgccggaaaaccggcgaaggaggatctatcctcatttggaccgcaaataacgaacaggggttcaaaatcgacttctggggcgatccctcgagacacgtcctcagttgggatggacttcagctcattacaaagccaaaataaccaataaataccaagtgtaatccccacgcgcgtggggatgaaccgtcctggttgttatgcgctcgcccgcctccttcgtaatccccacgcgcgtggggatgaaccggcgatgcagatcgtgacaacgggagtacggaggtaatccccacgcgcgtggggatgaaccagtagcggcgggatgctcaagcccgaagatgtagtaatccccacgcgcgtggggatgaaccggaggatg

SEQ ID NO: 536 - DNA, 50049 bp, Artificial Sequence
  Synthetic Oligonucleotide
gcccgggggggggtgcccgccgccccgccgctgctctgcggcggcaaccggggacgctggaccctccggcggcgacaagtcacgggagcggaaggcgcaaagcgcccatcaactcaccagaaagaaaccgttcaaaaccgatcggacgagagaagatacaaaggcgtttgcatgacctgcaagcatcgcgagacctgcgaacgatcgacgattcaagatggcgtctggcattgcgacaaatacgaatgataccgacttgggctattgacgatgtattcacgattcatccagcacagacgacttcagaaacacacgggtcaacccgatcccgccagacggacccgctcgacaatcggccaatggatcgttctctcgctgatcggattttgggggagtatggcgtcggtcgtccccgcatacggcggacaacccatcgacttgacgctcgccgacgccatctccctggctttacaggaaaaccgcacgctgcaggcctcgcaggcggacgtggaggccgcggcggccgaccggcgggcggctttagggcgtttcgggccggtgctgaagatggaaggcaacctgctgcaatggaacgacgcccatgaaatcgacgttttcgactatctcgagctgccgccgacggcggcggagatcgtggatttcatggtcggcccgatggaccccatcgccttgcgcgaggaccgcacgcacagtctgtccttaacggcaattcaaccgctgacgccgatgttttccgtctatcagggctaccgggcgcgccgggccggcgaaaacgccgcccaggccctggaaagccggacgcggcaggacgtgacctacaaggtggtcgaagcctattaccggctgctgtcggtggggcaactgcgccaggtcgcacaggcggcgacggacaccatcgccgcgcatgtggagcaggcgcgggacttcgaggccgagggattcatcgaccgcagccaggtgctgacggccgaggtggaattatcgaactcccaacagaacctgctgcgggccgaaacgggcgaggcactggcccgggcggcgctggcgcaactggtggggctgccgctggacgcggagatccgggccgcggcggacctgccggcgccgggcgatccgacgccgccggagttggccgccgcccggcgggaagcactgtataaccgcgaagacttacaggctctgggttggaagatcgaggccttgcgggcgctggaagacctgggggggtggcagatggtgccgacgctggccctggtcgggcggtacgaatggagcgaggggatcattctgtatccggaagaggaaagcttcatcggcctgacgctggaatggaacttctgggagtggggccgtaaatacaacgaggcccaggctgcccgggcgcgggcgcgtggcgcggcgctgcaacacgcggaagcaaccgaactgattcaattgcaggtgcagcaaaagcgacaggagttgcaatgcgccggggcgcggcagcgcgtggccgagatcgcggtatcgcaggccgaggagaatctgcggctgaagcaactccgttttgccgagaatctggcgacctcgctggaagtgctggacgcgcaaaccttgctgaccaaggcgcacagcgaccggattcaggcgcggttcgaggtgctggtgggccaggccgccctgcggctggccatgggacaggatcccgccggcggtgaagggagcgaaggcgaatgaacacgaggatggcatggggcatattgctggcggcttttctgccggcgttgttcggttgcggcggccgggagcaggccacgacattgaccggcctgatggacgcggtggagatcgacgtggcctcgaagataccgggccggatcaaggaactgcacgtggacgagggcgaccgggtggaggcgggacaagcgctggcggagatcaccagcgatgaaatcgcggcgaagctggagcaggtcgacgccatcaccgaggcggccaaggccaagctgaaaatggccaacaagggggcgcgcgaggagcagatccgggcggccaagcggcagatgatggccgcggagcaccaggtggaaatcacggccaagatgaagcagcggctggccaatctcttggaaaagaaggcggtgccccaagcgcagtacgacgaggtggaattcaagcacaacgtctcgcaagagcagtacgaaatggccaaggcgcaatacgaggcgtacgtcaacggggcgcgggacgaggagatcgaagccttgacggcgctggtgcggcaggctgagggcgccaaggccgaggtggaaagctaccagcgcgagacgacgcaaaaagcaccggtcgccggcgagatttccaaggtggtgctgcacgagggcgagctggccgcgacgggtttcccgattctgacgatcgtcgatctggaaaatcagtgggcgagtttttcggtgcgcgaagacctgttgccggggattcacaaagggcaacgcatccaggtcaccgttccggcgctggaccggacgctggaactggaaatttaccacatcgcgccgatggccgatttcgccacttggcgggcgacggccgagcggaacagctacgatctgaagaccttcgaggtcaaagcccggccgaccgagccgacgacggacttgcggccggggatgacggtgcgctggaccctggagtaagggccgatgcgccgccgcccgccatcgccgctgcgcctggccggagaggtggggcgcggctttctggcgcaggcccggctgctggcccggccgcgctacctgctgatgaccgccttgctgctggcgatgtcctggctggcgatggaggtttaccataaccaggcgatccgcggtctgccggtgctggtgatcgaccgggacaactcgaaaatcagccggacgatccgctcgtttctccacgcctgcccggaaatcgacaccctggaccaaccggacgcgacccgggaagaagggcagcggctgctggccgcgggccggatcgccggcctggtgtacctgccggagaatctttcctcggaaatcaagcaagggcggcgcggcacggccctgatcgaactggacatgagcaacatcgtgatggggaaaaacgcctacaaggccgtttcccaggttctgacgaccgtggcggtgggcacccagatgacggtggtccggaagttaggcgagaacaagagccgcgccatggccaaggtgctgccgattcgggtcagcgaatcgttcgcctacaatccggcgacgaattacggcatttacgtgatgcccggcctgatctttttcttcctgcacgtttacgtgctgattctgggcgtcaccgcctatctgccgatccatccggccgatgactggaaaaaacgtctgggcgcgtttttggcgattctgccggcgggaatgctgctcggactgaccttcttctacggctttctgccttacgagaatctggctccggccagcggaccgggggtcgccgtcgtcgcgctggcggcgtttatcgtgctggatttgctgatggcggcggcattcaacgcggtgattccccgcccgatcttcgccttcgaggcgacggtggtggtgggaatgctgtcactgatgttttcggggatcacctggccgccggacgcgtttccggcggcgatccgtctgatcggcgcctggattccgttcaccgccttcgcacagggattccaggcgttcatccacgcccccacccgcctgagcgaactgggattcatgttccacgccttgggccggcaagcgctgctgttcggcggagtgatcgcggcgggcgccgcggcgcggcggatcatcgtcgcggcgaggcgggcatgaagcggcggacgaccggccggcgacgggcggcgcggctgcggcgccgggttggcgcctggctccgggcgttcggcggggcgatgctggacgaatggcgttttgtggggaagcaacgggtggtgctggtgatcctgatggcgctgcccctgctctatccgacggtgatttcctatctgtattacgaggatcaggcgaccgagcggccgctggtgctggtggacgaagacaactccggcctgtcgcgccgcctgacgcgggcgctgcacgccacgcagggagtggagatcatcgcccgggagacctcgccggccgcggcgcggcaagcgttgcaggcccgtcaggccgaaggggcgatcatcattcccgcggatttttcgacacgcctcaaacaagggtcgaccgccgccgtgaagctttggctgaacacggccaacatgtacacctactccgtatcctatacggccgtggtggcggcggcgaccactctgaacggcgagatcggcgcacggtactttttcagcaagggcatgccgacgtctctggcgtcgcagcgtgtgtttccgatcaaccaggacgtccgctaccttttccatcccaccgccagctacggcaacttcctggtgcccggtatactgatcatcgtgctgcaacaactgatgttgatcggattatgcttttcggtgggtttgcgtcgcgagttgggcctggaggacgcgggcgaccggcggccgttcaccagcctgctggcccggttcagcgcgcagggggtgttttacctgggcgcgatgctgctgatggtgtttttcgacattccgctgttcggctggtcggtgcggaacgcgggcgttctgctgctggtgttcatcggcttttccctggcgatggcgccgctggtgatgctcacggcgcatttctgccgggatcgctacatcgcctttcaactgctgatgttcgtctcgacgccgctgttcatggtgtcgggtttcgtctggccgtcgtcgcagatgccggggtacatccaggcgctggccaaattggcgccggccacgccggcgctggcggcgctgcggaccgtcacgatgaaaagcccggagatcggggccgtagcgcccgatctgctgcggctgctggtcttgacgacggcctatttcacgctggccgtgccgctggtgcgctggacgcacttccgccggcaacggtcgctccaaccatcacttcgggaattctgacggctcgacggtcacctcatcgaccgcgatgaggggcacgttctcgccgccggtctcggcgagacgaagcagcacgcccttgagctgcagccggaccggcgcgaagggcgcgccctgctcggcgaagcggccgccgcagttttccggaatcagcagaaacgccttgattttctggccgtcgatgccgctgtcgtaaaggacctggaaagaaccggcgcggccgcgggatttctcggccggagtcaggatttcccgggcggcgaggtcggcggcgactttccccaggtaatgcaattcggcgccgacgctgattttgccgcccgcgtaccgttcggcctcggcgcgcaaggcttccagggattcgacgcgccggtaatcttccgcccgcgcataaacggtaaggagaaaaaacacagtcagcgtcgtgaccagcgccgatttttttttatcgttcacccttttttcccaacgcaacgaagacgctccgagggtaaggaaagcggcggggaaagtcaatttatcggcggagcaagcgggaaacgcgcctcgaaccaggcagcgaggcgggccgcgcacatccggtggccggcctcgttccagtggacgccgtcggcgccgcgcatcgtttcgccggagcgttcggcctcgaacacggcgcgaccgacgtcgtcgagcaagggcaggccggcctcgcgcgccagttgtcgccaggcttcgtcatagggccggtcgtcgtccacgacaaacaggaccaattgccccggagcgcaacgctccttcatcatgtccagcaagcgcgccgtgatgaccagggattccctgaagagcggatgggccaggccgtcgcgccggatggcgttttcgagttggggtctttttcgggcataaagcaggcgatcggcgcgcgagagcagatagtagaggaagcgggaatgatcgaaagccagcccgtacacccggcgcagatgccggcggggtacgcgttgaatgatccggccgtcgagcgtcaggaagggacggcgcttgttgttgttgtttttgatgctgcgcacttccagctcgtaatgattgttgatcaggtcgttgcctgaggtctggagcagcaccacgtcgggccggaggcgttcgacgtggcggtcgaggatcatccattcctgcaacgtgccgtagccgagggcgccgtaggcgaagacttccgcccggcccgcccagcgtgcggcgagtaatccggcgtaggttttatcgtcggagacctcggcggcgtgggtgaaggaatcgccgatgacgagcacccgcagccgtccagcggcttgcggatcgccggcccggcggaagccgtgggcgtcggtggagaaatcgacgggataggcgacgccggcggcgtcggttttcattttttggaagcggacgttttcccgggcgcgccagccgagatcggcatccgggacgatcaggagggaatcggggctggtcagcaagaggcgcagaacgatttccccggcgacaaagagaaacgccgcgaagagcagcaaggcgacgagcgtatagagaagtcggcgttttctggtcatgggcttcttttaccggagtggtagtccggggtaaagccattttcccagccgagggcggctgggccacatgcagcttttatcccagccgagggcggccgggccacattgcactcagaaataagtgtaggagaaggtgcccatccagagaaaggtgtcgtcgtagagggggtcttccttgaagttgtacttggcgccgagggagacgttgaagtggctggtgacgccgcgcagactgagcagcacggagttgatatcctgctcgttggtagtgccgcgcatcagttcgccctcgtattcgagcatcagttcgacgaaattacggggatggaggggaaaaatgacgccggcgtgcaccaggccgctcttttcctcgtaggcgcggtcgtcgacgcccacatcgcgaaagaccatggtgccgtcggccatgatggcgaaggcgtagtcggtaaaggccaggtcgttcagttccagccccatggcgagcatcaccttgaaaccgtagtacttgacgtcgccggtgcggtattccgtcgtttcctcgcggccgcccgagtatttttcctcgacgtcgcgggtgtattcaccggtcggcgcgatgccgcccagggcgacggcgaaggccggcagaaaatttttctgcttgaggaacccccatttgaaggttccctcgaggccgccgaggttggacatatcctgggtgtcgaaattgcggaccttggcgcccacgaggttgaagtggcttttaactttcaggttggtcatgacccagggaaccttcagggcgaactccaaaccgcccggaatgccgacattgaagaggaaggaatactcgcggcggtagtattccggcacgtcgctgtcctcccagagggcggcggcgccgacttcgaaggagccgggttccagagtatgggtggacgaagtgaccatcatgccggaaaggccgtagatattaaaaggcaaattattgattttgggtttgggcgcggcgatctgcccctgcaagacgtcttcaggaaccttatcgaattcctgctgggcccaacccggacaggcgagaaagataaaacaaagcgtgattagaatatacttagcactatggaacattaaggctccattcctcaccagccgactgtggcgctatcttggcacgtccggggcgcgaccgtcaacaggctcttccacccgggttgccggccggccgacggcggtcatttggtccaataaatcgcggacttcgccttccgcaccccgctcagccagttcgatcagtcgttgcaggctcgcctgaaagttcaggggcaaatcgcgcggtttgtcgaggcgccggattttttcatgggcggtgtcggcgatgccctccgcctcatcccagagttcctcgcgcagtttttcgccgggacgcagtccgacaaacttgatttcgatgtctcgctccggctcgaatccggaaagccggatgaggttgcgggccaggtcgaggatgcgcacgggttcgcccatttccagcacgaagatttccccgccgtcgcccatggccgcggcctgcatgaccagctcgaccgcttcgggaatcgtcataaaatacctggtcatttcagggtgggtgacggtgaccggcccgccgtcggtgatctggcgacgaaagagcggaatgacgctgccctcactggccagaacgttgccgaagcgcaccgagagaaagcgggttttatcctgccggcgggcgaggtccagcacgacccactcggccaggcgcttggtgcgtcccatgacgctcagcggccggacggccttatcggtggagatcaggacgaacttggcgacgccggtggcgacggcagtttcggccagaacgcgggtggcgcggacgttgttgatggttgcggcgacggcattggattccatcagcggcacatgcttataggcggcggcgtgcagcacgatgtccggccgttcgttggccagcaggtttcggaccaggagcggatcgccgacgtcgccgaccacgggcaataccgggatggagggccagcggtgattcaactcccaattaataaagaaaaggctgttctcgttgcgctccaggagaatcaggcgggaggggaacagcgaggcggtctggcgggccagttcgctgccgatgctgccgccggcgccggtgatcaaaacccggcggcccgaaaaagcgccgcggatgagttcctcgtccaggtggacggcctggcggcccaggaggtcctcgacgtccacatcgcgcagttgcttgatcgaaacctgaccgtcgaggatgtcgccggcggcggggaccatgcgaaagcgcacgccggtatcccggaagcggtcgagcagatcgcgtaagtcgcggggccggagggcgcgggaggcgatgatgatctcatcgatgccgtgccgcagcatgatctggcccagttcggcgcggccgcccagcacggggacgccgtgaattttaaaacccttcttggccgagaaatcgtcgatgaagccgaccacctgcatattgagccggggattgccgcggatctgcttgagcagttcgacgcccatttcgcgggcgccgtaaatcaacacgtggcggcgcaggctgcgcggcggcaacttgctcttttcgcggaaagcgcgcaggaaaaagcgcacgccgccgagaaaagagatgcagatgaaggcgtcgatcaggaaaaccgaacgcgggaaacgggtgtagaaaacgaacatcaccagcatgatgaagacgagcgtgctgaccgccaccgccttgatgatgccgagcatgtcttccatgccgaagtaccgccaccaaccgcggtagagatcccagaaatagaaggcgacggcgcgcagcagcaggatcagcggcagggttttgagcatggtgtgcaagggccaactgttttcgacggtcagatcgaattcgaagcgcaggaggaaggaaagaacgtaggaaacgatgaccagggcgagctggctgaagatcgtcagcttacgccggtgacgcagcagccaggccccaaaaggggtgtcgaaaaaatggttgtcgaccggcagttccttttcgctcaccgacttcctctccttccgggcgggtatcatagaccaaccgggccggttcgcgccacctccccgacgaggccccagactggtcattgccgtcgtggtcggtataatggcggcgatttatcacggaggaaaaaagatgacgacagcggaaagcaacctggccgtctttatcgactttgaaaatctggcgctgggtttcaaggacaagaaaagcaagttcgaaatcaacaaagtgctggaacggctggtggaaaagggcaagatcgtcgccaagaccgcttatgccgactggcaccgttacgacgactataaaaagcaactgcacgaggcggctatcgccctgatcgagattccccgccgggcgatgaccggcaagaacagcgccgacatccggttggtcgtggacgcgatggacctgtgttattcgaaagatcacatcgacacctttgtgatcgtctcgggcgacagcgatttttcgccgctggtttccaagctcaaggagaacggcaagcgggtgatcggcgtggggatgaaagactcgacctcgaacctgctggccgacaactgcgacgaattcatttattacgaggacttgatccggcccgacacgaagaaggatgttttggacaaacggattcccgagaagaaacgcgaggccttcgaactgatgatcgcctcgatcaccgcgctggtccgtgaaaacaaggaaatcctctggagcagcatggtgaaagacacgatgaagcgcaaaaagcccagtttcgacgaatcctattacggctaccgcaccttttccgaattactggaagacgcccagagccacgacatcatccgcctgaaaaccgacccgcgcagcggcacctatgtcattgtcggcctcggttcccgggccagcgtcaacggcggttgatgttttcaaccttttcgtcggagatccttttctttcccgtgtggcggcgacacccttgccgtccgatacaaggttttcgccgtcatctttatctccaagcgggcgcccagccggacacactatagaaaaagggcggccttgagcgggccgcccttgttgtggaacagtctcagcagcgattattcaccgcaattgtcggcgaaacactgggattcgcatgcctggaaaatatccaccgtgcattcgttgtcctgcatcatgcaggtctgaacgcaatccattaatgcatcgacatcgccggcgcaggcagccacgaaaccgttgtcctcggccaggcactcttccatcgaagcatagtatcccggatcgcaggtattcacgacgtagtcgcaaatatcgttttcgagggtggagccgttgtcgtcgtcatcggccgcgtcatcgtcgtcggccgcatcgtcgttatcattgtcatcatcgtcgtcatcgtcatcgccgcaagcaatgccgatcgccaaggcaaaggcgaccaacagggcgataattgcataccatttcatcgatttcattagtaaagcctcctgtagtcttgattattcggtttcttggaatgaaagaacacattaccccgcagggttaaaggctttgtaatggtttttcatttaagaatcaagtcatttggctgcgactacgtctcaatataagatataaaatcattccactcaggaggcagataccggcgatcggccccatcaggcgcaccgctagtaggtcgagtttaccccgggaaagttccgccaggactccagccagcaggatcgccaccccgttcattccttgaatgaccaaattatagacgccgaagtaaaggccgatggaaccgccgccggtctcccgggcgcaagcgatgatcgcctcgccctccaagccaagaaaaatcgccaccatcggcccgcctaaggcaaaaaggagcatcgccggtccggaaccacggtcgtcgccaagcagggcggtcagcgcatacaccacggccaaggatacggcggcgccgacaacggcgcgctcccacccccacctggccgagattttcggagccagcaggaaacaagggatcgccacgaccagcaacggtcccaacagcaacgccaccagttccttatcaccgcccagcagatccaccgcgataaacggcgcggcggccgtcatgatggtgaaagacatctgcgatccggaaaacaacaggaccatggcgagaaaacgccggtgtttcaatactattctcagcgattggccgacagaaaggctttcggatgccgtagcctgtcgttttgctccaactcgatccggagcggcatagtagggtaaaatcatcagaatcaaggccggcaccgccagataaacggcagcccggaaaaagccccatctctgcaccagcaacggactgaccacaaacgccaggcccgtggccagcaataaaccggcgcccaggatgttcgacagcgaacgacgcaacttgtcgttatcattggaataatcgtcgataaggctccaataggggaccgcgtacatcgtgtaaccgacgacaaaaacaaacatgcccccgctcaacagcaaccagcgtaaactccgcgacatctccggcgaaggcaaaaaacacaacaacaatcccaacgaagggataaaaaaggagaaccacagcagactttgccgtcgatgcccgcgccgcacccagccgtcgctgaccatcccggcaaccgggtcggttgctccgtcgaagatgcgaaagaccagcaacaacgccccgaccgcagccgcagaaaacaaagttgctcggccggcgccggtcgagtccggaatttccgtggcggcaaaggcgatgatccattggtaaaaatagcgcaccagagccatgatgccgatctggccgcacaaataaaagaagcgtttcttgagattcaatcacctttccccggtctgacttccgcaggagcttattaaatagcgagggctcccacaatcgggagccctctgcgtttcacacattgaataggatggttcgcgtctatttctcgtccagcacgacaaattcgacgcgacggttcattttccgcccttcggcggtgttgttgctggcgatcggctgggtttcgccgaagcctttggcaatcagggcgtcttccggaatgcccttggaaatcaagtattggcgaaccgaatcggcccgttgctgggacagcaccaggttcttttggtcattcccgtcggaggaggcgtgcccttcgacgcgtactttcttgatttcgtactctttaatggcctgcgccacctgatcgagcaattcgaagctttcgggcaagatcaccgcgctgccgacccggaattggaccacttctttaatcaggatcttttccccggtcacttgcaccttggtgtattccgggcagcctttgttggctttggttcccggctggttcggacattcatcctgcaagtcgaggacgccgtcgccgtctttgtcgccgtccgggcagcctttcaactgctgcaggccgggttcgttgggacacttgtcgtttttgtccaagacgccgtcgccatcgttatccaactcggggcagccgtccttgtccttgtaattgtcgaaatcctcgggttgattcgggcactgatcgacgtcgtcgttgatcccgtcgccgtccgaatccttaacctcttcaaccttcttttccttctttccgcaaatcggctcggggaagtatttcaggccggcttccacccgatagtccgggctgccgtaaccattggtgatgcccgcgccgccgccggcgtgcaccgcaattcctttccagatgtgcacttccgctccggccaggaattcgatcgggtttttggtttcacgactccaaggctctttcagaatcgtgcggttatccagttcggcaaacaccttgtaacagggcgttccgaccactttccacgccagaccgagccggtggtccaactcatccttgatcttgtgctcgttcaaccggcgggtctcatcccgaaggatgaagtccaggttataggccaggatgaagtattcccattccacatcgacgattacgcccgggaaaaaggttaacccaccatcgctggttaagctgtccggtccgaaaacggggacgtccatgccggctttgagcgccacgcccaggatgtcctcattccgtttcaggaagctgtatttcagaaagaattgccagtcatcccatgcctgtgcgcgcattttagggatgaattggttgatttcctgttcgatataagcagggcctttaatcgacaggtccagggaatccaggatgccgaaagccgcgtaaaggttctgatcccatcggttgttgaccatatccatgaccgaatcctggtcttcggcccacatcagcggcttgttcatgaacacggagtagaaacccacgccgtatttcagttgacccaggttcgtcgttccccacacggagccgaagccggaattatccaggttctgatgccagagttgaatgtccatgccgacgtgatcggaataggcccaggtgacggcaaccggcagaaggatcagcaacgcaaccaacggcaaagcgcggcgcaacgccttttcgcgtttgcgcagcaggaacacgccgcccagcataccgagcatcagccagaaggacatgccgccctcgccgttctcggccacgctgcatccgccgccgccgccggtttcttctttatgcccgctgccgcagccgggatcgtcgtcttcctcgtcctcgccgccgctcggcgtcggggtcggcgacgggctatagtcgtcatcaccgccgggcgtcgagtcgtcgtcgccgggagtcacgtcgtcgttgtcgttattgtcatcatcgttgtcatcgttgtcgtcgttgtcgttgttgtcgttatcgtcatcatcgttgtcatcattatcatcatcgtcatcgtcatcggcgcagggatccggagcattcgcaaagctatcggtttccaaaccggtcgcatcgcggcctccggcgatgaacagaccatactcatcatcaccaccgcccgcggcgcggaaagtcgcgccaggcaagctgattccgcaatcggaccacagatcggccacgggatcgtagacatagcaggcatcagtcggcgtatccgtgctgccatcgacgccgccgtaaacaaacagtttaccgcaagccaccgtatagccggcgccccacaacggcagcggcatggcggccagcgtcgaatcccatgtcccggccgcgatgtcgtacgcgtccatcgtcgccgtggccgtggcggtcccatcgaaaccgcccgccacatagaatgtgccgtcaatgacgccgcccgccgaccacatccggccgatcggggccgccgtcagggcggtccaggcatcggccacgggatcgtaggaagcgaagttggtctggccgttgggccagatattcggcgttgtgccgcccatacggtacaacagcgttccgtctgtcgccgtcacgtagccgcccgaatcgttcaaggcatccgcgcccgtggtccaggaatcggttcccggatcgtaaatttggaccgcgttgatgacgacgccggccgtatccaggtcatgaccgccggggaaatagagctttccgtcgatggccacgcctccggtcacgtaaagattcacactcggtccgatgccggtgccccaggtgccggcgacggtgtcatagatgtacagattggtgttcggcgtccagtaccaggaatccgtggcgccgaaggccaggtagtattttccgtcaaagaaaaagccggcatggtcgaagaccgtcgtcgggatgttcggcaggacgttgaatcgtttgatcgccgtcgtggtcagcagcagttcatcgacgtagccgcccgtcgaagccgtcaccccggcggtatcggtgtcgccgcccatggcggtttcgggaaccgcaacggtgacttcaaaatccccggcggcgccgttggccacctcgatttcagcgggtcccgtcgtcggccagtcgaaaccggagtaggtcaggccgatgatggctttggagccggaattgttgaagaccgagagttcatagacgacatcggagccggccaaacccgaggcggcgacaacgccccccagataaatgcccggttcgttcgaatcaccgctgagcgtaatgtcgtcgattccccaataccaattccagcccccggctacgtatgtgaagcggaacatgacattggattgtccgttcagcgccggcagttcgtaaacttcgacgtttccttccacacttgcttcccacccctgcaccggaacccagttcacgccctcgtcgatcgagtagtgaacccaggccgtatcgccgctcaaaacacgaaagtaatggctgaagctcaattcaatgttgatgtaatccgagcaattgatcggctcggtgatcaatgaggtgttcatcgtggtgccgctgccgcaggcgtcggaattagcctcgacataatattcatcaccgaagtaagccaacggcagagtgccagttccggggctggtccagacgcaatcccctccgttgttcacattcgtccaatcctcaggaatgccggcactgaaatcttcagtgaagaaatccaccgcccaggccggtgaaatccaaagcgacacgagtaccaagaacaaggcaaattttttcattcttttcctcctggaatgatttccttcgttgtcgatcctcaacgagttttattcgtgagggtgcttttcacaatttttgtctcgataaagcctgtaatcaccacaagttgcaccctattatttttctataacacccttaagtctggcattacaatagaatctcttttactcaaatgtcaagtagagtttcaattttccacgacctgggaggacgaggaaattcagcgtttttgaatgtcccttcaagcaaaatcaagcttggcggctcattcgttagatgttaatgtacactgcttttcgaggatcaacagttacaaggacaatccatgaaacggcttcctttcttcctcctgctggtctttttgaccttcattccactgtcggccgcggcgtttacgctgctggacatgcaaccccaatacgatcgttacgtggttcatcccaacgaaccgctgaccctggtgttcgacgcttcgttggacgcgaccacggttgccgcggacagcgtgaccgtcgccaacctgctcagcggcgaggccgtgccgggaacgattgcgctggccgccaccaaccaggccgacgacacgctgattttcacgccgaccgcgggtgttttcccctttggtcgccggttgcaggtcggcctcaatgaatcgttgctcgacctgggcggcgccggcttcaccggcgagttgccctccgggggcgtcttcgtcgccaacattcccaacgacctggacgtcgtggcggattatctggaacaatgcgcctcgtactacggttttgatccgaccgatccggaaaacacgaatcccgaggaatattatcgcattccgggcatgtcggtgaccgaagcctggaaaatgacgaccggcgatccgagcgtattgattgccgtcatcgacgtgggcaacgagggcttcgccaacactgaatttgcggaaaacgtctttttcaatcgcggcgaagtccggcagccgcaggacgcgggcggcctgtgcccggactgggactgcaacggcgacggccgcttcaattatctggactatataaacgatccccggtttgcggatttcaatgaaaacggctggatcgatccggatgacgtcttcaccgccttcaccgacggcgtggacgacgacaacaacggcttcatcgacgacatcagcggctgggactttttccgcaacgtcaacaaaccgttgggcgttgaggaattccccgaggggacgcacggcgacggcatcggccgcggcgcggcgggtctggcgaacaacggccaaggcactccgccgggggtctgccccgattgctcgctgatgtggattcgcgtcggcgacgcggtggtcaccgagggcaatctgatggccgccggcatcgaatacgcgaccatgttgggcgtagacgtggtggccatcgccaacggcatgtacaactacagcagcctggcgcaacaaaaattcgtcgaggcttacgaagcgggcgtcttcgtggtggccgcctcgggcgacgagttgggcatgcaccaggtgtatccggcggtgggcgacgacgtgtacagcgtcaaggcggttctgcccttcgccccgatcgaacttttcgggccgatcgacctgtcgttgatcgccttcaccgaaagctactgcacgaactacggagcttccgtcgaagtatccatttcctccgaccaatgcacttccaccgctacgtcgtacggcgccggcttggccggcctcatcctttcctgggcgcggcagcaaggcgacgacctgacacccggcgagatcaaacaactgctcaatatgaccgtggacgacatcaagtcgcgttgcttttcctttaacctgggcggctgcaaggaaggcttcgaccagaacttcggttacggccgcgtcaacctcgaacgggcgctgcaagcgatcggcgacccgctgttcggcctgcccgaacgcattccgcccgtcgtgcgcgtcaccagccccgcgtggtgggcgacgatggatcccctgcaacaaccaaccttcgacgtcgaggcgcagatcgacgcccgcggccggtcttatgaatggaccgtggaactgggtttgggcgtcgaacccgatgacgacgagttcttcgccgtgacctccggcagttccacgacagcgacggacggcgttttggcgacgatcagtccgctggattacgtggatgaggaatggctgcgccgcgatccgaccgacaagaacgactttaccgtaaccctgcgggtgcgcgcctggtgggaagcggacggcgaagaggtgctcggcgaagcccgcaaagccatcgcctggcacaccgacgatcaggaagggaccggcctgctgcccgggttcccgctggatctgggagcctcgggcgaatcgagcccggtgctctacgatctggacggcgacctggacaacgcgctggaaatcatcgccgcctcatcctggccgcgggtggaagtgttcaaacgcgatccggacaccggcatgtaccagccggcgcccggtttcccggttgatttggacgccgaccgcttgtttcccgattcggtgttggcttcggtggcagtcggtccgttattcggcgacggcgtgccctacatcatcgtggccggctactacggccgggtatacgccattcaccccgacggcaacctgcacgatggcggtcccttcctggagggctttccggtcgacaccgatgtcctggataactccacgccgttgagctacgggcacggcaacgcctattgggcaagtccggtgctcgtcgatctggatatggacgggcagttggaaatcgtcgccgcctccgccgaccaaaaggcttacgcctggaaaccggtcgacgaggatcaggacggctccgccgaccggctggccggctggccggtgccgttggattccagcgccgaagccggtctggttccctatttcgacagttgcgaggacagcggtccggccccggtgatgggcacgccggtggccggcattctggatccgactcaccagaacgccgacatcgccggacaccccgcgatcatcgtggccagcagcgagacgtgcaacgaaggtttactgcccaccggccgcgtctatgccatctattggaacggtttggaaaatgccgccggccccttcctccccggctggcccgcccagccgttggcgccgctgggcgacgcgctgccgattccgccgctgacgatcggcatgacctcctctccggcggcgatcatctacgacgaacaattgatggtcggcaccggcgcgtttttctggttcccgcagttgatcacctgggacggcgcggaaacgaaaatccgtcacctgaaatccaagctcaacctcggcagttcggccgccggagccttcgcccgtttcgacggttccgacataccctggtacttcttccccagcgtcggatttctgcaactggacgggaaggccgtcggaccggccctggaagccttcaacatcaccggctggaagctcagtgagttgaacgacgggcccgccctgcggcttcgactggacgacatcaacttcttcatcaatccgatcgtggccgatctcgacggcgatgccctgccggaaatgatggccgggagcggcggttatcggctgcacgcggtcaattaccgtaaggaacaaccggccgattggccgaaattcactcattcctggcaaaccggcacccccgccatcggcgatgtggacggcgacggcctccatgaagtggtgtccttcacgcacaacggcaagcttttcgcctgggaaacaaccgggaaatcgtgcttttacgacggtcccaacggcgattggcccaagtaccaccacgacgcccacaactccggtttttacggtttggacgccacgccgccgggattgaccaccgacctgaccgtttacttcaccgatgttgcggacgttttcgaagtgactttcaccgcgcccggcgatgacggcgcctgcggcacgccggacggctacgacctgcgctacacgaccgatccgagcgccgatctacgcgatccggacgtctggcagtcggccgccgcgctgaccaccggcgcgccggaagtcggcggaatgccgatgagctttaccgtcacggcgcccagcgccgcgctcttcgcgctgcgcacttacgacgaggtcggaatgatgtcctacatttcgaacgccgccgccccgaccgaaccgggcgccgatgacgacgatgccgcggacgacgacgatgccgccgccgatgatgacgacgacgacaccgtggcgccggccccctccggcgacgacgatgacgacgatgaagggtgcggctgctgacgcatccgtgagctgaaaaagtatcccgtgcggctgaagccccggcgttgaccgccggatctttatgccgtaccgcaacaggggaatgactattcacccactccttgcctgtttcatgggtttttatcgcccaatctcctgattttcatcgcacccagccacatttccatcatttttccatggttgcgtcataaaatttgcacatcgatccggtatttatgcctcgaaggaggtaaggacccatgaaatccggcgagaaaaattttttttgcacgacgatcgccttgctgatcgccgccctgatctggatatcctgcctcgggcgatattaccaccccaatccggccgattatcgcgtcgagacgggcatcgccccgaaagcacacgcgttggccgcgcgacacctggccatctggatggacgaggcgacgaggaatcgcgaactggcgcgaatgttcgaggtcaatcccgagtgggattttatgagccgcacctttttcgtcctggccctggccaacatggcgctgcgcgatccggcaatgcaatcgcaagccctggagatcatcgacacgattatcgacaataccctgcgcatcgaacgtgaacggggcttgtatcattttctgatgggatattcgaaagattcaccctgggtgatgcagccggcgcgcagccaatttgtcgacggcgaaatcgcgatcatgctggcggcgcgccggatggtggcggaaaagcccgaataccgggcgccgctggcggagcggatcgccgtgatgatcggacgcatggagcaaagtcccgtgcttttggcggaaagctaccccgatgaatgctggctgttttgcaatgcggtcggtctggcggcgatccgcatgtccgacgcgctggacggcaccgaccattccgccttcctgaagacgtggatcgcgacggccaaaaccaaattgctcgatccgcagaccggcctgcttatcgccgccgccaccgttcggggaacaccggcgcccgccggcgaacatccggaaggctcgaccatttggctggtcaaccacatgctgcaactgatcgatcccgatttcgccgccgatcaatatcgccgggcgcggctcgaactcggccgttccatcgccggcttcggctacgcccgcgaatggccggcgatgtatccgacgcaacccgatatcgactcgggcccgatcgtgccgttgctgaacgccagcgccggctccagcggtctggccatgatcggcgccgccgccttcggcgacgcggattatttcacccgattgctggcttcgctcaattttgctgctttcccggtggaagaaaacggtcaattgaaatatctggccagcaatccggtgggcgatgccgtcatgctatatgcgatggtcctcggcccgctgtgggccgaagtcgaacggagggccgaatcatgaattggtcgctattcaagccgctccgacgccgccgattggtggtttatccgatcatcttcttcgtcctcttgattgcggcgcacctggccggcttccgcgagcatttgcaggtgctgtccggcgcctgcggcttcgttccctggtcgatgtttcagggcgcagcttacttgatattgtattttctgtgcctgatcgcatcgccgatcatgctgctggccgccgccctctcggcgatggcccgaatggtgatccgccgctcatcccggtgaattcagcaactgcaggcgtcttcatcgtcgtcgtcgtcatcgtcatccgacggtgattcgtcgttatcatcatcattaatatcatcatcatcgtcgtcgtccaccgcgtcatcatcgttattgtcattattgtcattgtcgtcgttgtcatcgttgtcatcgtcgtcggccggttcgccgagaatgccggcctgttcccccaggtaggcgacgaccagccgcgcaacgttgttgcattgctccagatcgagacgttcatacgtatcgtcccagtgcataaagccgctgagttggtaggcgctgcccagaatataggcgtggtaaccgaaatcccagaaactggcgtgatcggacgagtcgttgccgggccagaccaccccgacatgcgccgtccccgccgggtagacgtgggccagttgattcatcacctgaagatcgggccaggagggataattggaactggacaacgccgcgttgattccctccagacgccagccgggcagatcgaggttgagcagattgcggatttcgtcctggcgattgaaggacgcctccgcatgcactcggctgcccatgtgaccgctttcctcggagtcgaaaaggatgaaacgcaaggtttgcgcgaaggtgtagtcgctcagcacccgcagggcttccaacacgatgatcacgcccgaggcgttgtcgacggcgcccggcgcgtaatcgggatcctgggtggaatccagatgggcgcccaccatccagatggcgcctggatcggtctcgcccgcgatttccacatacaggttgctgcaactcaggtccgtgcgacagtcataggtctccacttcgaaaggcaaaccgatttccgtcaaccgatcctgtaaaaaatccagggctttgtcgtgatccgggtggtcgatatcacggctgagaatgtattcgccgtgatagggatccacgccggtaagaatccgggcgtcggcatcgatgcgcgccgggtcgattttcccgtaagcgtcgaggatttgcggattggctacctgggcccgggcgattccgccgcccaccgccagacaaacgagcagcaaaagactccattgcacacatgaccgctccatgatccctccatcgaccgtcatttcattatcaacattcgctccagcgctctccgtaacattctaccacaacatcgccaagaaatgatctattcaaaatcgactttcaggaaaacatcggcagcttctcggcgcaggcggtcaaaggtcaataaatcgaggggcgtcgccaaacccgcatggttcaatctcccggacaggcattcccgggcgatcatgaccggcaggcattccatcggggcggcgccgtcccgcagcagcaccgtgccggtgcgcgtcgatccggctccatagaccgtgacggagagaagcgcttcgcggcggaaaccggcggcgacggcgcgttgttgttctttcacgttcatcgggcgcgcgatggtttcgatcaggcgataagcccatggccgcttctgcggctggagcaggcgaatcaacccgaagatccaggtcggttgctcgcccaaatagaaccaggtgtgcaattcgcgcaggggaaagcgtgcggaaagcgccggcgtgtcgatcgtcgggacctccagcagccggagccggccgaacggaaaaggcagttcgacgtttttctgcgaatcgccgagccgcaccggctgatccttgccgccggataaggcgacggggcggtacccggcatccaaaacgccgctcatcatcgaggcgagtccggaattcgcataggcatgttgaaattgggcgaagatgatttcggcggccttcgcccagggcgcatcctccagaagtctggcggccagcagcgtcgatacgccgggaatcgcgcccgccccggtggccaacagcagcccgtttcttcgggcttcggcgtccaactcgcgcatccgacggtaatgcacctgttcattggcgcaatccacataggggcgaccgcactcgacggccaggcgggcgatcgccgcgccgtggacggcatagggaccgatcgcattgatgaccagggccgattgttggaaagcccgccgcaaagccggttggtcggtcgcttccgagatcagcagttcgatgcggtctcttccctcgctcggtaaaaccgccgtgagtttttcagggttgcgtccggcggcgacaactcggtaaggggttcgcttgatcaagccctcgacgatcgtccggcccgccagaccgttggcgcccaataccaaaatcgactggtcggaaatcttcatcggttcattgcacctgatgcgtcttccatcaacgccaaaccacattcaatcaatcccgtaccccgacaattgaacatagcaccaaacgccggccggcaacaggacatgaaacggggggagggaggggattgcgcggtacgggcttttcatttctcatctccagccggttgcttcacccgagtaaatgaagcttttcacctccgtgcgcaatggccgattaattagcggctgccggcccgaaaaccggcagccgcgggaggaaatgggactcgtatcaacatcaggcgggcggcgtcggtggcgccgcgtcgcgccccggcacgcactcagtcaggcttgcgtttgcgcaggaaagccggcacatccagatcgtaggcgtcttccgcggcacgcagatcgggtgtttctttttccttgagccgaggatccagcccccgcggcggattgagccgtgcgcttcccacgtttttcttgccgaaatcgggccggcggatctggggctcgcggcgattggccggcggctgctcgcgtccgccctgttcctcctcgcccttgaacggttcgggacggggaatgttttgggaggtgaacgccgcgtggtattcggactggctgacatgatgggtggagcggttcagataggtcggcaccgtccgttcgatcatctgttcctgggcttcatcaaagccggtggcgatcaccgtcacgcggatttcctcgcgcaggttctcgtcgatgacctgtccccaataaatttccgcgtcgcgcgagcaggatttcatcaccagatcggccgcctcgctgacttcggccagacgcagatcgaaaccgccggtgatattgatcaacacgccccgggccccgtcgatgctgacgttttccatcaacgggcaactgatcgcctgcgccgccgcgtccacggcgcgcttctcgccggtggcctgaccggtgcccatcagcgccagttcgccggagacgttggtcgccttcatcaccgagcgcacgtcggcaaaatccagattgacgtgaccctgctggacgatcaggtcggagagcgagcgcacgcccttgagcagcacgtcattggcctttttgaaggcatccatcaacgtcgtgtcgctgccggccacggccagcagtttttggttggggatgacaatgatcgtgtcgatctcatcgcgcagccgcttgatgccctcctcggcgacggtcatccgccggcggccctcataatggaagggcttggtgaccaccccgacggtcagggcgcccatttcccgggccagcttggcgatcatcggagcggcgccggtgccggtgccgccgcccatgccggcggtgatgaagaccatatccgcgccctcgagcacttcccgcagggcttcgacggacttctccgcctcgcgcaaaccgatttccggattgccgcccgcgccgagtccggagcccaacgacaccttgatgccggccagattgttggccaacacctgcttgtcggtgttgcaggcgatgaactcgacgccctgcacattgtcctcaatcatggtgttgatggcgttgttgccgcagcccccgacgccgatcaccttgattttggctccggcccgttccggttccacaatgttgaacttgagacccatgataacctcccttgttgggggcttttcgcccccgtgccgcgtaattcaaacagagatcacggacttcccaacaatccggtgatccttgatttcacaccttgcaacatccgggaaaaccagatcggtttttcctcgtcccagggcgtcagattgacgttgtgcaaacccaacagcaccaagccgacggccgtggcgttgccgggactggccaccacatcgaccaggccgccgatatgatgcggtagaccgatacgcacccggcggttgaaaatcgaccaggccacatcgtcgattccccgcaggtgacaaacaccgccggtcaggaccaccgcggcgacgctgcgatccaggtcttggcggataatttcctcgttgaccaattgcaggatctcggccacccgcgcttcgatcacctcgcacagcttgcaatgatcgatgagatgggtccggccgttggcgccggcctcgacctcgatttcgtcgcccgggatcgcttctcccggcagacaatggccgtaacgtttcttgagccattcggcgttggacgctgaaatattcatcatctgggcgatatcattggtgatgtgattgccgccgacgggcagcaccgccgtatgcagcaccgcgtccttcttcatgaccagcaaatcggtcgtcccgccgccgatatcgatgaccgccacacccatttcccgctcatcggacgacaaaacagcctcggcgctggccaacgccgaaaggaccaactgatccacatccacgtcgcattgcttgcaacactgccgccggttggccaaagaggttttcgagaccgtgacaatgtagcaacgggcttccaggcgcatgccgcgcatcccgatcgcattcttgatgccggagacctcgtcgagcatgtattcctggggcaggacatgcaacacctcggattcctccggaatcgtcaccgattgcgtgccttccacgacacgccggacgtcctccgccgtcacggtgcgaccctgcaacggcaacatgctgtcgctgttgaaacccttgacgaagctgttggagatgctgacgttggccgagcggatctgcacctgcgccattttctccgcttcctcgacagccttggagatggcttgggcggtcttgttgaaatcccgaaccacgcctcgccgcaaaccgacggaaggatgcgtgcccaggccgatgacctcgattccgcgatccgtttcctcggcgacgacgacacagattttcgtcgtgccgatgtccaatccgactactaattcgccgttcttgttcttcatgctcccgaaccccttcgcaggccgcgcaccacgaccttaccggccacggccaaatcgacgacacggacttgattcatttgctcacccaaatgctcggcgaccaaggaaaaatgcctaagcttgcgctcgtaatccccgtatccgaagtgcaccagcatccccgtttgcgcggtggtcaacgagaaaccactgaccgtatcgaaaccgatttcactgacgcgctcgtccggaaagacgccggtttcaccgcccagccgcaacaactgcaccgcctcggccacccgggcggcctgatggctggccgaagagccgcccgccgcgaaggagtcgccgcggaacccggtcagcacgggcaaatcgatcggatcgccgctaccctgccgcttgaaaacaacgccgcgctcgtccaccagataaaggccgccggcgtgcagcaacgccacggcatgccgctcccggatgtcgacgaccatgccgtcgggcaattcgcggcgcacggtggcagcttccacccagggatgcgaaacgacacgctgcgccacgtcgttcagatccactgaaaaaatgttttgccccagccgcgtatgcagaaagtccagcagttcctcgcgcgacacttgctcttcggtccggacgtcaatccgggtcagacgaaagtgatccgcataacgcgtttgatgccagacggttagcccgatcgccagcagcaacaccaccggccaggcccgccaggcgtgggctttaatgaacgccgccgcccaatgccaaaccgggcgcaacggtttggcgacacccgcggccgcccgtcgcagggtcttgaccaggcgcccccgataatttttgggaggcgtccgccgcttattgggtctggttttcgcgcgcctcgacattgtgctccaccgtcaaaccggcgactcgattttcaagcgcgccgtgttcaacaccgtttccaccaactgctcgaacgccatcccctgccagtcgcgggcaatcatcggcaccaacgacaattcggtcagaccgggcaaggtattgacttccaacaaccaaggctgcctctgttcgtcgaggatgaaatcgacacgcaccacgccctcggcccgaatcgtttgggcggcggcgacggccaggttctgcacctgggcgacgacattgtcgtccaaaccctcgggacgggtgatgtagtcggtcatgcccttggtgtatttgtgccggtaatcgtaaaaagtaacgctttcgcccggcaacttcttcgggcggatttcgaccaggccaaacgcctgttcacctaaaacggccacggacaattcgcgcccgggaatgtactgctccaacagaacgcattcgtcgtagcgaaaagcttccgtgagcgctttttccagttcgtactggcggccgacgatggcgatcgcgacgctggagccctcggcggccggtttgacgaccagcggccagccgaaaggggattccatcaccccattgcgcggtccgctccgccgcagcgtccaatacggcggcaccggcaagccctcgtcctcgaacagttttttactcaccaccttgtccatcccgatcgccgaacccagcacgccggggccggtatagggaatccgcaggatttccagcaggccctgaacgcagccgtcctcgccccacttgccgtgcaaggcgttgtagaccacgctgacgccctcggcgacaagaagcgcggctgtttgttcattcagatccagctcgaccacatcgtagcccgtgtcccgcagcgcccgcgcgacagcccggccggtccgcagcgaaacctcgcgctcggaactgggaccgcccatcagcacgcccacttttttattgcgatacatcacgctctccccaaatgatcacttcgggttccagccagatcccggtttgttcgaagacgatctgacgggcttgttcgatcaacgccagcacatccgccgccgaggcgccgccctcgttgacgatgaaattggcgtgcttctcgctgatccgggcgccgccgatccgccgccccttcaagccgacggcctcgatcagccgcccggcgtaatcgctttccggattcttgaaggtcgaaccgccgctgggcagttccaggggatagcgggcgcgccgccgttcgattgtttcctccacccggcgccggatcctttccgctgcaccgcggcgcaaggacaaaaccgcctgggtgatgacgtacgggccgtccaaggccagaccgcggtaacggtaaaccagctcggcgcggggcaatcgccgcagtcgcccttcggcgtcgactatttcaatctctgcgagcaccgaggcgaaatcgccggcgctggtgccggcgttcatccgcacaccgccgccgatgcagccggggatgccggccagaaactccaggccggcgatgccttgttccatgcagcgctccagcgcgatttccatggacaggccggcgcccaatgtcaggcgtacggcgtctctggcttctgtggccgcgaattccgtaaagttctcgcgcatcaggatcgtgacgccgcgcaatccgccgtcgagaaccagcagattcgagccggcgccgatgacgcgcgtctgttgcccggccgccagtgaccagcgaacgatcttggcgatttccaccgccgtttcgggctgcaccaggcaatccgccggaccgccgacgcgccaggtcgtcaacgaggccatcgataccccgaggcgacaacgcgcgccgagcaattcggtcaattgcctttgcagcttcagatcgatcacgctctctcccgcttcaaacgttcgaccaaccgcgcggacaattgattcaaatcgccggcgccgagggtcaggatcaagtcttccggttgggccgccgcgatcagcaaatcgagcatctcctgttgatcggcgacataggttacatccgggtggcccatcgcccggatgccgtccaccagcttgcgcgagttgacgccttcgatcggcgtttcgctcgctgcgtaaatatcggttaccaacagcttgtcggcctggtcaaaagcggtgagaaactcatcgaacaggtcctgcgtccgggtaaaccgatgcggctggaaggcgacgaccaaccgccggtcgaagccggcgcgcgccgcggagagggtagcgcgaatctcggtcgggtgatggccgtaatcgtcgatcaccaggatgttgtcgatctcgccgatgcgctggaaacgccgccgaacgccggtaaacgaactgagcgacttggcgacaatctcgaagggcacaccgagctcgcgggccacggcgatcaccgccaccgcgttttgcaccatgtgccgaccgggcaacggcagcaccacttcgcccagttcgccctcgcggttgctgaccgcggtgaattgcgtctggaagtcatgctggcggattttcacggcccgcgtctccgcctccggcgacaggccgtaagtggcgatgcgcttgcgcacgcccgggatgatttcgcggacgctttcatcatcgatgcacaacaggcagagcccgtaaaacggcaccttattcagaaactccagaaatgtgcggcgcagttgctccattccagaatagtgatccaggtgttccagatcgatgttggtgacgacggcgattgtcggattcaacagcagaaaactgccgtccgattcatcggcctcggtcacaaaggtgtcgccggcgccgagtttggcgttggagccgatggcgtcgacgcgcccgccgacaaccaccgtcggatcaaagccggcggcgcccaataccgtcgccagcaggctggtggtcgtcgttttaccgtgacttccggccaccgcgacgccgtattttttcatccgcatcagctcggccaacatttcggcccggggaatcaccgggatcttggccgccttggcggcgatgtattccggattgttcgacttgatggcgctgctgatcaccaccacgtccgcgtcgtcgatgaacctgctttcatggccgtgatgaatccgcgcgcccagacgctccaggttggtggtgatgtcggtttcccgcaggtcggacccggaaactctaaagcccaggttgagcaagatttcggcgatgccggacatgccgatgccgccgatgccgaccaggtggaggtgttccgtcataccaagcatgttcattctcccgcttccgcttcttggtggcgcatcgccagcaggttgaccacccgttgtttgccggcggcctcgcctcgcgtctgggcgacagcgaggatgatgcccatcaggatgaaattgagcagcgtgttcgaaccaccgtaggaaaaaaacggcatggccagacccttgttcggcaacacggacatcaccaccgccgcattgacaatgatctgcagtcccaacaagcttgccgcgcccaccccgcaatatcgcaggaaggagtcttccacccgcatcgtcagacggatcgagcgccagacaatgaaaaagaagatgcccaacacgcccagtaatcccaccagtccgaattcctcgcccaagttcgccaaaatgaaatcggtgtgaatttccgggacgtaatgcgctttttgccagccgttgccgaaaccgacgccgctcagcccgccggagccgatggctatcttcgcctgccaggcctgccaattgacctgatagagattctgatccggattcagatagccccgcagccgctccatccgccaggatgaggtgaggatcgccagcgtaacgaatgtcacgcccgccgcgcccaggatgcccagggaactgagacgcgccccgccgatgaacaacatgacgatcaacaaaccgcagataacaaccgcgccgcccaggtccggctctttcgccaccagcccgatataggccgtgacgatcagggtcaccggcagcacgccgaaaatcaaagaccgaatccggtcctggcgcaccgccagataatgcgccagaaacaacacgaggaccgccttggtcaattccgagggctgaacattcagccccccgcatttgaaccagcgatgggcgcctttggcttccccgccgaaggccggaacaaagaccaacaccaacaacaacaacgccccgcccatcaaactggaaatcaacaccttattattgaaggctttcagatttattcgggtgatcaacagcatgaaaaacaatccgacggccacgttgaaactctgtttttccaagtaaaataccggcccgtgtttcatcggctgggtgacgctgtaaatggtgagcaagccccagaccgccaaacccagcaccagcgtcaggagaatccgatccaaaccgggcgcccgctgttctttgactctgttcattgcgcctccacccagcggcgcatggcctcgccgcgctcctcgaaattggcgaattgggcgaagctggcgcagccgggcgacaagagaatcgcttcgccggaccgcgccgcggcgcgcgcccactccaaggcttcggccatgggcccgacccgatgcatcgccgcgtcaggaagcgccccggcgatcaactcggccgcttcgccgtaagccaccaccgccgcgcatttttcccgcagcagcccggccagaaccgtccaatccgttcccttgtcccggccgcccagaatcagcacggccgggcgatccagcgccaacagggaagtgcgcaccgcgccgggcgtggtggccttggaatcgttgatgaaccgcacaccctttttctcgcccaggtcttccaggcgatgcggcagaccgcgaaattcgaccatggcgctttcaatcgccgccggatcggccccagccaacgtcgccagcagcgccgcggcggccaggttttcgcggttgtgccgtcccggcagacggtaagcgcgcaagggaatccgttgctcccgttccgttagtcgcaacaccagatcctgatccgtgcaaaaggcgttcgcctgcaggccgttgaacgtgaacagccggcccggcaacgatccggcaaagcgcatcaccccggcatcttccgcattgaagaccgccgcgtcgcccggcaattgccgggcgaacagtcgcattttggctgcggcgtaagcggtcatatccgggtagcggtcctggtgatccgaagccagattgagaaacgcgccgatgatggggcgcaattcaacgatggtttccaattggaagctggacaattcgacgaccgccagatcgagcgtcgcgtcatcgagcagcgcctcgctgagcggttgcccgagattgccgccgacgaaaacccgcttgccggccgctttgagaatttctccggtcagcacggtggtggtcgatttgcccttggttccggtgatgcccagcagcggacaagacagttcgccgaacgccagctccacttcgccgatgatccgcgcgccgcgttcgcgggcctgcgtaaaaagcggctgggccagcgggacgccgggactgatgacgatcgtgtcggcccaggagaaaagctccggtgtatggccgccccattccaccgcttccaactcggctcggatcggctccaacagactgcgcaacttcggattgtcgcccgcttcgctcaccgccacccgggcgccgcggcgcaaggccagccgcacggcgtcgcggccgctgcgaccgtaaccgacgacgagcacccggcgccctgtccaatccatcagatttcttcccccttgaggccgcggaccacgcgctccatgcgcatcccccggctgcctttgaccagaatgacatcgccgcggcggccgtcgcgccgcaactcggccacaatcgccgcatggtccggcgccgcgacaatggcggccggggacattttttcctcgcgcgctccttccgccaccaggccggcgtgctcgcccaggagaaacaaccggtccaggccgatcttggccgcatggcggcccaggcgccggtgagccgcctcggtttcggggcccagttcgaacatgtcgcccagcacggcgatcttccgcccttctccggccagttcgtccagcgccgagagggcggcatccatgctgcggggattggcgttgtaggtgtcgtcaatgacggtgatgccgaagatgctcagcacccggctgcgcatcgccgccggccggaaggtttccaagccttgtttgatcgccgccggcgacacgccgaaagcgcgggccgcggcggcggcggccagggcgttatacacgttgtggcgaccgaaggtggagagtgccacgtccaacggctcgcccagcacgctcagcgacaggtcgatgccttcaaagcccttggtccgcaccgccagggctttcacctgcgcgtcggcggcgggatcggccgagaaatacacacagcggaaaggcttgtcttgccccatgcgggcgactcgcggatcatcggcgttgagcaccgcaatgtgatcggcgccgaagccttcaagcagttcgcccttggcctcggcgaccgcgccgatggttttcagatgctccaagtgcaccgcactgacgttggtgatcacgccgatggtcggccgggcaatttgcgccagccggcggatttcaccgcgcatcgacatgcccatttccaacagcgccacccgatgcgcggccgtcaacctgaaaaccgtcaacggcaggccgatcaaattgttgaagttgccctcattgcgcagcacccgaccgggcagatgcgcctctaatatttgatagagcatctccttgctggtggttttacccgtcgagccggtgacggccagcacgggaatcccccgccggtccagcgtccagcgagccagatcgcccagggcttgcagcgtatcgtccacccggatcaccgccaagtctttcggcgccggggcggtgagcgttcgactgatcacgacgccggccgcgcccttggcgatcgcttgctcgagaaagttgtgaccatcgaaattgggtccggtcagggcgaaaaagcactcggccggcagcacctgccgggtatcggtgcaaattccggaaaacggctggtcggctcttccggcgatcaattcaccgccgatggcgcgactgactgtttccgccctatacagatcgtgcatcagctttctccgaagcggcgggccaatgccgccgccgccatttccgtgtcgtcaaaatgaatacgctgagatccgaaaatttgataatgttcatgtcccttccccgccagcagcactacgtcgcccgcctcggccagatcaatcgcccaggcgatggccttggcccgatcgggctcgatcgcgtaagccggaccttcctcccaccgcggcgactcaccggatttgaggaatcgccggccgaccttctccacgccggggacgatcatgtcgatgatcgcctgcggatcttccgaacgcggattatcgctggtgatcagggtcaggtccgcctgctgggcgaccgccttgcccatcaacggccgtttgccctgatcgcggtcgccgccgcagccgaaaacaaccaacaagcggccggccgccaggcggcgcaaggtggagatcacattttccagcgcatcgggcgtatgggcgtaatccaccagcgtcaggaaatcctgccgacccaccggttccaggcgacccgggatactgcggcaaccggctaatccctgttccacgacccggccgtccaccttcagaccgtaagccacggccgcggcggccagtacgttcatggcttgaaaatcgcccagcagcgggcagcggatgtccaacacttcctgcccgtactgcagagagccacgcaagccattgaaatcgcaggtcaattcacgccaataaatcgaggcgtttttcccgaaggtaatcgtcggcatcggggtggctttcatgattttttgcccggccggatcatctgcattgacgaccgcgaaagccttcggcttgcggctggccgaaaccggcagcaactcatcaaacagacggatcttggcgcccagataagcatccagcgcgccatggaaatccagatggtcgcgcgaaagattggtgaaaacgcctacatcgaaatggcaccccacggcccggcgcaactgcagggcgtggctggatacttccatgatcacgatttccacgccgaaattcttcatttccactagaatttcaaccagatctggagcctccggggtggtgtatcgcgattggatcgtatgaccgttgtaatgataatcgaccgttccgatgatccccactttgcgaccctgagccttaaaaatcgcctcgagttcataggccacggaggtcttgccgttggtgccggtgattccgatcaacgttaatccggccgtcggatcgccggccaggcgatgtgatatcagcgcgacaaagcggcgggcatcaggcactcgaacgagcggcacccccttggtatcgagatcatcctccgcggcaatcgccgccgccccggcttccagggcttgcgggacaaagcaggcgccgtcggtttgcaggccgcgcaccgcgacgaacaaatcaccgggccgcacctgacgggaagcgaccacggcgcgaatgacctcgacttgccggttgaccgaagcccaaggcaggtcatcgatcacctgattgagcagcatgtttcctccactactgtctgggggcgaaaacccccgttatttgtctgttttcagccaacgtttgcccgggtgcgggttcctgcttgatcgccactcccgagccttcgaaggtcatatcgatggtcatccggtgcgccaggctccgggccgcccgaatgctaagacccctgaaatccggcgcttgatccgcgccgaacaatcgtttgtccatggtgacgccatgattctccggcgccgcgtaaacaatgtttttttccaattcactgaccaaagttgcctcatcttgccgctgttccgaatacacgccgagataatccagcgttttttcagcgatttccctgaacgccggcgcagccacggtaccgccgtacgtccggcccggaggttcgtccgcgaccaccaggatccccaggatgggctcgtcgccgggcaccaaacccacaaagctcacgacacgccgcgatggatcgggttggccggtgcgggggtggtaatggaacgcagttcctgtctttcctgcgatcggaaaaccggtcaccgccgcccgtgtccccgtcccgccgtcctcagtgacctcgaccatcattttaaggacttccttggcgattttagcgctgacggcgcggccggcgatcgtcggattgtttttcctgctgccaatcccgtcgggactgatttgttcgagaaccacaaacggcgtcatcattcgaccgccgttgcccaaggcggcggtggccatgagcatctgcagaccggtcacggcaatcccctgcccataagccttggtagccgcgtcgatgggataccaggttttgtagaacttaagggagccggccgcttcggcggccagatcgatcccggtgcgttgaccgaaaccgaaccggcgcaagctttcatagtattgttgataggtcatgcgaatcgccaatttggcgatgccgatgttcgaactgtatttgatgatttgcgccggcgtggcgttgccgagcttatgcgtgtcggaaatggttttaccgccgtaatgccattgaccgtattcacaatcgaccagctcatcgagcctcaccttgccgtccgctaaaaccatcgccatggtcagaggtttcatcgtgctgccgggttcatattgatcaagcaccgcccgattgcgccggtccagatcggcgctctcacccggacggctcggatcgaaggtcggacgggtggccatggccaggatttcgccggttcgtacgtccaccacaatggcccaggcatgtttcggtttgaattccctgaccattttatccagcgcctcttcgacgaaccattgaatatgaagatcaagggtcaagcgcagggtttgaccatccttgcggccgaccacctgattgtcgctgaacaggtattgggtgcctttagcgtccttgatggaaaccagatgtccggcttccccgaccagggattgttcataagtggcctccaacccttcacgccctttgatgtcgatgtcggtccagcccagcagattggcggccagcgctccgcgcgggtagatgcgcttggtttccttgcgcagtctgacgcccgccaacgactcgggggccaaggccgccagagcggctgattcctcattggtgatgaagcgcttgatccattcgaattgcgtatcactgcggcatttgcggtaaatgtccacctcgccgatctggagcacatcggccagcgccttggacgttcgcgcggggtccttgaccagggtcggatcaacccacaccgagtccaccgtcaccgtggtggcaagaacttcgccatggcggtccaggatgtcgccgcgcggccgcggcagtttgatttcaaggctgtgaattttttccgcctggttgaccagttcctgatgtttgatgatcgtcaaatagaaggcgcggcaaccgagggaaaaaaagccgatgataaacaacaccaatagcgtgccgacccgcacgcgacgggcctcatccaagttgaagggtttctccggttggatgtgcttggcctggaggcgtcgtccaggcaaaagtccccggtgcgaaccgtataactgtggttgtctagggttcctcatgcaaaacaatccgttgggttagccgagattccttcagattgagttttctcgcctccgccgtcagacggtctttgcgtcccaactgttcatattcaaggcgtacatcattcacttctttttccagcgatcggatttcatcccccagcaccaaaacatcgtgacccagcgccaccacttccccccggatgtggcccagatacagcaaataggccgaaaccagcgccatcacgccgatcgtcaccagaatacccgtcaaatccagccatttccccagcgccacacgcaccgaacgccgccagcccccccgtttgacctttttttgtccgatcgttcgcgcccgaggcaaaatatattcagacatcatcatcctctttcatggattggcgactcgccgattttttccgccacacgcagcttggcgctgcgcgcgcgcggattcccccgcacttcctccgccgagggcgcaagcggtttgcgcgtcaggacccgcaaccgcggccgatgaccgcaaacgcaagtcggtatgttcggcggacaaaggcaccccttctcttcctcctgaaaccggcgtttaatccgccggtcctccaagctgtgatacgcgatcaccgccaggcggccccccgaccgcaacagcgagatcgacgcatccagcagttcatccagcgcgttcaactcgtcgttcactgcaatgcgcaacgcctgaaaaacctgggttgccgaatcgatgccgcgacgccggggcgtcccgaccgcccgatgaaccaactccgcgaaggcgcgaccggtgaacggccggtccgactgcctttccctcaccgtcaaccgggccaccgcccgccagcgcgcctcttcgccgtactcccgaaagatgcgccccagttcctcctcggaggcggcggccagcaaaacggccgccgtgcggggcgaccgccgatccagccgcatgtccaactcccgctcgctccggaaggaaaaaccccgctccggatcgtccagttggaaactggccagccccaaatcggcgcaaacggcatcgacttgttcaatttcgaaagaacgcagcacctgtcgcaattcgcgaaagttggcccggtgaaacttcacttgcggcaactcacgcaatcgccgccgggcgatttccagggaggcgtcgtcctgatccagggcgatcaccatgccggtcggtccgacctggcgggcaatcgcttcgctgaagcttccgcctcccgcagtgacgtccaggacgatctggcccggctgcaacgccaaacccgcgatcgtctccggcaacagcaccggttggtgctcgatcattaatcaaagagccccgacaaagcggccttgatttccggaatatgctccgccgtttccgtcagcgacttggaccacgattccgcatcccagatctgcagcgtcttgatggcgccgacgatgataacctggcgatccagaccggcccattcgcgatgcaattgcggaatcaaaatgcgtcccgccgaatcgaacgacaccttcttcgccggcatgacgtaatacttgatgtactcctcgagcacgggatctgccggatacttggaaaacagcttgtccatccgtttgacccattcgggccacggcaccaggtcgagatacgaatacgtcttgacctgttcgtgcttgctggaaccacggtccatcgccaggaccagttcggtgacgccttcggcatgaaacaactcgcgcaactctttggggacaatcgccctacccttttcatcgatcttgaccgggtaggagctgatgtacattgtttcgcttccttaagtccccacagcagtggagtttagcgccacattttcacaattttctacacgatactccccaaatccccaccgtgtcaagaaaaaaaatgaccgccccccacattcaaccatttgaaatgaaaagtaatttttacgaagtctatatctggctcgttttccgtaaaatacaccacagattgtgccaatccccaccggctagtgctttccggcgaaaaaatcctctaaaatttttcgatggtcgaaggccaacgacaaggctaatgcttcatttttcgtaaacttggcgaccgttttcgcatcgtcagcggcacgcggttccccggcggcggttgcctcgaaaaccaccgacagcgtatgaaaacgcgtatcgcgcgccgggtccgaataaacgtgaacctgacgcaccagccgcacatcgagacaggtttcctctctggcttcgcgaaccgcggcgctttcggccgattcgcccacatcgataaaaccgccggggatcgcccaaccgtaaggcgggttcttgcgttcgatcaaaacgatgcgctcgtcgggaagacggatgatgatatccaccgtggccaggggggttttcgggaggggtctcatggctgggccgctttaaattgttcaagtctggcttgccattcgccgcgttggtcgatttgcagcgcccacttcatgtggcgcacggcgtcccgataattcttgtcggcgtaagccgtttcggcttgttgcgccaaagcctgagcgatgagatcgaggcgctcccaggcatagtggttgtttttatcgtaccgcacggccatcccgtaaaaggacgtcgcgttgaacagcatcggttggcgatacatttcggcgtcgaaatacgcgtcgccccacgcggtcaaatatctgctggttgattgactgacgatgaagctggccgccagcgcgatgaacaacgcggccaccaccgcgagcccggcaatcaaaaccaaacgcggccattttctccggcgcggcacggtttccgtggggctgattttttcctcttcggcaatcggtgcggccgatgttttaccgagcgaggcaagaaacgaatcgtccgtcggatttcccggatcgcccgaaaccgtctgcggcggctgatgcgtggcggttcccgcctgcgtccgtaattcctccgcatccagccggagcgtgctttcctccctggcttcccggctcagcgccgcctggctggtggtgtgaatcgtccgatcggtgaattccagggcggcgcatagatccgccgcggtggcgtagcgatcgttcggatttttcgccaggcagcaatgcaccacctgcgccagcgcctcgggcacttgcggtcggacattgcgcaagggcgtgggcggtttgcgcagatgcgccaccatgatttccgaaatgctgtcgccggcgaacggcggcgagcccgccaacatttcatacatcaggatgcccagggcgtagatgtccgagcgcggatcgttcaagccttcccactgttccggagccatgtacggcgcggtgcccaacacctcgccgtcggcggtcaggttggcgccgccggcgatcttggcgatgccgaaatccatcaacgtggcgttgtcctgctcgtcgagcatgatgttcaccgatttgatgtcgcgatggatcgccccggcgcgatggatatagtccaccgcccgcgaaatttggatcatgatgaccgtgacctgctcgggcgagagggtgccgctgtggcggatgcggcccttgagcgtttcgccccgcaggtacttcatcacgtagtagacgatctccccctcttcgccgatcgtatagatcggcacgatgttggggtgctccaagcgggccaggatattgatttcttcccgaaaacgcttgaccagcttttcatcggccgccaggtggctgggcaggattttgatggcgacggagcgctcgacgtcgaaatcgagatcctgggctttgaagaccgcgcccatgccgcccatcccgatcttctccagcaccttgtatttcccggaaagtatggctcccggttcgatcatgcagccatcctgttttcgctcgaatcccgtcgccttcaccccggcggggcggcgttcattatcttttccacaccaagcgtatcgggcgcattaaaattatttttcttcgtgaatgcaagcgcattcgatccttcccttcagtcactccttgcctttttccctttgcccttccagcaaatccctgggcctgtacctggatttcaggatttacgcgggggttcgattagctcctggtctactcggggcggaaggcttttgttaccgccgcattatccctggcgtttttaccataatggaaagcatgtttgcatttatttagcgaaaaggtgaagggaaaaaggaactgtgccccttcatgacatgggtcgattatggtatagctaatcgtcatcaaaaattcgttggaagaccggagcggaatggaaaatagttttgcaggcgtatgcaggggatgtcaaaatcaatattcattaatcatgggggtcctacatgaactacaaccttctcgatgaaaaatggattccggttctctataatgatgggcgcacggatcgcgttggcattaaagcggctttcaaggaagcaggccacatccgccagattgccgccagcaatccgatggatcgttttgcaattttgcgatttctaatagcattgctatattggtgtaaagggaacccttcaaccgatgatttcaccgacttagataaaccgttccctgaaagctggtttaaaaaattagaagaccaaaaaagctgtttcgatctttttgccgaaaacaagcgattttgccaggcccttacacattctaaaccggtaccggatcggcttactgtaaattatctaatacaagaggttccgactaaaacaaattttaatcattttcgccatgcaattgataaaaaagacggtctttgtcccgcgtgttgtgcaattggcctcctacgaatacccatattttccacatcagggggaaaaggcaaatccccaggcattaattttaaaccgccaatttatctcatcttacttggccatacgctcgcaacaagtatcaggctttcttggttgcccgtaaaaagtattggcttcccattttgggagaaagccgatttttcacttcctgaaggtgaggaaatccccttactgactggtatgacttggctaccgcgacaagtatggcttgatgagccatcagaaaaagaaggcaaatgcattttatgcggcaggcaagaacgattggttgaacaaaccatttttgccgggctggggagcaccaaagacaaggatgaatcaaaagtgcgaatgtggattgatccacatgtcatttacgatacagcgaaagatgggaaacaaatttcgctacacagtaagaatacgattggactagccgatactggggctggccaatggttggatatattattcggccaactctatttggatagaatccattcaccggcggttaaggaagcaatccaaaaaacaaccgaatcaggaagccaaatcaaatcatgggcaattgggttttcaactattcaaaacgataagtacttggaagcaatagaatatttgcttcccatctcgaatcaaggagatgccccaacctcaggaatcgatcaagtaaagcagtggcaagatgagggtaaaacaattgataaaacaataaggaaaaggactgcatggggaaaagatgaatccttaaaaaagcgaaagaacagcgaattaaaacctgccatatccgccattcgcccgcatgtggagcaccaggtatcgtcagcggcgggaaagctgctgaccgatgaccgcgaaacgtgggagcgggcggcggaagaataccgaccgatgatggaagtcgtggcacaggcgctttcacccggttatacggccaaggccttgcgaaggcggcgacaaatagccaatgccattccgaacatgcgtcaaaccgaaccaaagaaaaagggcaagaacaaagagaaaggaggtgaggaatgaacgcgaccgaactcttcattgacgctttgaccagtctaaaagaaggtgaactcgggctattgcgaaagcatgcagggcaaggtttagatgaaacggtagaggggttcgatctgttcaccggtatctggtggccgctgcgatctcaaaaacatggaattccgcccaagagggaagttgcctggttggtggccaagctttacgcattccggcctttagcaccctcaccgggagacaccctttctaagcaattagcaaaaagcattccgagaaacgaacaagaacaaatccgctacgtggaacgattcgatcagatgctgtctttgcccatccggaaaatcgaggccgggttgttatgggcgctcgatgtcatcgctaaaaaggaaaacagactcgattgggtcagattggcggaagatctccgctcttggaataacgaatctacccggctgagatggtcggaagaattcacaaaaattgatgaaaggaaagaaccatgttgatcgaaattcatgccattcaaaaccacagcccggctaatttgaaccgagacgaccttggggcaccgaaaacctgttacttcggcggagtattgcggtcgcgcatttccagccaatgcttgaagcggagcatccgcaccagcgatgaatttaagacactttgcggaggaattcgtacccgtcagttggcgaaaaagatcgcggagcaaattccggacgtgaagaaggccagggaacgggcggaaaaaatactcgaacaatgcggttttaagtcaaagaagaaaaaaggagaagaagaacaagacgacaaaagcaagatgctgatatacacgacttatgccgccatcaaagaaatggccgaattgattaaaaacaatgaagggaaaccggaaggcaaactggcagaacaattcggcgccatcatcagcaagcacgtcagtgtgccggatatggctctatccgggcgcatgttggaaccggatgcgtctgctaaagagatttggaaaaacaacgaaacgaccgtggaagcagccttgcaagtggcgcatgccatttccacacatgccgcgcgcccggaagtggattactacgtggccaaggacgacgtgccgggtgaagacgcgggcgccggatttctggacgaggcgatgttcgcctccgcctgtttctacaagtatttttcgatccattgggagaagttggtcgaaaaccttaagggaaatcaggaactagcggcccatacaattggggcgtttctgcgcggcgtcgctaaaatcacccccacaggaaagcaaaacagctatgcagccaacaattatccggacgggctgctagttgagatcaaaaaaacaccggtcagttatgccaacgcatttgccaaaccggtggaagaaggacagcgtggcatcatcgagcaaagcatcgctcaacttgcccaatacgcccacgacctggatgtcggattcgggaatccggagcatcgattttggttttcgcccaaccttcgctatcccttgatgctggtcgaggatggaacagaaaaggcgatgaccgaaaacaacatcaaatcccttgatgagttgatcgccgtgatcgttcgcgcgctcggccatgattggcagtcggttcagaagacggtgaccagcatggagcccacattatgagcgaaaacacgttgtttcttcgcttggaggggccgttgcaagcctgggggaatcaggaatcaaaatttctgattcggcgcacttcagatgcaccgacaaaatcgggagtcatcggtatgctttgcgccgctttgggcatcccgcgagcactggccggcgaggaatggctgccgaagcttagtgccttgcgctttggggtacgaatcgaccggccgggaatccgctggtgggattaccataccgtgggcgccaagatggaaatgcggattgcggaaggagaagggaagtccaagccgggcgcgatgttaacccgacgcgaatacctttgcgacgcttcctttctggttgttttacaaggcgaatcgggactcatcgagttattggaaacaaaacttcgcgaaccggtatggacgctttacctcggccgaaaatcctgtccgccatcgcggccgatattgaatgccaaagactcatcgggagattaccccgcccttctttcagcgctttcatccgttccatggcaaagaaggtatcaaggggaaccggcgccaccaagtgtaaagtttctcatggattggaatcccaccccaagccagccaaatgcaccgccggatgcactgattctttatgatgtggcactgacgttcgatcctcccgctcatgagccgcgtttcgccattcagggcgaactcaatgtcggtccggatgccaatgtacacttcaaaacaacgccgtcccagaagataaccccagcaccgccaagaccaagggcagattacgcaaacgatcaataccggaaaatgcgaaagaaacgcctggcggcagatcatggcctttgtgttttgtgcaaatcgccggcgacaaccgttcagcatattacctatcgaagagcaggcggcaatgaagccctggaagacctccgatctctctgtcgtttgtgccacgatgcggtaaccatgctcgaatatgggttgaacatggacctggatcgaatcaacccggaagagtcccactggcgcgaggccattttagaaaagagaaaagagatcgaacaaaaccgctcccttgtcaaacgccaccgcagattatcagccgaggaggtggagtaaaatgtatcactcgacccttttagtaaacgtcggcgacaacccggatcaaccaagacccggccgactatggttacggaacgcctatcgagtccatcaacgcttgtgcatggcgtttcagacagaggctaagaaaaaggccgatcccgattttctcaacccatacaatccgaccaaagatctggatcaacagcaagtgcatgtgccgcggtatgatcccaaacggaatgttactgccgggtttctttatcgcattgatccgcatccgggtgggtcagtggcgattgtcgttcagtcaacccaacgtccggattggaactacgcttttcacaacgccccttctcttttagcggccgatccggaggtcaaaccgttcaatccggaattttccaaagaacaactgcttcgttttcgattacaagccaatccgacgaagaagatcgttgcaatgaccgagagaggtgaaataaaacgaaacggcaaacgcattccggtgaaatacgatgagctaaacgattggctgacccgccatgccaccgcaggaggcttttctcttgatgaggaatccatcggcgtacagacaggttatgtctatatcaatgactcgcacgagggaaaagggcgtcgtgtgttttcaacacggtatgagggcacactgaccgttaccgatccggaacgcttttaccaaacgataaccggcgggatcggtccatccaagtgcttcggcttcggtttgctgagcgtggcgccggtgcggtagcgagccatgaaggatttgcacgatctgcccaagctgcgggacggcctgagctttctgtacgtcgagcatgcgcgggtggaaaaggagcaacaggcgatcgcgctgtaccgggcggaagggtgcgtgtccgtgccggcggcggggctggcggcgctgctgttgggtccgggcacgaacatcacccacgacgccgtgcgcgccctggccgaaaacggctgcacccttctgtggtgcggcgagcaaggggttcgctgctatgcccagggcctcggcgaaacgcgtaaagccgcgcggctgctgcaccaggcgcggctgtgcgccgatccggccttgcacctggcggtggtgatgcggatgtatcgcaaacgctttgccgaagcgctgccgaaggacttgaccctggcgcaaatccgcggccgggagggcgtgcgggtgcgcgaggcctacgcgaacgccgcacagcgctacggcgtggtctggcagggccggcagtatcggcgcgaccggtgggaggcgacggacccggtcaaccgggcgctgtcggccgccaacagttgcctttacggcctctgccatgcggcgatcgtctccgcgggctactcgacggcgctgggcttcgtgcacaccggcaagcagttgtcgttcgtgtacgacatcgccgacctgtacaaaaccgaagtgacgatccccgtcgctttcaaaatcaccgccgagggaccgacgaacctggaaagcgccgtgcgccacgcctgccgcgatatcttccgcgaggtgcggctgttggatcggctggtaccggacctcgattgggtcttggatgcaacggggctggacgacgaggacggcgccggcgacccggacgccgacgaggccttgccgggcgggctgtggaacgggtcggagacaacggcaatgggagggcaaaactatggtggtgatgatcctggaaaacgtggccccggggctgcggggaaaactgagccgctggctgatcgagccgcgggcgggggtcttcgtggggaaggtgagcgcgatggtccgtgacaagctgtgggaaaaggtgctgaaacaaaaaggcgccggatcctgcgtgcaaatcttctcggcggcaaatgagcagggcttcgaggtccgcgccgccggcgaccgcagccgtgagctcatccgcatggagggacttatccttgttttaaagaaaaaagtcgtgtgataatcaagtatgatccccacgcgcgtggggatgaaccgagcggcctgggcctgctgtaaggaggcaacatatgatccccacgcgcgtggggatgaaccgctctcgcctgggttcggcaaatgaccgctctgatgatccccacgcgcgtggggatgaacc

SEQ ID NO: 537 - DNA, 48399 bp, Artificial Sequence
  Synthetic Oligonucleotide
catcaaggcactcatgccatcattttcaccgctggcatcacaaaagatccccgtcgtttatgtccttttcgtcccttatgtcccttcgttacgtgcggatttgggaaaagaagcggcgaggccgccgcttctacggcaacccggaatctataagtcctacaggtcctataagtcctattggctcgtaaagagaagaggcgcaaggagttgtgactcttgcgcctctggctcggtttctcagggttttctgattgccttgaccgtgtcccggacctcgtctaccaacgactgccggaccagatacacgccgggccgctgcgccgacgtggcgtatcggtactgcgaatcttcgggggtgggcccacctacagctaccggccccagtttcgccggctcctcgccttcagcactcgcactcacggagatctccacgacgggcgcatccagccctgtgccagcgacctggccgacgtcgtccgccagcttcttgtcggcgcgcaactggctgagcgcttccatcagcgggtccatgtctcgtgaactgccgaatacatggccttccggcttggtaatcacccacttgccccggaatttctcgaaggcatactcggcgccatcaagtttcaactcaactgttctcgcttccagcttattaaactccatcaaagttttcttctggaaatcgaggggcgtcctcgtcaacgcattgacttccagttccgtcaagaccgtggtgacgccattatcctgccgcacatagaacttgccgacatcgggtacgggcgcgcccacaagaatatcgctgggctcttcgccgttgaactcgcagtggatggcgatccgcgggttgtcaaaaccggccaacgccggcacatccccggggaagttgccacccgaaagctgcttgagaaacgctataaagttcgagaccgccacctggtccgtgtcttccaccggcggctggacaagccgccaccctttttccgggtcgttctcgagtgtgaaatcggcatcggccgtcttgtagcggatcgaccgcagcatcgaggcgtcccgcgtgaacagccggccttcgcgcaaggcgttgggcgcctgcggcaacgcggccgccacgttcgggtccatcaggaaaaccgttggttttgaggcccatttggcgtagtagcaccctttagcggattcgtggtcactgcgggaacccatcaggaccgtctgcggctcactccccgccgccgcgtagatggtcagtcgcgccttgggcgggttcagcccataatcgtccagcgattcaggttgctcgacgaaacccacgatcaggctgtactgaacttccttgataatgctttccaccgtctcccggttggccggagcctgttccggcgaaaccatttgccaccggccatccggctgtttctccaccacaaccaccgccgactcctccggcgctggctgctgggtcgggtcgcccgaaagattttttgccgcgcggaatcgcgaaaactcgagccggctgatgccttcctcgccgaccttgaacaggcggcggtctcgcagcagatcgagcgaccggtccatttcgtggaattgctcgacgctgaccagaaacacaagctggccgtcgagccgcgcataccgatatgcctgcgtcggatccatcgcgccgaattcaaaccgcaggggcgcaccctccgcccgcgtcgccgcaaacgtcagcaccggtttgtccagcccgtacgcggccagatcgccgccggtctcgatagtccgtgcgttgtcgagtgtcgcaacggttttcgcggcacgatcccacacgatctggttgggatcgatggacgggtccggtttggtaatggcccactggccggatggagtccgttcagccgccacggccggttcgcccaaccgcgcgatttcgatgcatcgaacgtcttcgggctgaaagtcgaacagttttttgctttggatttgctggacctcgcggtgtttttccaattgcaccataccccagtaggccgcacacagccccaccagcactcccagcagaatcagcgtccctttcttgctcattggtacttcctccgcaacccgtacgctaccagccccgccgcaaccaccgcctgaaccgtgcccagcaccgccaggtacaccaccgtccgctgatccccttcgctcaagatgatcgcggggtcttccttgccggtgggccgtatggcgatcaggtcttcgttttccgtcagccaggcaatgacgttcagcatgaaattgaggttgcccggcaggcggatctgtccgtttgaagcaaacgccgaattaccgaccaccaccacccgggcatcacgcgtctggccggagtcgttgagggcaacgtccgtctttgccgttgcggccaccgccagcggaagcggccccccgggctcgtccggcgtttttaccgccttgcccgccgtgaacagcatttcaatgtccgactcggcgtagaaattgggcgtggtccggatcaactcggttactaccacactctcggggacctttttggccgcgcccaccgtgcgcgcgacgctgaacaccagcttctgatcggaattctttgtaatgcggtggccggcgttatagcagcccaggaattcgctctcattgggccgttcgccaaacgccgagccgtccgcgttcatttcgatattccagcggctctcgggagaaacagccatgtcggcgcccacgacaatacccagccggcgctcgagccacggcacgagttgttccgtggctgccgcggaagccactttgcgccacgggtcgagcagcaccagcagacggccgccgcgacccaggtattcatccagcgcgcggatttcctcggggtgcaggtccgattgggcgccgccgatccccaggccgttaatcacaatggcgtcgtattcgggcgggatttcagggttgctgatcctgatcgccatccgctcgggctggtacgactccgcatcgagcaactgtttgagcatgctcccgccgtttttggtgtccccgtcgtcgatgcttcgctcgccatgccccgtcaggaacccgatcttgggcctggacttgcgcaccacgttgataagcgcgttggtgaaatcacgttcttcgagccgcgggctggcgcccgacagcatgatgactttctggttgacgccgcaggtgagaatgaccgtgccttgcgtggaagcatgtgtgactcccatcgcattgagccgggccggtgcgagttgcggatcaagaaactcgaccttgagacgggacgtatacctgccgcactggtcgaggaaccgccgcgtcttgtcgcgggcgatgttcaccaactcgtcctcgacctggatgaaagaggccgtaaccgcgacgtcctggtcgagcgtctgcagaacttggactgtctggggggaaaggttgcgccggccttctttggtcaggtcccacgatttgtgcgcgtgctgggcaaacgcgtagatgaccacacagatgcccaaaaacaatattgaagacaccacggcgcccagaccgtaaaggctcttgccttcccgggatgactctttgctgatcgtcgttagcgtcagcacaatccagcccatgcccgccagcaggcccacagccagaggcacaagcaccaacgcgctgaacgggtttgatttcaccacgcccaggttcacgctggccaccagcgccaccagcgccaccaggcccgtcgcagtccttgccgtcctaatccgcttcattgatcaggccctccatttccggctctcgagtgagcgaaacgtgaggaacaggaagaaagccgcaaacaggacataataggcgatatcctccggctgtacgatccccttggccatttctttggcgtggaaatcgatgggcagttggtgcaagaaacccctgaagatgtcgtacacaaagcccacgccgttcctgaatgtctcgccccaagcttcgggcgcggggttggcttcgggaagatcctcggcaaacgacccgacaatatacaggatgaaccacagcccgaacgtcaacgtgcccgcggtgacctggttgctcgttacggacgagacgaacagccccaggctgaaaaacgccgcgctcatcataaagaccgtcgccagaccgaacaccagcaccgccccctcgacctgcacgtaccacgaaacgatcagcaggtgaaccgctaccaccgccatcatcaccaccagcatccccagcgccgccagatattttccaaaaatgatctcgcggtcgcgcaatggttgcgtcaggagcaattccatcgtgccccggttgcgctcttcggccagaagccgcatcgtcaccagcggcccgatgaacacgatcagcgtgccgcaaaacgtcaggaacgggctgagcagcgtctcctcgaaatccggcacgctcgaataggcgtacatggcgggattcacgctgactttggcgtagaacaggaacgaggcactgaacgcgagccccgaaatcgccgcgaatatgcccaccacaacgtagccgatcggcgtcgtgaaatagctcgcaaactcccgcttgcagactgcccacgagttcctcataacgaacctccacccgcggcggccgcgacaggcgccgccccctcgtcttccgcggcatcctgtgcaacggcggcgataaacacctcttccagcgtgcgagcggttcctcgggccagattggccatcgtgtcctgggcgacgatccggccgcggttgattatcagcacacgctcgcacaccatcgtcacttccggcaggatgtgcgtgctgagaaggaccgtgtggtcctggccaagctctttgatgacctgccggatctcgatgatctggcgcgggtccaagccgaccgtcggctcgtcgaggatgagcaccggcgggtcgccaatcaatgcctgggcaaggcccacccgctgacgatagcctttggacaggttgcggcaaacgcgccggctcacctccaaaaggccgcagcgttccatcaccctccccacctccgccatccgccgcccgcggcccacccccttcacctccgccacgtaccgcagaaactttgaaaccaccatctccccgtacaacggcacgctctccggcaggtaacccacgcgtcgcttcacctctatcgggtccgacttgatatcgtaaccggctacgaccgccgtaccccgcgatggcggcgaaaaacccgtcaggatccgcatcgtcgttgtcttgcccgccgcgttcggacccagaaacccgagaacctcgcctttgtcgacgaaaaacgacacgtcctcgatggccgccagttgaccatagtacttcgtcagacccttaacctcgatcatcttagagtctccgtcaggccccgcgtcgaggccgttaacccatgaatcatcatactactaatggtggccgtatttcacatgtccactaaaaaatccacatattgcccttgacttttgccggagcacagtatattgtgggtcttgcggagatcccgcgaccggtattatgttgacagtttaaggcggctcctacacctagagcgggttgctcggttttgtcaggtgttattgaccattttgtgccggactgacaattttttgaaggcagaaaatgccggcctgacggccaaacagccgcctctgtcaccgcccggcgcatgaccaacacccgcgtattatattgattttgaacgagttaaatcaagctgctccgagtgctgaagtagttggcacgctcgatgctcggttgagaaacgggatttggagtacgaagttccgagaaagcgaggcagtgtatgatgacagttcaatgttgctcctgcaagaaaatccgtaaaggcagccgttgggtgatgacgacggtgccggaatcccagatgcgcatcagccacgggtattgcccaacgtgcgcggccaaagtctatgccgagatacgtgtggcttcccgcaaccatcgcctggcggccgtcagcaacgcctgacgcctcgaacccgggccgccgcccccggcccgggtctcctccaacctggcccggcctttcacgtggccccactccggccatgcccgtttcgccgtagccgaaggcggctgagaagccgcattcagaatctttgttcgcgaccttgatccaacatctacgcgccgtgagcagatgtcgcgaacaaaaattctaagttgcgcgtgatcccccttttatggtatctttcgatgctttctaattcacaggaacccctcgagtgaagtggcttgggtgttccggggcgctccggcgccttgggagttcggccgttccgccagttgcgcggccgccgaacaagccgcggggttccgaggacgtaacccgaaaggagtttcactaccatgcctatcgtaacgatgcggcaactgctggaggccggcatacatttcggccaccagacccgccgctggaaccccaagatggcccgatacatcttcggccagcgcaacggcatctacatcatcgacctgcaaaaaaccctccaacaaatccggcaggcgttcgtatgcatccgcgacatcaccgcggccggcggcaacatcctgttcgtgggcaccaaaaaacaggcccaggaagccgtcgcccacgaagcccagcggtgcgggatgtactatgtcaacaaccggtggctgggcggcacgctcaccaactgggaaaccatccgccagagcatccgcaacctgcagcggctcgaggaacttaacaccagcggcaaactcgatgagcagttcacaaaaaaagaagccatccagttccgcaagcagatcgagaagctcgacgccaacctccgcggcatcaaaaacatgcccggcctgcccaacgccctgttcgtaattgacgccaagaaagaggcgattgccgtgcgcgaagcggcccgcctcggcatcccgtgcgtcggcattgtcgacaccaactgcgaccccgacaccgtccccattccgatcccgggcaacgacgacgccatccgcgccgtccagttgttctgctcgatcatggccgacgccgtcatggaaggccggatgaacatcgataaagtcagggccgacgaagcccgcccgccggctgcggccgcggttgcacccgaaacggctgcccccgccggtcagaatgccgccggggccgaagagttgggcactcaatttgaccaattggaggagtaagcataatggcatttgccgctaaagacgtttcgaacctgcgcgaacagaccggcgcgggtatgatggattgcaaacgggcactgaccgaaaccaacggcgatttcgacgccgccgtcaagtggctgcgcgagcgcggaatggcccaggcttccaaacggtcggcgcgcgtcgccgcagaaggcaaagtggcctcgtacatccacatgggcgggaaaatcggcgtgctcgtcgaagtgaactgcgaaaccgacttcgccgcgcactccaaaccgttccaggagttctgccacgacgtgtgcctgcaagtctgcagcgccgttccccggtgggtgaggcgcgaagacgtgccccaggacgccctcgacgccgaaaaggaaatttacacggtgcgcgcccgggaaacgggcaagcccgagaaagtcctgcccaagatcgttgaggggatgctcaacaagtggtacaaagaagtgtgcctgctcgagcaaccgttcgtgaaagaccccgacacgactatcgaagacctcatgaatgagctcagcggccggatcggcgagaagatcgagatccgccggttcgcccggttccagttgggcgaagggatcgagaagccgaaatcgaacctggcccaggaagtggcgcaggccgtcaacgcggcccagcgcgcggaatccgaaaacaggtaaaacgcgatgtcgcaaggcgccccgaaatacaagcgggtgttgctgaagttgagcggcgaggccctccagggccccgctgctagcggcatcgatttccccaccctcggccacattgccgatgaagtcgtggaagcccacgggatgggcgtccagattggcctcgtgatcggcggcggaaacatctaccggggcacgaaatcttctgaaacgggcctcgaccggcccaccggcgattacatgggcatgctcgccacggttatcaatgccctcgcgatccaggcggccctcgaaaaacgtggcgtgcccacccgcgtcctgacggcaatcgagatgcggcccgtggccgagccttacatccgccgcagggccgtgcgccatcttgaaaaaggcagggtggttattttcggggccggcaccggcaacccgttcttcaccaccgacacggccgccgcgctcagggccaacgaaatcggggccgacatcctgttcaaagccaccaaggtcgacggcatctacgacgaagaccccgtacacaaccacaaggccaagaagttcgagcgcctgtcttacgcggaggtcctgcaaaagaacctgcgcgtaatggacgccgcggccgtgtcgctgtgccgcgaaaacaaaatacctatcctggttttcaacctgaccacgcccggaagcgttattcgcgcgttgcggggggacaaaataggcaccatcgtcctcgaacagtaggccggcctgcgaagccgccgcagggaggcacgcccggcatgggccgggccggcgggcgccgctgttcaccgcaatctgcccggcccgcgcctgggcgcggctcgaaaaaggagagtgacccatgtccaatgcgctggccaagcaagcacgcgaaaaaatgcagaaaagcctcgacaacttccgccaggagttgacgcacatccgcacgggcagggcgtcggtgggcctgctggacgcgatcgaggtcgaggtttacggcacgaaaatgaagatcaaccagctcggcaacgtcaccacacccgaaccgcgcatgctcgtgatcgcgccgtgggatcgcacgcagatcggcgctgtcgaaaaggccattctcgcctcgccgctcaacctgacaccgtccaacgacgggcatctgatccgtatcccgtttccgccactcaccgaagagcgccgcaaggacctcgtgaagctggtgggaaaaatggctgaggaagcgagggtggctgttcgcaacgtcagacggcacgaggtcgataccacaaaaaaaatgcagaaagacggcgacctacccgaagacgaggcccataaactcaccgacgaagtccagaaaatcaccgacgatttcatcaacaagatcgacgaagcgttcaaggccaaagaagccgagattatggaagtgtaagcgcccccggaggggcgaggcagtgaaaggattttaatgtcgcagagggaaatggacccaaagtcaatgccgcgccacgtagccattatcatggacggcaacgggcgttgggcggaaaaacggggggtggacgtcacgcacggccacgaagcgggcacacgcagcgtgcgcgtcgccatcaaagcggcccgcgatttcgggatcaaagtcctgacactttacgcgttctccacggaaaactggcgccggccccagtccgaggtcaaagccctgttcgccatgatgagcaagtacatctacctcgaactggacagaatgaacagccaggacatccggatcgtcatcatgggccggaccgacggcctctatgaagaaaccatcaaagacctcgcctattgccaggaaggcaccaagaacaacaaatccatgctgctcaacgtcgcggtcaattatggctcgcgcactgaaattgccgacgccgcaagagccatcgccgccgacgtcaagcgcaacaagctggccctcgaccaaatcgacgagaaaaagttcgccgaatacctctacatgccttacctgcccgatctcgacctcctgatccgcaccagcggcgaaatgcgcgtcagcaacttcatgctgtggcaattgtcctacgccgagtttgttccgatgccggtgctctggccggatttccgccgcaggcacctgcgccaggcgatccttacctaccagtcgcgccaccgccggttcggcgcccgcaaatgatgttcaagcgctccttcatcctgcgcgtccttacgacgctggtcctggtgccgctcacgcttctgctgatctgggcgccgccgcttggcgcgttctatgtgctctttataactacactcgcctgcatcggcaccattgaatacttcaacctcctgcgcgcaaagcaaatccccgccgagacggtcgcgggtatcgccgcgggaacgacggtgaccatcagcggcatgttcggggcgcccggcttgaccgccttgctcgtatatggtggcatcctgttggtatcggcggtgcacgtggcccgcgtgcgcctctcgctggaaggcttggcgggctccgcgttcggcgtcatctacgtgggttggtttgcggcacacatgatcctgctgcatgaactgcccgtggccggccccggtctcgtgacgattctgctggtggcggtggccgtgacggacgcttttgcctacctcggcggttcggccttcggccggcacaaactcgccccgcgcgtcagccccgccaaaacatgggaaggcgccgccgccggttttctgctgacgctgtgcgccatggcggtcgtctacgccatcagccggcgcaccggcggctggccggattggacactggcgcgctacgtctgggtgggcgccctgctctcggttgtcgcgcagataggcgacctcgccgagtcgtccatgaaacggtccgcgggcgtcaaagactcgggcgccttgtttcccggccatggcggcgtgctcgatcggtgcgacggcttccttttcgccgcgccggcactctattacgtcgcggccaatctgttctgaagccggtttagtcaggtatacttatctgaagtcgctgtttcgggtcactgagtacacggatccataaatatggcaacgtataatacacaaagcaaaaaacggggactgacccgcttccggctgtttggaagcgcattttcggcagtttgaaaatcgtgtctgtccccgctttttgcggcatgaatacgttagcgaatttatgaagtggccccccaagcccagctcacttgctcggtcccgccccctgtggcatactcgcggcaaggagggtcggctggcatgatgattctcgtcaccggcggcgccgggtatatcggcgcggttaccgtgcgcaccctgctcgacaaagggttcgccgtccgcgtgctcgacaaactcctcttcggcgacagccccctcgacgaggtccgcaaccaggtcgacctcgtccagggcgacatctgcacgctcgacgactccgtcctcgaggacatcagcgccgtggtacatctggccggtctcagcaacgaccccaccgccgagttcaatcccgaagccaacaggcgcatgaacagcctcgccactcaatccctggccgaagcctgcaaacgaaaaggcatccggcggttcattttcgcctcgagctgctcgatctacgaccacggcctcatggccgaagacgtgatccaggacgaaaactcgcccgtacagcccatggccgcatacgcactcagcaagttcgccgccgaacaggccctcctcgaactgaccgacgaccagttccagcccaccatcctgcgccaggggaccgtctacggctggagcccgcggatgcgttacgaccttgtcgtcaacacgttcgtcaagtccgcatacgaaaccggccggctgaccgtccattgcggcggggagatgtggcgcccgctcgtcgacgtcaccgacgtcgccaactgttacctggcctgcctcgaagccgacctcaaactggtcggcggccagatcttcaatgtatcccacaaaaactacagaatcctcgagctggcccattgggtgaaaaaggcgctccatggcctgcgcgacgtcgagatcgacgtccaatacggcagccagcaagcacgcagctaccgcgtcaacacccgtaaaatcgaaaccgtgctcgggttccgccccgtcgttaccgtcgaagaatccgcacgcagcatggcccagaaaatcaacgccggcatcagcgccgatttcaacaacccccgctattacaacatccgctggctcgaattgctcgtcgaaatacaggagcacctccgccgaataggcagtatattctgatgcgggtcgtcgtcatcggcgcgcgcgggcagttgggcaccgaactctgcgccgtttacggcaatacggatcttatcccggtcgacatcgacacgctcgacgtccgcgacgcccacgccgtctccaacctcattcaatccgcgcggcccaacctcgtcgtcaacaccgccgccgcgcacaatgtcgccgaatgcgaaaccgatcccgacaccgcgttcgccgtcaacgccgccggcgccagaaacgtcgcggccgcatgtgccggcgtgtccgcccgcctcgtctacatcagcaccgactacatcttctccggcgaccggccaggcgtcccactcgtcgaggacgacctgcccggtccgcgcagcgtctacgccgccagcaagctcgccggcgaacatctcgtcgccgcccaatgcccagaccacctcatcatcaggtccgccgccatgtacggccccgccccatgcatcgccaaaggcggccgcaacttcgtgagcctcatgacgcacctcgccgccacccagcccgaggtccgagtcgtcaacgaccagatcaccacaccaacctacgccaggtcgctcgccgcccagatcaaactcgctgccgaaaaagccccacccggtatctaccacgccacatgcaacggcgaatgttcctggtacgagttcgcccgcgaaatcttcgacgtcctcaaaatcaagacgcccctcctgcccgtctccaccgaagatatcccctcaaccgtccagcgcccccgatactccgtcctccaaaacaagcgcctccaggacctccgcctcgacatcatgccccactggaaacacgccctccacgaatacctcaatacggcaaaaaaagccgactgacgcaaattgtggtgcgggcgttctcagtgcgaagtgcgaagttaaactgtcaatcgcactgtcaacttcgcactgtcaacttcgcactgtcaacttcgcactgtcaatcgcactgtcaacttcgcactgtcaacttcgcactgtcaaccttcccgcttgcggtgaatcacccgctggactttcgccccctccggccgcgacaatttcccgggtgcgaacacttccaccttaaacgacaaaccgaaccggtcgcggagatggttggccactttcgccttgttcttctcgtgttccatctcgacgttgacggtgatctccttcaggccgtcggcgtcttcgatcacgatctgatagttcgatcccacccccggcgtctccagcagcacctcttcaatctctctcgggaaaaacgtcacgcccttgatggccagccgctcgtccgcccggcccgcgatcggcgctatccggacgtgcatctcggatggaaccaagcccgccttcccaaaccgctcccgctgaaccggattccggtcgtaaacgtaccgcaccaccgcccgaagccgctccgactggatccgccgcaaaaaattggggacagactacgaatttccatgtaaaaatcagggacagaggggctggtgaaaaagtatcaaccatcccaaaaaccggcttcgtaatcttctatacgcaaagcgaaaaacagggactgactacgcttccggcagtttggaagcgcatttccggcagtttggaaatcgtgtttgtccctgcttttcgcggccctgaaacaacggcttggctttttcaccagctccacagactacgaatttccatggaaacaacacattaagggacgcggcattcttgggaaatcagggacacgcctggaggtcggattccttcttccggttttttactccttttggacgtccgcgcttcctctggcggagaagccggttgagcagcgattcgaggtgctcgacgaaatctgccgacccgcaagggcgtccggagtgggtctgtttgcggattcgctcgatgtcttcatccctgtcgtcgaccagccactcaggccagtttggaatgaccccggacggcgggtaatccgttgacaacaaagcgtcgtgccggaatccgcaatgcgcggcagcgcttgaccagccatactgctctgcccgctcaacgatgccggctcggaccgggttgcgctcaacgtaacgtactgccgcccacaggtgaggctcatccaatgggcaggagtagaagcggccttgccagacgtggccgctcatttcggtcttggtgttgaagtgcatcgcgtaaaccgtatgtgcatcgtgcaatgccagagccaacgagtctggccgttgcggaaccgcaacaaagtgcacgtggtttggcatcaggcagtacgcccacaccatcaggccgtgccgatccgcgtacttattcaccagtcgaaggtagacttcccgatccgtatcatcctcgaagacattcgcccggatgcggatatcccggtactacgactcgtgctaccctgctcatgtgtattaggataggattaaatatcctgccggatcaacaaaaaatattcgtagtctgtccctaattcttatcccagcggcaggttcgggttgggcgtagcccgcagatccccaatcaggccgtgtttgagccgcgagtcgccggccgcggcgatcatggccccgttatccacgcacagcgacaacggcggcatgtggaccgacacgtggagctcggcgttgagccggtcgcgcagcagccggttcgccgcaacaccccccgccagcaccagccggcccgcgcccgtctgttccagcgccaaccgcgtctttgccaccagcacgtccacggccgcctcctgaaaactcgccgcgacatcggcaaccggcgccgtcgtcttcctcatctcgtacagcaccgccgtcttcaggccgctgtagctgaaatccaagccggcgtccgcgccggccgtcatcgcccgcggaaaccggatcgccttggggttgccctgctcggcggccttctggatagacggcccgcccgggtacggcaggtccaacagccgcgcaactttgtcaaacgactccccgaccgcgtcgtcgcgcgtcgccccgatgatgtggtactggtgcggccgcgggcagtcgatcaggctggtgtggcccccgctgaccaccagcgccaggaacggaaactttggcgggttgtcggtcaggaacggcgagaagatatggccttcaagatggtgcaccggcacaaacggcagcccccacgcataggccagcgccttggcgaaattcacacccaccagcagcgagcccatcagacccggcccgattgtcgccgctaccccatccaatcccggcggcggcacgcccgcatccgagaacgccttctgcgccagttgcgagatgcacctgatgtgctggcgcgacgcgatctccggcaccacaccgccgaacgccgcgtgaatcggcacctgcgacgccacttccgacgacaggatccgccgcccgtcttcaacgatggcgacgcctgtctcgtcgcaggaagtttctatgcccaatatgcgtgtcattgtactacctgggaagcatgcacaagacttataccatgtttctccagttccggcagcagtctcccgagcgcgtcaaccgtgcccggcctgaagtggccaatgccgatggctgtcccgttttccagggcaaactgcaccagccgatcaaactgctcccggatctccccgtcatccccgtcgttgtccaggaaaactttccgctcgcccactccgacacccgcctgccgcgccgcctgcggaatcttcgtctcgtgggtggtcctgctgtcgatgaaaaagagcttccgtgttttcaccacatcgaaaaaccgcgccagggcttgttcgtcggtgcagaagatcgatcccatgtgattgttgatgcccactgccccgggcacccggtcgagcgcctcgaccaacagccgcgccatctcttccggcggagtggaggtcgagatccagccgggatcctccgggctttccatcgggaggtgcagcatcacctcgaaatgcgcttcccctgccctgcgtgcggtctcggcggcgtccggcgcgcccggcagaatcgacaacgtgagccgcggatccagcttcaacacggcgtccgtgacaggcccgccgtaacccccgtcgtccagaatgatcgccacacgcggcggctgccccagtgccggcgactccgtctcgcaaagtcccgccagcgccatcaggttgatcaacaccgagtcgtcgtctgcaatcggcggcggcggcggcggtggcaagtgaagccgaacctccgcaaacttgcagccgcccaacgacaaatcgagttgtctcaccgtgccggaagcttcgcccgccgccacactaacctgcccacgcaccatctcgcgatccagcaccgtcaccagcccttccggcgccgcgccttccgcctcaacgtcaaacgacgtgaaataccacaatgccttctccgtctccaccagttgcggctccgcccgccggatctgttcaggcttaatcaggttgctgcgaaacacttcctcgatctgaccggcccgctcgagcgtttcatcgcgcaggttgaccggccgcgtcttgaggtgctgattgacaacgatcgccagcaggacccccgccgctgcgcaaaccgccagccccgcaaccacaataacccacgaattcggcagcggctgtttggccggccgagtcgctccgttggaagtctctttaaccatcagcaatccacccattcgacgtgctcgatatcgcagcccaaaaaacgttttcccacccgcgcgaaactctcgggcgcgtcgctcaccagaaattggtatgacggcgcgttatgaccacccgccccggccgcacccagcatgtcacgggcaacgcccgccgtggattcggcactgtcaaccagcgttacgccgtttcccatcgtttccgcgatcacccctttgagcaacgggtagtgcgtgcatcccaagacgagcgtgtcaatcgattgctccgcaagctgccccaggtactcccgcgcaacccgacgcggcacgtcgccctccgtccaaccctcctcagccaagggcacaaacaatgggcatgatttcgagaaaacctgcacatccggcgcaagccggtgtatcgcccgctcgtattggccgctcgatatcgtgccggcggttcctatcacgccgacgcgcttgttgcgcgtgctcgttacggccgacgccgcacccggctcaattacacccagcaccgggacatccagatcctcgcgcaacgcatccagcgcgtacgccgacgccgtgttacacgcaaccaccagcattttcacgccccgctcgatcagcaggttcgcgcacgcccgcgcataccggactaccgtccccgccgatttggtcccatacggcacccgcgccgtatcacccaaataaatgaccgattcccacggaagatattccaccagccggcgaaacaccgtcaggccgcccacgcccgaatcgaatatgccaatcgccccttcctgcgaacccatggttacaccggcccctgggacgcccatcccggttcgggcgtgaacggctcgctggtgtccgcgtgaacggggaacgcttcccgcgccgaaccttccatcaacaatcggactttggtgacggccggttcgcgcgaaccttttatggctccctgggtaactgtgttgacaatcccgtaaatcatgagcgattcaaacgaggcgctcgccgtcttcttgaaatcgagcgccaagtcaagcgtaaaatcgatcaccagttcaccgtccggcatcaggtaaaggccccggatacgcgtctccggcgagatgaccgggtcgagatcgccttgcggcccgcggatcaacgcttcaatcgcccgccggcagttttccgtggtgaattcggtgaattcgatcgccgccttttccgctaccagccggaggttccgcttgtcggcgaagtaaagatctacttcttttgtcgaagtcgcctcaaaccgagcttcatcctgggcaggcgccgcggcgggcccctgcgccttgggcatgaccggcgcgtgctcctgccgaagcagcacaaacaccagcaacgccgctacaaacaccagaaccaccgtcgccaggccccatgccgcaaaaaaaatccgccgatatatctccgcacgccgagcccgtcccatcatggctgaatggtctccatatacttcttgatacccgcggcgattccgcccgccagcttcgcctggtaatcttccgatgccagcagccgttcttcctcgggattcgtcaacatcccgacctcgatcatcagacccggcatcgccgcttcctgcaccacgtggcaccctagctggtaaatacccccggaacgctgcccggttgccgcctcgatgcccgacgctactgccgccgcaacttcccggctccgtcccgcgtaccgcgcgcccgcaaatccgccggccgagccgcacacaaatacccggcaaccctgctgccccgcgctcaatgccgctcccgtatgaaggctgatcaaaaggtcgcctttttccccattggccagaaaaacccgctccgcccgcggcacggaccacgccttgtcccgcgtcagcaccgttttcagcggcgaaccctgttcaagcgcctgctgcagtttctccgccacaacaaacacgaccgcatcttcggtaacgcccgtcaggccttggcatccaacatcattgccgccatgcccagggtcgattatgaccaccgctaccggcctgtccaccggccgatccggggccgctggcgcctcccgcttcggcgccttccccatcagacccgcgccgggttcactatcagccggctcagccgcgctcggcgcaccatccggcggtgcagtcacctcagtgccagccgccgttgcaccatcagccggcgccggcaacgtctccaccgccacctgtttcaccagcggctcaaggctttcgaccggcgcctcatcgggttgctcggccgtggccagcggttcaagcgcctgtggctcaggttcaaccggctgcaccggcctcacgggcggcggcgccgaggtcgtagccgtagccgcgccctgctgttttgccgccagccggaacgctttctcaaaaaacaccgctacatcgctggccgctatcaaaacgtcattgcctgactgaaccaccggtgcgccaagaacaaatatcccaagcgacgcgctgacttgcgtgtgattcggtcgaagccacgcgctcttctccgccagatcgatctgcgcccggtccggcgtcatcttgtacccgccacccacctggcttaccagcccaccaagcggaacgtacagcactccattccgatccaccggctcgacacgggccgtcttgacaccctcacgcatgctcaccgaaaaactgatcggccccgcttgaccccacgcacccgctcccacagccgcaaacaccgacaacaaaaaaaaccggcaaacggatcctgaaactgaacgcatgggactcacaacaccgcgactggcggttccttttcagtaggtaaaggtcatttctttaagttgattattcgctgcttgacaaaaacgctctcggagaaatcatgcgccggtctccaagagccccagagggtccaaaccagcgcccccatcagaaacgcaagaagtgctgccagtattgccagcccaatcctgtctcgtcgggccatagcgtttgctcctgggacctctccacgggaccaaggcccctgtgttcaacgtcgcttgtcttcggaaccctttcgcgacttcaaataatcgccaatctgtatctgctttttctctttaagcttgatctgactctgggccaccgccacctcgatgttcagcttgtccaggcacgccttgcaaagtctcttgctaagactgatggcgggggccccgcaacgcccgcacttcacctccgccatgttcacgttcgctatcagcccttcggccagcatccgcatcacgcacgctaccgtcacctccgcttccgccgccgcggcctccgcgttcagttgaggcgaccgatcaaggaccgcacggatcttctcataatccgcatcctcggccggctggcattttgggcaaacaagggctacccctttatcgaacagtttcttacatctcggacaacttaccagcgccatggcctgtctccttgctgggttcactccagtgcgtctgtatcgaatcaacgtctatgtccagatttccaaccacgttcgccttcagcacaaggccctcttccgaaacattgattccagccaccagcgaccgtatcgggagcccgtcctggtcgcgcaacgccgccggccgggccgggtaggttatccgaacccatgtccggtctttggccggcctctccaagtcatcccggccgccgtccatccccaccgcctccacgaccgcccccgccgcaaacacgtattggtcttccaccccttcttcccgcagttggttgccttcctcagattgctcccgcgacctcgcctcaagcgcttccacggcctcggcgagctcctccgggccagccgaattcgagcgcagccggccaagccggtcctgcatccagcacgttagccgaacaatatcatccaaccggccctgctggtacgccgccacatattccatcgccaccgggtcagccagcggcgccgccgccagcggcgcagccgtagctacccctcccgtatcccccacacctgccgacgctgaacccccctcaatcgattccgcgccgccccccgattctcccgccgccagcaccacctccccttccggtcgcggctgcacaagagggccggccagccagtaataacacgctcccgcaagcagcgccacaatcgccggcgccagccagttcggcctcttcttgacgtctgtctcacccacaccgcaatcctatcagaacccgccatatccgtcaaagcataagcgaaaaacagggactgaggagatggtgaaaaacccgctgcagccaccgagtagtttcttaactagaaagaagagttgagcgaaaaacagggactgactacgcctccggcagtttggaggcgcattttcggccgtttgaaaatcgtgtctgtccctgctttgcgcgggcctgcaacctaccacccagctttttcaccaactccacagactcgcttttttcggcagtttgaaaaaatcgtgtctgtcccgaatggcactgatttaagatatcccgcacttgcgcacctcgttttagcctgctttaccaggctcccctttgcacccgtctttagacggggtggtcatggcttaaccctttgtccacagcgcgctttagcgtgacttcaaaactgctttagcagcacgttctaactttgaggagaatgctgttaagttgcttaagtcagtgccattcgtgactgtccctgctttgcgcgcccaccgtcgcgacgcccccccggcagttgtggggggtgtcccgcttcttattgctactacaggctcaattcacattcaccgcgattttccgcggcttcgccttctccgcctttggcagcaggatcgtcaggacgccatacttcatttcggccttgatcttgtcctggtccacatgttcgctgagttggaactgccggaaatagttcaccaggtcgaactcccggtaaatcaggtttccgggtgtgttgtgccggcctttcccggcgatcgtcagcacgtcgttctcgacccgcacctcgacgtcgtctttttgcacgccgggcaggtcaaccaccaccgccagcccgtcctccacgtcgaatatgtccaccggcgggacgagcgtccgcgcctcttcgcgtgtctgcggaaccgtttcttcccgtttctgtggcaccgttgactctttcatctctataacctcctacgcgcgcacacgcgcgcggcttggcctggttttttcttacgcaactttcacggcaatctgcttgggttttgcggcctcggctttcgccagtttgatgaccagcaacccgttcgcgtaatccgccgtcaccttgtccccgtcgacctcgaccggcagtgtgatcgtccggatgaacttgcccgcctgacgctcgttccggtgatacgcctcgggtttcacatccattttgatcgcctgtttctcgccggcgatccgcaccgtgtcccgcacaataccgatctcgagcgatttcgggtccacgcccggcgcaagcgcctcgatatacacgtggtccttgtcctcgctgaggttgatgtacgggtacgaacgcgcaaactgttccgccaacaccgggccacacagcagcgggctcacacgacctccgccgaaactgtcaaacgcacgctccacctcgcggcgaagcgcttccatctctctccacggattccacgtcaggaatgtcatcgatctttcctcctttagcaccgtaatacgccggttagaaccggttagccggtggatccttttttctaccgccagtgaatttgcaaagcccatgccaatccgcccaaacctcgacataccctcgttacgcgccgttcttggcctttccacccgcccttaacgccctccggcccggttgctcccgccccgctccgtttcagtcccgaacaaccggtgtttcaaaacaaagctggggaatgaccgccaagcccgcgtcctttactccaataggcgcgcagttcctcggcgtttgttcgcccttttgtaagttggcccaggttggcatgttagttgctcctcccctccatgaggaatacaagttcaaattgaaccgcgcctccggcgcgccacctgccgcgcccaccgcgcgtcgcgcttcttagcgcgcttaaggagagtctcaaatggcacgctctatcggaatcgacctcggcacaaccaactcgtgcgttgccgttatggaaggcggccagcctaccgttatccccaactccgaaggcagccgcatcacgccttccgtggtggcattcaccaaagacggggagaggcttgtgggcgcaccggccaagcgacaggcaatcaccaaccctaccaacaccgtcagctccatcaaacgcttcatgggaaggcgctacgacgaggtcgctcacgaaatccagctcgtgccgtatcgcgtcacccgcgcacctaacggagactcacaggtcgaggtccagggaaaggcgcaccggcctcccgaaatctccgccatgatcctacgcaaaatgaaggaaaccgccgaatcgtatctcggcgaaaccatcacccgggccgtcatcaccgtacccgcctatttcaacgactcccagcggcaagccacaaaggacgccggaaaaatcgccgggctcgaagtccagcgtatcatcaacgaacccaccgccgccgcgcttgcctacgggcttgacaaaaaggtcaacgagaaagtggccgtgttcgacctcggcggcgggacgttcgacatctcgatcctcgccattggccacgacacgttcgaagtcctcagcaccaatggcgacacccacctcggcggcgacgatttcgaccagcgcgtcatcgactggctcgccgaggagttcaaaaaggatcagggtgtcgacctgcgcaaggaccccatggcactacagcggcttaaagaggccgccgagaaagccaaaatcgaactgtcctccgccatgcagaccgacgtcaacctgcccttcatcaccgccgacgcgtccgggcccaaacacctgaactaccgcctcacccgcgcaaaactcgagcagctttgcgaagacctgctcgaacgaaccaaggaaccctgccgccaggctctcaaagacgccaacctctccgccaacgacatcaacgaggtcatcctggtcggcggcatgacgcgcatgcccatcgtcggcgagatcgtcaaaaacctgttcgggaaagagccgcaccgcggcgtcaaccccgacgaggtcgtcgccgtcggcgccgccatacaggccggcgtcctcaccggcgaagtcaaggacgtcctgcttctggacatcacgccgctctcgctgggcatcgaaacgctcggcggcatattcaccaagctgatcgagcgcaacaccaccatccccgtcagcaaacgccagattttctcgaccgccaccgacagccagaccgccgtcaccatccacgtccttcagggcgagcgcgagttcgcaaaggacaaccgaagcctcggccagttcaacctcgaaggccttatgccggccccgcgcggcattccccaaatcgaggttgcgttcgatatcgacgccaacggcatcgtccacgtctccgcgaaagacctcgccaccaaccgcgaacaaaaaatccgtatcgaggcctcgagcgggttgaacgagtccgaaatcgaccgcatggtcaaagacgctcaggcccactcccaggaagacgagcagcgaaaacgggccgtcgaaatgcacaacaacgccgacgcgctcctctacaccaccgaacgcaccctgcgcgagcacggcgataagatcagcccccaggaccgcgcttccgtcgaggccgcgctcgaccggttgcgcgatgcgctcaaaggcgacgacaccgccgccatcgaaaccgccatgagccaggtcaccgccgaaacccataaactcgccgaggccatgtacgccgccgccggagcccacgcgggcgccgcgggccgcgaagaacctcagggcggacccggccccggcggaaccgtcgacgccgattttaccgtcgaagacgaaaacaagtagctctccgggaatggtgagcgcgcatgccggctgccgtcaaaaacttctaccagatcctcggggtgtcgcagaaagcgacccccgaagagatgcgctccgcatacctcaagctcgcccacaagtaccaccccgataaaaccggcggcgacaaggccgccgaggaaaaactcaaggccatcaacgaggcctacgataccctcaaaaaccccgagaagcgcaagcaatacgaccaggagcttcaagggccgcgccaattccggttcgaacgcgggtttgaaggggccggcgggtttcaaacgggcgccggcgggttccgccccgaagatctggcaggcgccggttttggcggcttcgagggcctgtttggctcgatatttggtggcctcggcggccgcacccgccgcgccggacctcaacccggaaatgatgtggaggtcgggctgaccgtttcgttgcgggaagccgcgctcggcggttcaaaacgcatccgcgtaccacggcgcgacaactgcaaaacatgcgcaggcgccggcgcagctcccggaacccgaccgcagacctgcccaacgtgccgcggcagcgggatggtgcagcggtcgcaaggcgccgcgttcagcattggccagccttgtccccagtgcggcggcaccggctcgatcatctccaacccatgcccaacctgccgcggtacaggctctgttcaaaccgaccgcgacctgaccgtcaccatccccgccggcatcgagtcgggcgcccggctccgtctcgccggcgagggggaacccggcgagcaaggcgggccccgcggcgacctctacgtccaaatcaacgtcgcatccgacgagttcttcacccgcgacggcagcgacatcaaatgcgaagcaaccgtccccttttccatcgccgtcctcggcggcgccgtcaccgtccccacactcaccgccaccgcccagctcaaaatcccccccggcactcaaaccggcgcaatcctccgcatgcgcggcctcggcgccgcccgcatgcacggcaaaggccggggaaaccaactcgtccaagtcaaggtcgaagtccccacccgcctgtccgaagccgaccgcgaagtggtgaagcggatgagctacgaaaccaaccccgcgcactacccccaataccagcaatacctccaacgcctccgccgccggtaacgtatgcctgggacaaattgaaagaattaggggcagaccacgaatatcttggtcctaatctgtccctgaatttccttgaacttcctgactgtccaaatcgcgcaggagtttctgtgttttcggccgcaggggcgggatctcttcttttacgaccgtccacacaatagccaagtctactccaaaatactggtgtatgagcttgtcccgcataccagccatccgcttccagggaacgtcaggtgcaaggcgccggacgctctccggcacttgtttggcggcctctccaagctcttccaggcatcgtacaatggcttttgaagtctttcggtcttgcaggaacctctccagcgacatatgcttggtaaactcagaagcctcgtctatggaagtcagaacatcctgcaagtagtcgcgggaatcgcgggtcataacatagcgacctctttgaggatgtgttggccgatgcggggtttcagggcggctttggtgacgaggtcgacgggagcgccaagccagtgggcgagtttttcttcgagttcgaggaatctaaaaaagcctatcggtttgtcgaattcaacgaggatgtcgattcgctaccgggggtggcttctccgcgaacgtaagagccgaaaatgccgatggcggcgacaccgtagtcgcaggccatttcgttgcggtgttctcggaggatgtctttaagctgttcgagtgttggctgcacggtttttcacctcgggctgtatctgctcaagtttagcacaggaggcgatggggacggcaattcgggcggggacggaacaggggagaaaaagtgaacattgtggacgtagtggacgctcgtctcgcgggatagagaaagaagggacgcgttcctgcctgctcacgctgttttggcttcagggtcctggaacgcgggcacccctcgtttttgaaagtactttcttgaaaataacgtcataataagggcgatcaggagaggcactcccacaatcacggcaaaatgccagccgaccaggcttgtcctttggagcttttcagcttcgtattgtggaatgttcatgctgttgaggagatcggaatacgctaggcgcgggaaagtgagaatcgcggacgacaggagacccgcagtggaggccagggcgccgcgccatgcccatgctttctgatgaaacaggccccaccccagcccgagcaagcaaaccataagcgtgttgagaacgacctcaccggccaggcccgacaacaagatcccgaacaaagggaagacaccgttgagcaggatcggaaacacgcaggcgattcccgacacggcgaaaaggaaactaagggctataacgggcacgggaatccggtccgtccagtacgtagcggcgtctcttgactggaatatcagcgcaacagtctgactctgatagaaccgaatgagcacgagcggcgccacaggccacgccagcaggcagaatgccgccacgaaaacgtgctcgggatgcaacagcggcaacccgtcgaaaaacacggcaaagatcggcggaagcgcgaaaaagcagccccagaccagccagacgtgcaacagggcgagggaaaccggacgtgcccacgaccgggttttcaaatgtccccagccgagagggatgaggacacccgcggccaggtacaatccgatgatcagacaggttatggcggcaaaccggaacgagccaaacagtcttgcgggttcactctcaggcccgagccacaacaggtattgcagcaagagggggccgccgtagagagcaactacgccagccgccagcaatacgaccccgataatcaagacaatagcggcggtacttgttttgttcattctattttttccagcctgatgacgatgggaatgtcgttgtcgtcgtcgtcgtacttgtatgagttggcgtcgtccaggtggagcagccacttgtcgggggcgatctgttcgagaattgacccgtcgtccaatcccagctttccatcggcgtcctggaatgcgactcttgcggcttcgctgtcctcacgggtcgatacccagaaatcctcgccaaaagtcgtcttcatgcagaacgggatgacgtcgccctttttgaattcgccgactttgatttcctcggacggctccgggctgttcggcaggttgcggaatataatcttgcactgttctctagacgttccgatccccaattcggtcatgccgccggcttcgccttgcacgggagtcagatagacggccgcatcgtatggcatggtaaacccgcgcggggaccagcagccccggatccggtcggcttcggccacggggacgcgctgcacctcgccgggcgtgcttggcggctgtggcacggtccgctcgaccaggccgggaagggtatcaggcgtttgccaatcgagcagttcgatctcgtagggttcgcggtggcgcaggacgcgcagaattgtgccgtccgtcagcagccacacatccgtgacaagtcccgcccgttttttgaaccaggtgtcggcgctggtgagttgctcgaggatcacgtgggtcgctttgaatcgcccacagggcactgtcacctcttcaaacccggcattggtgattttcatcttgtagaacccgaacgcgtcgccggtattgtcccagtcataggcgtcgaactcctgtgaggtcccgccggcgaccgtgatcatccgttcgagtatctgcatcgcgacgtacgggtcggggcggctgttgggatcaaacatcgcccccagcggcgcctcgaactctttcctgtcccagtcttccctcacaccgcgccgcgtcacaaaaaccttgcccggctcaaattccatcaccaactgatagcccgggccgccgccctcagcctctgcatgtacctcgtatctcgtgaatccctgctgaggcccgcccgccgctaggtactggtgcttcatgaatggcaacacgcaaacagccgtcaccgtgctgccgtcttccaccgtcttcacccatcggtgctcgggaatgtcgatggtttggccacggctcttgtgcctgtacagcgcgttcagcctcacctcccccggcgcctcttcaaaaaccggcggcgcaggtaccgccagcacctgcttcaactcttcggccgtcgggccgcttacttgcgggggcgcaacgggtgttgccggcaccggcgacggcgggccaagccgctcgggaagttccggcgggacggttatgccagccaactggagctcgtacggctcgcggtggcgcaggatccggacgatcgcgttgtcgctgagcatccagaaatccgtcacatgcccttcccgcttcttaaaccacgtgttggcgctcgacaactgccgcaccacgatgtgcgccgcctcaaacttgcccgccggcacgtcaacgctttccagacccgcgttcgtcacgctgatcctgtaaaacccgaacgcgttgcccgtgttgtcccagtcgtaaacgttaaactcctgcgtctgaccctgcgctatcggcggcaaaatcctggcgtacacctgcgccgcacaataactatccggcctcgcgttcggatcgaagaacgcgtcctccggcacggcgaactccttccgtacccagtcttcccggaccccgttgcgcgtcacgaacaccttgcccggctcaaactccatgatgatctcgtacccgcccccgtcaatctcgtaatagctgagccccctgtcccgcgcgcccgctacaatctccttgctccgcgtaaaccccagttccgctaccgccacgatcgaaccgtcttcccgacgtttcacaacctggtggtcctcaccgcgctcgccgtgacggtacctcccgtcgaacatcaccgtgcccgccgtgtccgtccccgtgctgccgccggctccaggcgtttctacagccgcttgttgcacttcggccgccgcctggtccgccgcgcccggagcatacagcgccgctatttcgtcaaccgaaagcgcacgcccgtaaatgcgcacctcgtcgatgtccccggcgaaatactgccgcggcgtctcgcccgcgccgatgttcagttggatgtccgccgcacggatctcgcccgcgcacggtttctcctggacaagccccccgttcacgtaaagcctcagccgctccgcctcggcatcatagacgcccgccagcgaactccactcgttcaccgccaccgccgtccccatcaggctttccgccaacgtcgacaggccgaatacggccttcccctccgcaatccccagcgtgtactggtcgtcttcctgcatcgcagggccccacttccaaaccaccgcgctcgtcttgcccgattcctcccgccgcacccacgccccaacgctcaggctcgtcttgccgtgaatgttcaacgtggccgaattgggaactacaatgctctggttcttcccattgaaatgataggcggcgttcggcttcccgtttcgatccgccgtcagcgtcgcaccaagcaccgtcccttcgttcccgttcccactgcgatctttcgcatccccgttaaacggataccacgccgccaaaccctcacccagtgtcgacaccgcaggtggccccgacaccgcaagtggcgccgccaccatccggatccccggcgcaacgcaaagcgccagcaacaccaagcccgtcaccgacgcagccgacaggcccggacgccgtttgatcgacaagtccatgatgcgccgcaagcggcgtccaagcgggtgaaactgatccgcaaaaccaagcgccgcgcgtgccaggcccggacggcgcaccgtcgccgccgcgcgaagaaggctctcgcaatacgattcgtcgtcggaaatccccgattccagaagccgatcatcgcagcagtcctcccgggtgctccgcaacgacctcagcaccagccagaacaccgggtgaaaccaccacagtaccagcaggatgttctcggccatgatgaaccacgtgtccttccgccggtgatgagcgagttcgtgcgccagaatcgaatcgatctgaccgccgttcagactctcgagcagcgcttcaggcatcaacacgcgcctgcgcaaaatccccagcgccaccgggcttgcgtcccccggcgttaccagcaattccacggccccgcgaatcccgagccgcgtcctcaactgatcaaaacgcccccgcaacgggcccgcttccaccaacctgcaactgcgcgttacccgccagagccggaagaaactgtacaccaacaaacacagcaccaccgccgcgcccacaccatgcgccagcaacaaccacgaccgccacgacagtgacggcagttcacccgaattgcccgaaggcggagacaccgccgcaaccgccgccgttgaacccaccgctcgaagctgggacgtttcaagttgcgccccggccaccgggagatcggtttgaggtggtgatgtctcctgcagttggcgctgcggtacgctctgttccggcgcagagattctcgttagcgggactgccgccggcgccgacgcggtttgtgtctcccccagcggtgtcaccggcgccacggtctcccacgccgccgtctcctgcaccggcgctaagaccacacccgtgcgctcggccgcgatccaacccggaacgctgaccgaaacccctatcacgggcggcaccgcaaatttcaccagcgccaccaccagcaaaccatatcgcaacggcgacggcatccgccgcagcccccacaccacacccaccaccaccagccccaccaacgccgactgccagctcgaatgaaacacccacgaccaccagctcgcgcttaccgcgttcaagatgctcatggcttgtcctttcggctcccgcgcggcggcccgcatggcgaccgcttggatcgcagctcgttcagaagcccctcgagcgccgccaactcctcgtccgtcggcgccgacgtctcaaacaggctcgccaccatcgccacgcccgaccccccaaacacccgctgtcgcaaatcacgcatgatcttccggaacatcggttccggaccccgcgtcggccggtaaataaacgcttttcccacctcccccttccgtttcgccacaagacctttcgcctcgagccgtttcagcagcgtcgccatcgccccatgcgtcatcggccggtatttgttcatcgcctcgcgaacctcccgcgcagacgcctcctccttctgccaaagacacgccaatacctccaactccgcatccggaagttcccgtcctcgactgtccttttcctttcccacggcccatcctcctgaaaagtatcaaaccaggctccccagtatatacgcccgtatcttttctgtcaagaaaaaaatacaatcgtatttcttgttccctcggggccgccgtatgctaaaatttctccggacgcacgatctgtgaaacattgtgcgccgaagggaatacgcatgacacaggatcagattacggaagcagccgtacgcgcgctgctcgacgccgccccgaagggttcccgtgtcatcttgtttggctcccgcgcccgaggcacggcccggccggacagcgacttggacttcctcgtcatcgaacccgaagtggaagaccggtttggtgagattttccggctccggcaagccgtcgaggaggttcttggagataccgtgcaaccggtggatcttgtcgtgacggaccaagagcgattcgaaaagtcccgcaatacgcctaacacgctcgccttcgaggcagccacaacagggcgcatgtatggatgacgcctttgagcgcgcgaatagcctgttgaccaaggcgcgacaggatcttactgctgcacaatgtctggccagagagccggctgtgtctcaatggaccatcgggtttcacgcgcagcaggctgtagaaaagtccctcaaggccgttctcatgtggcatgcggtgcgctacccattcacacacgatatcgctgcgctcttaaaactgtttcgtttggcgggcctgctattgccgccggatgctgataacctgcctatctaacgccgtttgccgccttgttgaggtatgaagacgagaactgggggttgccgccgtcagcagatgtgtccttacttctctcgtcggcagaagagacagttgcctgggcgtcatcagcaataaagggataacttttccctgattggtttacatcctgttaatcccgttatcctgtccaaacctaatccccaaacgcacgtccgttccgccgcgcctcgtacgccttgctcgtgcataaaacctgcaccgtcctcggcatcatccgcgtcacaacttccccgcccgaaaccgtgacggccttctccccgtacaactcatgcaacgtccggccttccagtccccccagccccacaaccaccacccccatgtgcgcctcatcgtcttcattcaccaaaatgatcacccactcttccccattcttccgcgcagcgcacgccacgcgtttcccgccgccgtcctccggcatctcaaccagtcccacacccacgcccggcacatcccccgccctcaaaaacggctgtagcgccgccaactccgccgtcagcgcgtacaggctctgccggaactcgaccgatttggcaaacctcccgccccaatacaaaataccacgcgcaccgtgcgcgatcgcgtcgtacgccatcagccgcgactcaccaaacgtcggatacgccgtctccttcgccccgtaatactcgcccaactcgtcccacgaaaacgcctgtagcaccatccacaccggtttcccgcgcccggcttccttccaccgctcgacgctcgacccgatccgcgccgggttgctcttttctgccttcacgggataaatgtcgcaccccgtaatatccacaaactccaggtactgccgcacataccccacgtcgcttttctccgcctcgttgacccataccgggtgcgcaccgccgtccatctcacgcaacatcccaaccgccgcacgcatgttcggcataacctccgccgcacgctgttccgcatacgccaccgcctcccgcgtctgtttccaccacgcccccgactctttgtgcacgcccagcgtcctgtacaacccgctgaacgccgtaaaattccacaccacctcgtccggaccttcccacaccgccagcgccggatgccccgcaagtttctccacctcctcacgcaacccctccgtcgcccccttgtccagcggcagcggaaccaccccctgcatccccgccgcacccgctcgatcaagctcctcgaggctgtgacaacgcaccaggttcacgcccgcccccgccatctcgcgcaaccccgcttcgtcctgcggcacgtcataaaagcctatcggaaacagccgctccccgccacgccgcagatatccgtcaaatccttcccccgccgctaacccgcccatctgcaacagaaccaccacacataaaaaccgccccatcctgttcatcctccatccgtccgatccgtccgatcccatccgcgccaatcaagtgcccgatcgactccgccagtataggttttgcggcaaaccggctcaaccgcgaccaaccattgatcgaaaaaccgccgcgcgatatcctgtcctccctattcggcatcaaccgagaaaggatctgtcatgaaaaccttccaggcgtgcgtggccgggcttgtcttctttttttcgatggccggcatggcggggtcgcgcaccgtctggctggaccaactcgacctcgcccagatccgccagggatggggaaaacccgtggcaaatcattccgttgtcagcatgccgctgcgcctgaatgggaccacctacgagcgcggcgtcggctcacatgcgcccggcgggttccacgtcatgctcgacggcaacgccgagaggttccaggccgtcgtcggcatcgacgatgaaaccatcggcaggggaagcgccaccgtcaaaatctacaccgacaaaggcgggcttgtgtttgacagcggcgtcctgaaacccaaccaggctccgcaacaaattgatgtcgacatccggggcgtcaaccgcctcgtcgttatcgtcggctccgcggacaacgccaatgcctatgatcaccttgactgggccgatgcgcgtttcatcgtcgcgggggccgacccgcaactcgtctccgccccgcccgaagagaaggtcatccttacgcccaagccggccaggacgccgcgcatcaacgggccgcgcgtgtatggcgtgcggccgggttcgccattcctctaccgcatccccgcaaccggcgagcggccgatgcagtttgccgtcaacggcctcccggaaggactcaaactggatcccaacaccggcatcatctccggcgcgatctccgaccgcacccccaaaacatacgaaaccaccctgatggcccaaaacgcccacgggaaggctgagcgcccgttccgcatcgtcgtcggcgagaccctcgcactcacgccccccatgggctggaaccactggtacgcccattacaataatgtcaccgataaaatgatgcgccaaaccgccgacatcatgatatcgagcggcatggccgacgtcggctacgcctacgtcaacatcgacgattgctggatgaacaccccaaaacatgccgacccgctacgcgtcgggccgttccgcgaccaaaacggtgagatcctccccaacaagcatttccccgatatgaacgccctcaccgactacatccacgccaaaggactcaaagccggcctttacacttcacccgggccgaccacctgtgcagggttcgccggctcttaccaacacgaagaacaggacgcaaaaacgttcgcacgatgggggtttgatttcctgaagtacgactggtgctcgtacggccagatagccaaagacgacagcctcgacgagcttaagaaaccctacatcctgatgggcggcatcctcgagcggcttgaccgcgacatcgtgctcaacctctgccagtacggcatgggcgacgtctggaagtgggggagcgaagtcggcggccactgctggcgaaccgccggcgacctcgggttcgaactctcccagtaccacgacgtcgcatcccgcaacgccgaacattggccgtacgcacatcccggcgcatggaacgaccccgactacctcctcatcggtgccgtcggtgacgcctcaaccctctcaaaacccatcccatgcccgctcacgcccaacgagcagtacgcttacatgtccctctggtgcctcatggccgccccgctgttctacagcggcgatatgcccagcctcgacgagttcaccctcaacgtcctctgcaatcccgaagtcattgacatcgatcaagacccgctcggcaagcagggatactgcgtcgccaaaaacggtgacgccgagatctggcgcaaagaactcgaaggcggcgccgtcgccgtgggcatgttcaaccgcggcgagttcgagcagcccgttaccctcgcctggaaagacgtcggcttgaacggcaaacaacgattgcgcgacctctggcgacaatccgacctcggcgtcttcgacacccaattcaccgcacccatcccccgccacggcgtattgcttctccttgtgactcaagagtaggcgcggttttccatcccgcgccgtccagccgcaaaccctgcatcaacgtagagcatttcagtgttgagatgcgtatggccgcaggccgcaaaaaacggggactgactcgcttttcggtagtttgaaaagcgtgtctgtccccgctttttgcttatgcaagcgtgccgcatttcaagattaaagtgctctaaacgatctggaaaaatcccagtagggatttgataattgtcagcctatcgcggcatagccgcaaccaaacacctgcttccctcggactctcgcagacacggcctccccgcccccacctgtcattccgaggagcgctggccgatgaccctttttctttcaacacagccctaaacccagcgcgacgtccgaccgcgtccccgcggtcggcggaatccccccggtatctttgccagcctgcaacttcttgatctgaccaatcccacaagcacttcgtacccaagtccaaacgacgtaaccgatatcgtagaagcggcgccctcgccgcttgactacagccacgcacgttgatagcagtgaaagttacgaaagaaatccacgctgctgacaattagggacccaggataatcgccgcacatcgacacaatcccgcacatgaccgggttgtcccagtcccaatactcgcgcccccaagtgtcgttcaccgtccacgccggcagcagcgcgtcccgcgccttcacgacggccccgtcgcggcccgtatagcccagggcgatgagcgcgtccagcggtccgttcgccccggagtgccacggcgcaatcacccccgccgaatcctcgacaatggggtgggcataatatcggtcgagattcgaagcacacacaccgaacaggaataaacgaggatgcaaagacaagaaaacaaatacgtccatcttcgacccatcaagaaagacctcctgcatattctgtcaattataagcatagggagccttaatgctataatgattaaagaaactacaaggaacttggggcaatgatttttcacgtgaaaatagaacaagcggaagatgggtggtttgtggtggaatgccccgccctgccgggctgcgtctcacagggacgcgatgaaaatgatgcgttggctaatatccgtgaagccataacggcttggctgtgggcggaagatcagaaggcagccgccactttgtccgagaattccaaggaaccgccggtcgtagtggctgtttagaggtgtgggggcagccagttcattgcagttcctaaggattctcagactctaaggcacaaagcaaatagcagcaagcgattaaggtacattcgcgtttttatgcgaaatctggtaaaattgcttaaagtaggaattgcgctatatttggaacagcggctggaggtaggatggatcgagatattatggggcgcctaaataacatatcgggcaaggaagcagccaaagcctttcaaagggccggctggacagcagttggtcaggttggaagccacctggttatgagcaaggcgggtgtgcgggtaaatctctcaattcctcaacacaaagagctctccctgggaacactccgggctttgataaagcacaccgagctcaccgtagaagagttcattagctacctttagggaatacgaccgtccgcagcgacctttccacataaaacgaccgaaggagaaatacccatggaaagacccggcgatgccacgtttcaaggtcaacccctgactgtgatcggtccgcgccttaagccgggcgaccccgctcccgaatttgaattgctcgctaacgaccttacccccgtatgcctctcgcaatccgcaggcaagatccgtctcatcgccgccgtcccctcgctcgacacccccgtatgcgacctcgaggtcaggacgttcaacaaacagctcgacgcctacctcggccgcgtacaggcatacaccgtcagcgccgacctcccgttcgcgcaggcccgatggtgcggcgccgcccgcatcaagaacgtccagagcctctccgaccaccgcgacatggcgttcggcgacgcttacggcacccacatcaaagaactccggctcgaatcgcgcgccgtgttcgtactcgaccccgacggcgtcatccattacgccgaatacgtcaaggaaatcaccaactcacccgattacgacgccgcgctcaacgccgttaaatctcttctggcataacgccccgtcattcagcatttatcatcgccgtatcgccgtacagcttctgctgttccttcattgccgccatcaactccttcacccgttccgcctgtttcccatccgccgcgagatcattcgtctcatacgggtcgctgtccaggttaaacaactgcgtcttgtccaccttgggataccggatcagcttccactcccccctccgcacggcccgctgaacctcccggtacgccagaaaaatcgtgtcccgcacaccgtcccgctcgccccggatcacccgcgccaagcttttcccctcgacttccaccggcgccggcgcccccacaagatcgcacaaagtcggaaaaacatcaaacaggtaggcaaacgcgtcgacccgcttcccacgcgggatctgcggccccgaaaaaatcagcggcacacccatcgaatgctcgtacaggttctgcttccccatcagaccgtggctgccgatcgcaatcccctggtccgacgaaaacacaatgatcgtgttctcatattcgccgcagtctttgagcgcctggaagatccgcccaaactgaccgtccatgtacgtgatcaccgcgtagtagtcgcgcaaatgcccgcggatctcccgctctgtgcgcggccaccccgccaactgctcgtcacggatctgcaactccccgttgtcgaacgggtggcgcggcaaaaagttcggcggcagagggatcttgtccacgtcgtacaggtccaggtactccttcggcgcgacacgcgggtcgtgcggttcaggccccgccaaatacatgaaaaacggccgggtcttgtcgcgcctgcccagaaaatcgaccgccgcgtccgccacgtgctcacccggcaatccttcccgccgcacaagctcgtcgcaattctccggcaacgggcccgttggccgttttggcttcacataaaggctctcctcgaacagcgcctgcacctcgacgtccgtgttgcccatcttccccacatgaaacgtctggtatcccgccgcacccatactcgacggcaggttggcaaaccccgccggcaggtcacgcaccgaaaaccacgaccggccccgcagcagcatcatccggctcggcaaacataccgcaccgctgaatccccccatgcaatacgcattcgtaaacaccaccccgccccgcgccaactcatccaaatgcggcgtgtggatgtgcggattcccaagcgcacctatcgtatcttcccgctggtcatcggtaagaataaacagcacgttcggccgcttcgtctcagtgcgcgcggtcctgcaacgccccgtggccaacgccgccgcggcagcgcctaactccgccagaaagctccgccgggtgcccatcattgcgcctccgcgccgttcccgccctgtcaatccgtactactatccgttaacttccagcatttttcaaagaaattccctgggccgattgggacaattgagacctttgggacacttgaaactgatcacccttgggggaaaaacgggaacaaccgccttatctcctcctcactcggctgccgtccgtactcgcagatctcgaacgcctcgacgtactcgatcttggccgcttgttcttgtccgtaccgcttgacgagcgccgcgttatccttctccggcgatcgtttcatccgcgccttgaacatctcgagcatgaactgtttcgctttgtccggctctttcggcaccatctcccgcatcttcgccatccacggcaaccactcgagaaactgcgacgggatcttgctcagcgcctcaaacttcttgtccgccacgtccccaacgtccaccatgatgtccgcctcgaacgggtaaggtttttggaacccgtcttccatgtataggtagacggggtttctgtcgagaggcggcgtgtccgggcagatgtacggcaccgccaccatgtaggccccgtcctggaccagaatgctcgtgtagcggtggtccgggtggtagtcgtttggccgcggcgctattaccacgtccgctttccactcccgcaccagccggatcagttccttccggatctccagcgtcggctccagctcaccatcatgatgatccagcacctccgtcgtgactcccaacaccttcgcggcctcatgcacctccgccgtccgccgctgcgccaacggcccccccgccatcgcgtaatggccgatatcgccgttcgtcaccgacacaaacttcacctggtggccctgcaccgcccatttcgccgccacgccgcccaccttgagttcgcaatcgtccgggtgcgcaccaaacacgatgatgcgcagcggggacgtgggcgggttgttcgcttgggcataagcccccgctatgccggccagcaatactaacaacgtaatcataatacggggcattgcgatcattgtgaatctcctcacaggtgtcgacaggttaagccaaactcccgttataggcttcccttgtggtgcatcttctccagtattagttccagcatagagttgaagtgtccggaatgcaacacacaaggcccgtacacacggacctccccgaattcgccgtattcccaacatcaattgtcgaacgccccacatctgaccgaatttcgctaagttgttacaggccagtcagttgcggcggttcagcgcggtgctgccggccccgtgacattgccgctggagctctttttcccccttgttttttttgcacgtgtatggctagaatgagtcttgtgaagacctgggagccgaatgtcagctccggtcccctctcttgaatcaacccaccttgtctttggatgcggttcgccgcgctgtactactaacgtttgatttcttgttgtggcgcgcagaatttgccgtacgtctgggacaccccccggcccgccgcggcgggtggggggtgtccctctttttgcccccaacccataccctttctttgcacttcgcactttgcacttcaactcccccaaaccccataccccaaaccccatacccgattttggttgcgcctatgccgcgctgtgctttttgtgccggaccgttccttcctgccgagcacggtagggtcgcgctcccacgcgaccgcgcgactgcacctccgctgctattcatccgcacctgtccgcctccgctggccaacttccacatcagaatcgcacttttagataaccatttagtctacttgatttgaacagaaccggcgcgtagactctcttcaaggcgtggaaaaggggctgtctatgatctcgtacaacttgctttccgaaaactggattcccgttctctatcacaatggccatttcaaacgcgtcggtatccgcaacgcattccaagacgcacaccggattcgacaaatcgccgcctccaaccccatggaccgcgtcgccatactccgattcctactcgcactcctctattggtgcaaggggaatccgccaagcgagcatgaggccacgaccggcgggccgttccccgcggagtggttttctaaactcgaagaaaatcgcgagcgctttgacctgtttggggaaacaaggcggttttatcagtacaagaaggcagtaggcgaagataaacggcttacggccaactatctcgtgcacgaggtgccgacaggcaccaatgcatggcatttccggcattcgacggacgaagtgaacggtttgtgtcccggatgttgcgcaatcggcttgttaaggcttccggcatttgcaacttcgggcggtcgtgggaaaccgcccggaatcaactcgaaacctcccttctacgccatacctctgggcagatcacttgcggcgactctccgtctttcctggcggcccgcagcggaactaggaacacccgcgtgggaaaaaccggacgttcaactgcctcgtagcggccaagtacccctcctcaccggcctgacctggctgcctcggcgggtgtggttggagcagcccgaggaaccgaaagactactgcatttcatgcgggcgcaaggagagcctgattcggcgcactgtatttgccccaattggcagcaccaagaccgaagaaggggagccggtcagggcatggtgcgacccgcatgtgatctacgggacgtccagcaagggcgaaatcagcagtctgcatgcgcgcgacgctcttggggcagcagacgccgcggcggggcaatgggccggtatcctcgcgggcctgcttcgaaaagggcaatcagccaacgcatctgcttggtggatagtgggcttttccaccgtccaaaacgacaagtatcttgaagccgtcgaatgcctgattctgtgcgatatcgagcacgccccacaagaacagcgggaacaatgcctgaaaaacttagaacaatggcgcaagggaaaagcggatttggtcaaaaagctccggccggagaacgaaaagtccgggcggcgtgagcatcccgagattacctcgatgcttgcgtcgattggaccgcacgtcgaaaaccaggtgtcggagcttaccggatcgttgatagcggacggcgaacccgcatggcaggaagcggcgaagacgtttcgcccgatgatgcgcgtggcggcacaatcactatcccctgggtttacaagccaagctgcgagaaagcgcaacaggattgccagtgccatcccggagatcacacccaaggccaagaaggcacggcgcgggaaaggaggcgataaatgactgccacggaagaattcattggcgttttgagtcggctgaagacgggagatcttgggcttttgcgcacgcatgcgcaacaggccctggatgaatccgtcgaggggtttgatctcttttccgggctgtggtggccgttgcggaaaaagaacgagcgggcgccgcggcgggaagtggcttggcttatagctaaactgtatgggtgttgtccgattccccaggcgcgcgatgccactcttgcgcgtcaactgcggcggtgccggccggcccatgaagagggtagaaatcggtttgggcggaagttcgacaacatattgatgctgccgctcgacaagatcgaggcggaacttcgttgggcgatcgggcaggttgcgtcgagagggctttcacttgattgggtaagactcacggatgaactttccgtctgggaacgcgaaagtacgcggctgcgatgggcggagcagtttcttaaaaccgaagaaaacgatgaaaggggacctttatgctgatcgagatccacgcaatacaaaaccattgtccttcgaatttgaaccgcgacgacctgggagcgcccaagacgtgctatttcgggggtgttctgcggtcgcgcatctcgagccaatgcatcaagcgaagcatccgtaccagcgaacagttcaaggcattgcggggcgggatccgtacccggcagttggcaaaactgatcgcagatcgggtccagggtaaggcggatgtaaagaagcgcgcggccaagattctcaatggatgcgggatcgcgcccaaagacgaagacaagagcgatatgctcgtgtttacaacgggtgaagcaatctgcgaaatggcggcactgctggaaaacggcgatgggaaatcggacgaacaactggcacaggagtttggcgatctgatcgtgcaaaggacggttgtgcccgacatggctttgagcggaagaatgctcgaaacgggtgtcttgaaagacaccactgtagaggcggccctgcaggttgctcatgcgatctcgactcacgaggcccggccggaagtggactattttgttgccgcggatgacattccgggcgaagatgcgggagcagggctcgtaggcgaagcgatgtatgcctcggcgtgtttttacaaatacttctcgatcaattggaagaagcttgtggaaaacctcaatggccaggaagaactcgccgcacatacggtgggtgcgttcatccgtgcggcggcgctggcgaatccttcgggtaaacagaacagctttgccgcgcacaatccgcccgatggcctgctgatccaattcgcggccaccccgacgagctatgcgaatgccttcgccgctcccgtgtcgggcaagggcaatcctgacgtcatttcacaaagtgtggcgcagttggcgcattatgttcgcgacttggacacggggtacggcaagccccagaagcgtttctggttctcgccgaatctgcgttatccgctttgcgtcatcgaagacaagaaaacgattccggttgccgaggtaaacctcaaatcgctcgatgaactgattccggccgtcatcggcggcttgggctttgattggaattcggttcagaagaaagtgacaagccaacaggtggcgccatgacggccaacacgctgtttcttcggtttgaaggaccgctgcaggcgtggggtaatcaggagtcgaagttcgttgtacggcgcacggctgaagggcccactaaatcgggcgtgatcggactgttgtgtgcggctttgggcgtgacgcgggcggaggcgcaggaatgccggttgcctcaactggccgaactgcgtatgggcgtgcgggtggatgcgcccggataccggtggtgggactatcacacggtaggcgcggggatggacatgcgcatcgccgaagccgaggggaagacaaaacccggcgcaatgctcacgcggcgggagtatctttgcgacgcgactttcctggtggtgcttcaggggaatcccgccctgatcgaagaactgcggcaggtgatcgaaaagccgcgctggacgctctatttggggaggaaatgctgtccgccgtcgcggcgggtgctcgaggaggcgacggcggcgcatccggacctgatttcggcgctcgtgtcggttccgtggcagcggcgctttgaaagcgataatcccccggaaacactcgagtatctgctggattggtttccgacgcccgaccagccggaggcgccggatgacgccgaggtgtggtacgacgtgccgttgacgttcgagccgccgtcgcatggtgcaaggtttgttgtgcgcgggcagttccgcgtgggcgccggggggcaggtctcggtggcggaatcggcgttgcagcgccgggtgccctcggcacaacgcccgcgggcagattatggcaattccgagtaccggaagatgcgcgcgcaacggctcgagaaggacacgcatctttgcgtgttctgcaggtcgcgcgctacgaccgtgcagcacgtcacgtaccgtcatgccggcggggacgagcgccttgacgaactaaagtccctctgccggttgtgccacgacgccgtcaccatgctcgagtatgggctcaacatgggcctggaccggatcgatcccgaggatccccgatggtgccagcgcatcatcgagaaacgcgacgagatcgtcaagttccggtcgctcgagacccggcggcgacggctcgaacccgaggaggtcgagtgatgtatctatcgagtctgatgatcaacaccggcgacaatccggaccggccccggccgggccggttgtggctgcgcaacgtttaccatgtccaccagcgcctgtcgatggcgtttccatcgaggtcgcaaggaagcccgtgcggttttctgttccgcatcgacaacaatatcgaagacaactcgccgcgcgcgatcattcttgttcagtctcaactggcccccgactgggatagggcgttttacaatgcgggcatgcttttggcggcggcccctgcggttcgtgaatacgccccgtcgttcgcggacggcgaggaactccggttccgtatccgggtcaacctgagcaagaagagcaaaacggccagcgacggtaccgacctgcgaaagccccacgacgccgtggaccggtgcggccgccaacgcgatcagtccaaacgggtcgcggtaacctggaagggcgacgagggcgagacgccggatggggcgatccggcaatggtttgcgtcgaaaggggaacatgccgggtttgcactcgacacggatttcaacctcattcacctgggctgggtcaccggccataagccgggaacgcccgagaacaagctgcggtttcgctccgcgctgctcgaggggaccttgagggtagcggacgggccggttttcatgcaaacggtcgagcgcgggctaggctcggccaaggggtttgggtttgggctgctgtcggtggctcacgttcgggagcaggcgggacgcccgcaccacaatcgaggcgtggcgcatgctgacgcgtgatttgcacgaactggcgaaggtgcgcgaccgaatgagctatttgtacgtcgagcacgcccggatcgatcaggaagacaaagcgatcgccattcacgacgcccaggggctcaccccggtgccgtgcgccacgctcgccctgttgatgctggggccgggcacgagcatcacgcacgcggccatcctggccctcgccgacaacgggtgcctggtggtatggtgcggcgagcagggcgtgcggttctatgcttcggggcagggaacgacgcgaaactcccagaacctcttgctccaagcgcgcctgtgcagccgccgaagcacgcggctcgccgtggttcgccgcctttacgagatgcggttccccggaaagctcgattcgagtctgacactccagcagatccgcggcatggaaggcgtacgcgtgcgcgaagcctattcgagcctgtcccgccaattcggcataccgtgggcgggccggtcgtacgatcggcagaactggcgcgaggccgatcccgtcaaccgcgcgttgtccaccgccaacgcgtgcctctacgggctgtgccacgccgccatagtcggcgcgggctattcgccggggctcgggttcatccacacgggcaaacagttgtcgttcgtgtacgatatcgccgacctctacaaggcccaaaccaccgcccccgccgcgttcgaaaccgccgcacgctctacccgaaacatcgagcgcgaggtccgcatcctgtgccgcgatgcctttgcggcacagcggctgctcgaacagattatgaaggacctcgagtacgtactcgacgtcccacccgccgacgaggatgaagccgagaccgatttcgactcggatcccggcacgcccggcggcctgtgggaccccgacgcaggcgaagtggccggcggcgtgtcttatgccgaacccgacgaacacacagaggataacacctaatggtcgtcatggtgctcgagcgcgtgcccgcttccctgcgcggtgaactcacccgatggctgctcgaacccaaaaccggcgtgtttgtcggcacggtgtccgccatggtaagagaaaaactatgggaaaaggtctgccggaaaaccggcgaaggcgggtctatcctcatttggagcgcaaataacgaacaggggttcaaaatcgatttctggggcgatccctccaggcacgtcctgagctgggatggacttcagctcattacaaagccaaaataaccaataaataccaagtgtaatccccacgcgcgtggggatgaaccgcatgcccgcctgcaagccggcgacatctgctagtaatccccacgcgcgtggggatgaaccgtgaacggtgttcactgaaggaaacatgaactagtaatccccacgcg

SEQ ID NO: 538 - DNA, 44197 bp, Artificial Sequence
  Synthetic Oligonucleotide
tgaagtatcgtatcggaacaaccggttcatccccacgcgcgtggggattacaattcaatgtcgaacgcgcggaattttaacgccggttcatccccacgcgcgtggggattacctcaacagttttgataaaattggagtgttcaacggttcatccccacgcgcgtggggattacccttcgtaatcattgaagttagatcacgaaaagggtgttaagtatcagtggcaactgcatcctctttaggaagatgctttacagcaaaccacaatccttctttttcctgaaaattccttgatgtatcgccattcgaccgcaacgaaaacccttgctcattgttgtcgttccagatttgaatgaccgctggtgttccacgacgacccacacaaagatcccaaagcttatcgcggactatcgcggaaacctttccgataaagacaccggtctttgcttcgaacagccatcgtgtcaattcaccgcgcaatgacgcaggaaccttctcaagaatcatcactaccatttgtcaattccttttccacttccggtgggttccaatacggagttggacgtgccgggtcttcatcgatatcccaaccgaaagattcgtcgtccaagttgaaatcaaacaaacggtcgatatcaggtaaaatacgttctaataatttgtactcgtggaagtaatctcgacagagatgccgcacccgactttccaagttgtcagtggattcctgtacgacgcgaaacgagagtgggatcgtcgtctcaaccttgtatagatcgccaatatcgtacacgaatgagagcgctttaccgacatggacgaaaccaagaccgggagtatagccgccactcacgatggcagtatggcacaacgaataaaggcaggcatttgctgccgaaagtgcgcgattgactggatcggaattctcccaatggttccggtcatagcttcgaccgacccactccacaccggtttcgttcgaggcaatcgcatacgcttcgcgtacacgaacaccttccattccccgaatttgttccaatgataaacccttcggtaatcgttttcggaaacgcatccggtacattcgaagcacgattcgttcgtgtgactcagggtcagcccacagtgccgcttgtcgttcgaggtgccctcctttccgggtttcaccgataccggtcgcataaaaccggatcgcgccttcacccgtccacaataccatacaaccattgtcagcaagcgctttcactgccgcgtgggtaatcgttgagccgggacccaacaacaatacaccaagtgaagcagcaggtacgggtatgattccttctttcgtccaaaccgcaatcgacatttcgtcttgttcgacccggcaatgttcgaagtatgcatacgataaaccatcacgtaatttaggtagggcacggagatcgttcattggtgatctccaattgggaagacagaaagtagaccaaatccgaatcccttcgccgatccaattcctgcatttatcgcagcatgaaattccatagcatcggtgacagtcagttttccttccaacaatgcagaacgaaagcgcatgacgtgttcgtcaccctttccgttcggttttttaccaactacccatcccaagttcacgacatcgcaactaccgacagaaaaacctttctgcgatcctttgcgagcaaaccaatcaaggatcgcatctgttggttttgtctctttgtcccaaagagtaacacgtttcccttgcgacttggaagaagggtttctatctgcaccattcgatccgtaggtagcactctttttcgtcggattgacacgaatccgaaatctacgaatgtccccattctgaaatgcaggagtgtactcgtatggctttattggtgctgctagaaccatatctaagttgtggaacgcatacttccaatctggctccgtttccgattggacaatgatgatcgtctgttgataattatctcgaacgatttgatcgatacggaagagaaaacgagagcggtcaaacccgtttggatcgaatgggagaagaaaattcggatcgactttttgcgtcgtggacatgggaaatgccatcgacaatcgttgatgaacgtgatagatgttacgcaaccataaacgaccggggcgaggtcggtctggattatcgccgacatcgatcatgagattggaatgatacatcactctacctcctcgatggatagccgacgacgacgggtttccaatgaacggaatgcgacaatttcagagcgtttttcgatgataagttcacgccaacgttcctcttcgggattgatgcgatctaatcccatcccgaccccatactcgatcatcgtcacggcatcatggcaaagtcgacaaagcgaacgcaattcgtcgggcttttcttcgcctcccgcgtgtcgataggtaatatgttgcacggtggttgccggagatttgcagaagacgcagagatgctgatcctgagatagccgttcgcgtcttttcgctttgtatttcgtattagtgtaatcggcgcggggtcttggtggtcgcggtgtttcgtgctgcaatggttcatttgcaatgcttatctgcccatgttcgccaacagtcaactcttcacgaatgacgaatcgaggtcgatgcgagggcggatcgaaactaaccggtatatcgtaccagacctgtgcatcgtcaggggcgtcgggttgttccgaagtgggttgccagtcgatcaggcagacgaggttctttttgggttcgttatcacgtttgagtcgtttccgccacggaatcgaacttaacgcagagagcggatcgggaaagaacccagccggatgttccaacaatggtcgcgacggaacacagcatttgcgaccaaggtagagtgtccactgtgggtatttgaccgctttttctaactcttgaatgagagatgggtcgccctgcaatactaccaaaaaactggcatcgcaaaggtactcgcgtcgggtgagcattgctcccgacttacattctccctttgcggttcgcatttgcatttcggcaccgacggtgtggtaatcccaccagcgaattcccggtacatcaattcgtacaccaattcgaagttcacttagtttcggtaaccactcgtccggcgcttgttgacgggtaatacctagcgcagcacagaacaatccgatgactcccgatttcgtcggcgcttcggcagttcgtcgaactacgaatttcgattcgtgtacaccccatgattgcatggaactttctaggcggagaaagagcgtattgggcagatcgctcatgctatgcctcgttgttaacgattgcctgttgtacctcgttccagtcgaaaccgattgcagctataaccattggtatcagttcatcaagtgacttgatattatggtcggttagtgcgatctcttgtttgttttcaaccacgtagaggggatagcgaagattgggtgaaaaccagaagcgctgtttagggatgccaaacccagtatcaaggtcatgcatatattgacctaattgagcgatactttgtgaaatgatttcccgttcccctttggctggcactggattcgcaaaggcgttggcatagctgattggcgtgcctttgatctcgatgagtatcccatcgggaggattgttcgcggcgaaactgttttgcttcccactcggatttactactgcggcagtgcgaataaatgtgcctactgtatgagcggctaattgtttgttatcgccgagattctctacaagttgctcaaaattaatggagaaatatttgtagaaacacgcggaagcaaatagttgttcaccgattaaatcggcaccagcttcttctttttcctcgcgtgtttcgtctcccattgccacgaagtaatcagtttcaggaaaggcggcgtgggtcgatatagcgtgagccgtttgcaacgatgcctcgacattcttttctagtttttcccaaattttcttcgcagatttgtcgggttcaagcatacgtccacttagtgccatatcgggcgcttgtgtgtaaagagcgattgctttcgcaaattcttttgctaactcatcatcagatttgctgttccttgattggaagagattcacaatcttctcaatggcttgttgggtcacgaagagcggtgccttgcttctctgactggtttcatcggattcatcggtctctccttcttcgcctgcagtggtgcgcggtttcttcgcttttgattcagtctttggtttgaaaccgcaaactttgagaatgccttcgactcgttttttgtcgtttgcatcaccttcgatcttgtcaagaatcctcttagcgagatcgcgcgttcttactcctcctaacagtttcgcaaactctggactcatccgaatacttcgcttgatgcattgactcgagatgcgcgagcgtaatacaccaccgaaataacaggtttttggtgcgccgaggtcgtccctattaagattcgccgggctgtggttctggatcatgtgaatttcgatcaacatggttgtaccctttcgttgatgctgagatattggtttatccattcctgatgcttggtctcctgttcccaaaaggagagatcatcggtcagttttacccagtcgagtttcaattcatgggaagaaatttcttgaagcgctcttcgcaatgtgggctcgatttgctccaagggagtggttatcagttcatcgaatttctgtcgaaaccggtttcgcgcacgttcttctcttggttcgcatcgctgtagttggtgtgcaaacaaacaatcagactgatgttcaatgggacactttgcatatagtttagcgatcaaccacgcgacttcccgtcgcggtgcaaactggttcttttgccgtagcggccaccacaaaccggtaaacagatcgaacccatcaacagtctggtcaagtcctttattagcatgggttcgcaagagtcctaggtcacctgcttttaatgtttgtaagaccatgataaaatcattggttgaactcattctgtagccgactttctacgtttcgttttctccggtgggtcatgttttgctcgcatatcgggtaatgcgttcgcgatactctttcgccgtatcgtcgctgttagtgtagcgccgggtgcgagtgatttcgcgatcatctcctgcattggacgatattccgatgctgcgttttgccattccgtttcacccccggatagaagattcccaacagctgttgagacggcatgctcgacatgaggacgattggaatcgtaggttgctttcaggtgatcgagtttccgtttcactcgcatcgtcttaggcagacgctttacgaattcgttgttcgatgtctctttctgccattgctcaaccgtagacaccgctgcttcgggtactgaattatttgatggtaactcaacaattcgttcccaaacatcgacatacttcgcattatctgtaccgagaccgatgatagcaaaagtggtcgaagttggataaatcgttttagcggcttcgataacaggtgcaagtaatttccataagggtcgatccatcttaaattttccagccgaaaccggatcaggtgcttttatcgatttttgagaagtgctactgagataaagtgcgtgtgggtctctccaaagggcagtttcctgcttacctggcgattgaaattcacaactgcggataatcgtatcggattttactccacagttgtagcaagtttgatggctctccgtttctgccaaccaaactttacgggcgagcatcgttagccctttgagtagtggaatttcggcagtgtcgcccacattaaaattgaggtcgatccaagatggttcaccgaaaggaatggcgcgaggtatccagtttttgtggagagtctcgaacaacgaattgcccaccgacattatgtaaacaggcggaactccatttattcccggataaaggtatggtttagtattgccaccaaaagtcataaataatgggagccgaagtagtcctattgcacaacaggaagcgcacaacccctcttgaaaatcggttgtgtgtttaaaatgccaaaaattgtgtccagttggtatctcttgatacaaatctgtcgtgggacgagaacgtcttgcatcagcatcctgataaaaccgctttccgtttccaagtaaattgaagcaatcccgattctctgtctcttcaagtttggaaaaccactctgctggaaacgaatcgatatttgtttcatcagggggattccccttgcaccaatacaaaatggcgagcaaaaaacgcatcactgcaaacctgtccatcggattcgatgcggcgatctctcggatttgaccggctttaattagcgcgtctttgatcccgacccggtcgaattgtccgtttcgatagagtaccggaatccattttttctctaacaggttatagcacataagcgctcccgtagttgaaagatataacgtagttcattattcgtggttgccaagttcatcctcaatttctttaatcgacggcaggcttcccttcagctcctttggaagtgttttaacgattttagtctcccaaccggcaacaccaattggtttcttcaaactgcgtagtgcatactccactaccaactcgtttttcgtcctacatagtagcaatccgattgtcggcttatcgtcgggatgacgtagtagatcgtcgacagcagataggtaaagatttatttgtccaatgaaagcaggatcgaatggtacagcttttagctcgattacgacaaaacaacgcaatttgagatggtagaataataagtccactaagaattcttgatccccaacttccaatcgaacctgcctgccaacaaaggcaaatcccgctcccagctccagtagaaaactctgaatatggtcaaccaatgcctgctcgatttcatgctcacgccggggatcggcagtacccaaaaagtcgaacaaatatgggtctttgaacacctgtgcagccatatccgattcagttggagggagcgttaccggaaaattcgtaattgctttgccttggcgtttgtgaagttgtgagtcaatctgtaatgcgagaatgttgcgggaccacccatgctcaacggttttgttaatgtaccacaagcgtgtttcaggatcgtctaatttttccaataaggtgaggttatgataccatgtgatttgtgcaagtgcctcttgcacaattgtccggtcagtccatgcagaggcaaatgcccgcatgtatttcaggttgcgtggcgagaagccgcgcatttctggaaacgatttttgtagatcgacagacaatcgatcaattacttgtgctccccaaccctcctgttcctgacgttcgagaatcgtccgaccgatatcccagtaaagtaaaaccatagcggcattcgcagcaagaaccgttttcaatcgttcccgttgaatatgttgtttgatctgctggaaaaattcgttgtaaccttttggcatccctgataggggtgctgcgacaggaaaagttgcctcggctcgagtccgacctaaagcacgacgtttctcattgggttcaactatttgtcgttttttactaggcataaatcgctctcaatgactgaaactcatcagatcatgaatgtactcaactacaaattcgctcagtagtattccttgatatatgcatacgccttctcaaacagttcttcctctttatgaagctgatactttagaagagtcttgcgtagcgatttctggacttcgcgctctcctgcaatcgtagtctgccaaccgtcaaaccgaacaattttcacgatctcatcgatatcgttgacaatgcgttcgactactgacggtgtcttatctgtgcgcatttcaagaaaaagttctgtaagtgctgtcttggcagttctccgttcgtctgcagaaaataactcacgctcggtctctaacgtatcgcgcgcgatttggcagaggtgcttgataaaatcgatactgctaatcaacccttgctcagcacgattccgcaattcctctaaccgctcgctaagtttcttaaacttaggattacctggatgtttccctaatcgaccgacaagaataagaacgatctgtttggctcgcttagtgtccttactattcatcaatccgtcgattaactcggcatcgagcaccatctcttccatgtcatcgtgaatgccggagacatgaacatgctcgtgaatcaatttttccgtctgcggtccaaacgcatgccagagtaatcgtccgttgtcatccgaagctggtcgaacagaggtatagacttgcgataaccatttgtagtcacgctgaaaacgattgagaattgaatcgggactcagtgcttcccacacttttgatagagtgacgtagtccttagcaaacgcatcgcgcatttcattcgagttgatacaatcctgcgcccgactcagaccttcgaatccttcaatcgtacgatcaactccgggaaaatgggaacacgctttctcgatcaattctggaagtttgtctctcaattcctgcaggttcgttattacagcacgcacagtcgcttcgtcaaactctaacgccttcgcagtatcatcgaaaaccccaaagtaatcgacaatgcgaccgtaagttttatttggatagacgcggttggtgcgacagatcgcttgtaataatgtgtgatctttcagcgatttatcgaggtacatcgtctgcaagagttgagcatcgaatccggcaagtaatttagcggtcacaatcaagaactttagttgagaatccggattgttgaactgctcaataactttctcttgctggtctttatccaatccccatttttgtttgaattcgagtgggtcgtttgcggtcgttgaaatgaccactcgactggcatccacaccgagttgttcatcgagtgcttctttgtaagcaacacaagcgagacgatccggagtcacaatcatcgctttaaaactgtgcggttcgacatgtgtgcgataatggttcgcaatgtcttcgacaatcgttctgatccgctctggcgatttgaggaagagcagcatcttcgcagctttttgactcaatttgttgcgatcttcttccgttagatcattagccatttcgcggaaagcaatatcgagcccttccttgtcaatgtgaacattggggagtcgcggttcgaagtgaagtggaagcgtttgtaaatcgcggatactttcctgaaatgtatagcggctgaggtatccaccctcatcctccggtgcaccaaatgcccaaaaagtgttcttgtcggaacgattgatcggagtaccggtcataccgaagagaaacgcattcgggagtgctgcacgcattttacgaccgagatcaccttcctgtgtgcggtgggcttcatcgaccataagaatgatattatcccgcagattcatgtcgggataggcatccttgaatttgtgaatcgtcgtaacaataatcttacggatgtcgcgttcgagcaggtcgtgtaacgcttggatactatcagcattgaccatattaggaacttcggcagcaccaagagtattggttatctgtgtatcgagatcgacccgatccacgacaatgatgatagtaggactcttgaggtcggctttctttcgcagtttctgcgcagcaaatagcatgagtagcgatttaccagaaccttggaagtgccaaatcaaccccttcttgatatgtccttcggaaacccgctgtacgattgcatttgcaccttcatattgctggtagcgacagacaactttgatcttgcgtttttgcggattggtcgcataaattgaaaaatgacgcaggatatcgagcaaagtttccggtcgtaacaaactgttgagttgtttaccgacttcattcagtccggaaaaaagtgcaagagtactattggattcatccaatcgccatgggcaccaaaattcaagtggtgtgcgaacggcaccatagaagaaatcgcgaccgtcggtagcgaaactgaggatgttgggtacaaacagattcgggacagtattctcgtaaaccgcatggatttcgtgcgcaccatcgacccatgttactgccggtcgtactggcgttttcgcttcgccgactactaccggaatgccgtttatgaacagaacgatatcgggaatcttggtctcgcgggcacgaattttgaactggttagtcaagatataggagttgttttcaggatgatcaaagtcgattaggtttacaccaacgtgcttaccgtcgatgccgaacggcatcgtaatctcacccttgtaccacttggcaaactcttcatttgactttactaatcccacattatttactgtgatgaggatggcgcgtagtttgtgaatcaattcgtcggcgcggtcgggttgttcggcgatttcagggttgatccgaattagtgcctgttttagctcgctttcaacaagaacttcagtaatctcgcggtcgagtgtgtcggtaggcatatagcgccagacgtgacgaccagtgtctggagatgaaacaaccccatcaccggcattcagattgacaccggtgagttgttgcacaatgaaatgttcgacgctattcatttcggtaaaaggcatattagaacaccttgtgaattaaattcttgattacattctcagttttggtaacatggtttttggcttcagtaattaactcttcgattctgcccaaattttcgacacatttttcttgttcttttttttcgataaccggtactgaaatattgtagagatctgatccagtaataccggcaacagttgtatatccgactattctctttattctttttacaccctcagaagaccggaaaaaataatggcagtacattgggagtattaattttgtgttgagccgtagtctgataatcgaagattcaaaagtcattttctcttcatcagtcatcacaatcgaacacttaccagctccttcgatgactaacgaacgtctagcgaaaagtaagtcgcctttttgaagtaagaattgtttttcctctttatcgcttaacgtgattctttgcatatccgggttatacagtttaggataagcgaataattctcccatatttaccaattttatcccatgcccaagatattcttttgatttataaattccattaagcagttttgtgcttaacaaatccgttacgggacactcttgatacccatccaaatttctgacgttattaatagttggtttctttgtgtatgtttcaaaaattagatctgatgagagttttagaagttctcctagcccatttaccaacgatattgccttttgtgtggcgttatccgctgcccacaacaattcagcgattttcgcttgttgttcttttgggggaaggaggaactcgaattgagcaaggtcttgaaactttgttcgaggtgaaagagccccagccgatgtattaaccgcatgctccaagaaccgctcactctgtaataagaaagggaacaaacttggttcgattcgtttctcattggcttctaagaccagaatatcactagaacaaattccatcgaactctgcaaacgcaacttttttctgatacgaacgacgtttaccgaacagtacttgaccgggtttgaatcgtttcgaaaaagttataccatcagcgatattgccccacgacttaagatgtaggttttccggttcgatatgctccaatccaacaaatcggtcgatcccattcgataatggatcacgctcggcaatattcaagttgcggcatacttcaccgaacttgattcgtttccaaccttgcttgtcgaatgtttgcttcactgtagtttcgctatcagcttttgaatcgactgtcgtaattcatctgcgctactattccattgatcaattgcatcgtgtaagttctcaccattaccggttttctgcattgatccggtgtaaagcgtaatgttcaaattagctttcttatcaagcacaccttcaaccgatataaccttgctgaagccgtctatcgtttggtagtcatgatatgtattgaaaatcttctgaatgtgtttctcttccaagtaactcgtcgctttttctttatgaacttctttcacggcattgataaagagaatttttccttgccgcgttttcggtttattgttcctacagatcaggagataactctccattggtgagttatagaagagattcggtcccaaaccgatcacacattccaccacatcactttctatcattttacggcggatagcagattcggcatctctatagagaataccatccggccaaagaataacacacctcccgttgtcaggatcgagagatgtatggatgtgttgttggaatacgtaatcggcatatccctgaggaggcgtcccccagatatttctgccgaatggatcgctcgcaaatgctttctgatcccatgccttgatactgtatggaggattggcaagtatcacgttgaatgtcttcagtcggtcgttttccagaaacgcggggttgctgagagtattgccgcgaacaatctgaaaatcctcgataccgtgcataaacatattcatacgagcaattgaggaagtaatcaggttgatctcttgtccgtacaatttcagcgtccggtattccttacccgtgtctttcaactggagcgcacagttcaataacaacccgccggaaccgcaagttgggtcgtacacactctctcccggttgcgggtcggaaattaacgtcattaaccgaacgacggtacggttggtataaaattccgcggcggtatgcccgctgtcgtcggcgaatttcttaatcagaaactcgtaggcatcaccaagttcatcttgggggacattaccgatgctgagactatgctgactgaaatgctcgattaggttggtgagcgtctcattgttcaaccgatccttattcgtccacgatgcatctccgaatattccgaataattgttcctgattcgctttctctaattcgcgcatacccttctgtagcgcttcgccaacatttcgagtcaccgagcggacatcattccaatgcgaccctttcggcacctgaaaccggtgattttcggcgaaggatgcatactccaggtcaccgccactctcggctaatgcttgctggtactcctcgtcgtaaacatcacaaattcgcttgtaaaacaacagagggaaaataaactgcttgtaatcaccggcatcgatatggccgcgcagataggtcgctgcaccccaaagataactttccagctccttgcgtttcatcatgatagcaacccgaattccatgagcaactctttaaagcgatcttcagcttgccatgccgcttgtgctgcaatttcgagttcggcaatcgcctcttccatcgaagggaggttgtcgactatggttttctcaatatagagcggaatattgaggttgtactctttcgttacgatctcttcattatcgacgactcgtacatgatcaggaagtgatttgtactcacgataccatttatagattgtttcgacatgctgtgcttccaggaaattttgtgctctaccgactctgatttgatcggacgcatcgataaacagcaccttccgttttcgttgcttgggtttcttcgcccggaaaatcagaatacaagccgcaagtgtcgctccataaaatacattagctcccagtccgattatagtatccaaccgatcgctatcaatcagtttttgacggatacgaccttccgcaccctttcgaaagagcgcaccatgaggtaacacgacagccattcgcccggtatcgggtttcatggattgaatcatgtgttgtacccaagccatatccccatttcccttcggtggcacaccggcgatgttacgtccgtagggatcattcacccattgctccgcaccccattcttttaaagagaagggcggattggcaacaacacaatcgaattgctggagttgatcgttttcaacgaatgccggttgacgcagcgtatcgccacgctcgattcggaaatcctcgatgccgtgcaggtacatattgatgcgagcaatggtggaagtcgtcaagtttttttcctgaccgtacattttgagcgttcggtaatcccggttggttcgccgcaagtgctcgatactctccagcagcataccaccggttccgcaggcaggatcgtaaacggattcaccttcttggacatcgataatgagcccgatcaaatggacaaccgaacgtggcgtgtaaaattcacccgcctttttattagtaaggtcggcaaattggctaatcagatattcatacgctttaccgagaacgtcgggttcgactgcctcgtttgacagattgtattgggaaaagtgttcgatgaggttggtaagtagcgaatcaggaagtttttctttgtttgcccagttcgcgtcaccgaaaataccgtataggagctgctggttggctttttcgattcctcggaatgctttttgtaacgccttcccgacatttactgttacttggcgaacatcgttccaatgacaatcgtccggaagagaaaaagagtgaaattcggcatgggaagcatactcgcggtcaccacccgaatcctcgagtgcatgacgaagctcctcgtcgtacacatcagaaatgcgtttgaagaaaaggagtggaaagatatatgccttgaaatcagccgcatcgactggaccttttagtatccatgcagctttagcaaggtgttgttcgagtttacttagcggtaatttttccataaaattctgtgtgccacttcaatgttacaaattagtaacattagctaagtttccgccttaaactactctctgcaatcccaagcaactttgcagcctctttttgggttttgcttctccttattgcttcttgaataaccgacgtttcaacctgtcgcaaattcaatgtctcggaaacgactgtttgcagtgactgcgaagtcgtcgggagtatcgccaacacgtctttccggtcgatctcgtcgctatcggcgtggaacacgagtcgatgaattatattttccagctcgcggacgtttcccggccatagatacgccgttagagcctgcatcgcacgctcggtaaggacaatatcgtgcttaggagacagcttgagcaaaaagtacttagcaagcgcttcgatgtcttccttccggtcccgcaggggcggaatgtgaagaactagtcctgcgattcggtagtaaaggtcgtcccggaaccgcttttcagccctctcaatatgcaaatctttgtttgtcgcggcaataatccgtacatccgccagtaaatttttcgtaccacccacgcgccgaaacgttttttcttgcaggacccgcagcaatttcacttgcaatggtgcagataaatccgcgatctcatcgagaaacagcgtcccattgtgcgccagttcgaacaacccattcttgattttatcggcaccggtgaacgcacctttctcatgcccgaaaaattcggtctccagcagcaattccgggattgcaccgcaattgatatcgataaatggagaatttgtgcggtgactacgtcggtgtatttcgcgcgcgacaacttctttacccgtaccagattcaccaagcagaattaccggtgtgtcatcctgtgccactttcgtaatctgcttatcgatagcagccatttgttcggaggcgtagatgaacttccgttcggagccatgcgtctgagtgcgacgcagcatcaagctctcgatttgaccacgacgaattagctcaatcttttttagaatcaccggtagctggtctatcaattcctcttttacaatgtaatcgacgacaccaacggaaagcactttcagagcggttttgaccgattgcatcccggagataacgactaccggacagagcggctcattctcccgaatatatttgagtagttggaatcctaacgaaccatcctccataattttcgcaccatgccgttcgggaagcatcaagtcgagtagtacaaagtcgtattggtcggatttgagtttctccatcgcttgcgaataatggatcgctgcatcgatatcgaactgcgagccaaacgccttacgaatcgtctgccggtcgtattcattatcctcaaccaacaagatgcggactcgacaacccgaaccgtttccactcatagaacaacctcgaatgtcgtgccgacattgggttcactctcgacgagacgaacatcgccaccgagagattgcagtgtgtgtttgactcgggcaagtccgaatccttctgtatccttggtcgagaaaccgttattgaatatcgactcatgttgttcgggagaaatgccgcaaccgttatcacggatggtaaggcaagtctggttggactcgatacgagacgacaggactattatcgggtcgtcagtattgtgtaaactatcaccggcattccgtaacaggttaccaaaggcttctaccagttgttgcttgggtagaaatcgttccgttcgctgtaactcgtccagcaaaccatccgagtcaatgttcgttccatttaataccggacggctacgttgtaccgcttccaataatagttcctcgggagaaacgcggaacgattccagcagcttgatcagcccattcagtggaaccagtatcgaatcaaatacagcaagtgcacggtttcggacggtatcgaaactcgctcgactccgcaacagactggtaaaatcggatataaacgatggtatcacaattgcatgtaacgtatcgttgagtagtgttgtaaacgcgacatattcatctttcagttgtttgattcgtcgcgtcgcatcggcaatgcttgtcatcgccttcaactcgttgcatgctgcgcggattctatcgtgccgggttgcccgcgtctcttcgtacaactgttccaatgcctcgggagttagggattcgaggcgctgtgatacttcgcgtttccaactcgtcaatggcagtgttgacaaatcaaccggcggttccgctttttttacctgagtgttttcacgtggattcatgatgatcgttccgtgattcacgcccacgactacattatggtgtcctttattctctatcgacaccgaagaggtatttgtatcggtagtgtcgcttagcgcggtttccaattcaaccgcttgagtgcggtgcttgcaccaggcaagtaacgaagttgcgaccggttttgtcacgtacttggctaacacggcagcacccgcttccaagatttgttgcggttcggtaagtccggcagcgacaagtttacgtatccgttcgcgtccgagtcgcgggatttgcaactgtgcgagtgcgatacccgcatttggaacaccgtattgcacttgcatcgcgatttgatccagtgatttacgccaggaattgggataacccaatgtttttgcgagttctgcagcactggatagtacccatgcaatttgttccgccatacggcgaattgcacccaagtaaatttgataccttttctccaattccttattggtagaactaccgatgtaatcgttcaacagtaaagcgcttttacatgtttttgcccggttatactgatcgatgttgttactacaaactgaatcgaagattgccatgccattcgagccaatctgttctgttactcgcatcgtatattcgtaaccatggtaatggtattcggaagtggagaaattgacatatccttcttgaccatcggcagtcaatagcgcaaataacaccgcctccatgcacgaaatagcttgatcgtcccgttgcgataaccattgcttaataacgtgagccgtttcaacccggatgcccatgctgactaccgtggttccaaactcggtaagagtcagtttctcaccagtcgtaccggaaaccacacccgcgcgcaaacaataattcaggccgcaatccaactcttggttcaactcctcctgttgttgcgcatctttttcatggacatgccaactcaatgaattgcgcagatacgattttatctgttcggtggaaccaccaccgagtaacgagacaacacccaacactgtcgtcgccatcgaagaacgccagagattgggtttgacttcctccaattccccttccaaataaaatcggcgtatctgttcccgctccactatcgaatgcgccaacgcaatcgcacgaccgaattcatcctctaattggtagcgtccggcacgaccgcccatattctcgaactcacctttggataaatcgacggtatccaattttttaaactttggatcatagcgccattgctgcaattcaatgaacacatttcgggtgggaagattgacacccattgccaaagtagatgttgagactaacaccaggatactgcgattacggtagtggcgttccaccagctctcgttcctcgatggtcagatcggcatggtgcaatgcgataccgtgttgtaacagttccattaattcgtcgcgggaatgagtctcttccaaagtctccaattccgcgattgcatcggtcgcactcggcgcattgatccattgtataagcgccttcgccacaccgcgcaccgaatttttgtctttcaaaaaaagtaacgactgttcaccatcttcactgaattttgtcaccgccgcatataatacttcagcccgatcctccggtggtcgtttgagaatcgtttcgtcaccggtgcctggactgttcatcgtacggtaatgaaacacaccttgatagagataaccgattcgcagctccactgggcggcgctcgtaatgcaacaaatcgatatccagccactcattgaccaaccgatggttgcccagaactgccgatagtcctacgagttggaaaccgagttgctcccgttgcatgcgaagatgggtcaggatcatttccagtgtcggtccacgactgatgtccgccagcatctgcaactcgtcgaccactaccagacccaatttattgaggaacgttttattgcagttgagtaattgaaagaacttctcataaacgataatcgcgatatcgaatttaccattctcgatgtccgagtcatactccttatgatcacgagtcgagatcaccaccttgattccagacgacgaatacatctgacggaaggtctggaacttttcctctgcgatggctttcagtggaactaggaatgccgtcttctttttgttgattgcttgatacacggcggcaagctcaccgataaatgtcttgccggaggaagtgggcgcggagacgatcatgctgttgccgtcgaacagcttatgcttctgtatcgcttgcacttgaattggttgtaaggtctgtatcccgagtttccgccagttggcaatcatgtcctcgggaaaatcgtagcgactgagttgtgtaatctgcatcttcatctcatcaatgaatgtgtttgaacgtcaaaatctgacacttatttcatcgggtactcgcggcacaatccgacaacaattccctgtatcgaacactcggatgccggttttacaatgtcctggtggtcgggattcgccgctttgagcgtgaccataccgttttttactgtatggaaatacttaattgtcacctcgtcatcgaaccgcgctatgacaatctgccccttttcggctgttttttgcggtcggacgataactttgtcccctgacaggataccggcaccgaccatcgacttcccttcaaccacgagcacataggttgccccccggcgcacaaaaacgtcatccacaagcatccatccaatccggttctctgtcgccaacaggggcaaacctgcggcaactcttccgactacgggaaccccttgttgtttcaagatggttccggtctcatcgatgatatccaaccgtctaaacggtccgcttccgactttccgcagataccctttattaatcaagggcttgacgatattgaatgcggtcggacgactgatcgaaaaatggtcgccaatttcctgcatcgtcggagtccgaccatgcttctggaaatattgggtgatccattgcaacaattccgactgtcggtcggttaaggggatttcgctcattttttgcctcgttacccggttaccagagtatagctaacaggtgttagtataacaaacattaccggttgaggaaaaacccgttaaggaagccgataaggaaatatcaggagttacgatattggttacggctcagagaggtctcgtcaggttgctttcagggcaaagaaaaacgaagatttgatataaatatcggaggcggcaaaacgctaacctacacaatgtaattacaggtaaagcgagggcaagacattttttacagacctgagttcaagctgatttcacaggactccgcgtttttctgaatttttcgtacctgcaggtacggtttaataattttatccatacgcaacagcctcgcaatcctcataatggtgcgtggattgactttcttttgataaataccgttacgtaatgcctcagttgcgatatccaaaccaattcggttccgatgtttgaaacaatcgacgatcgtcctttccaacgaatagatgtacaccggagtatcctcaattaactgttgttcgcgtcccaccttaataatatcaggcgatgttcttgacacctgcaattggagaaagtccgttttgggagtgcgcatttcactaggaagagtaatccatatttcgttgggtatttgtgtcaataaaccgtgataccagagcgcagacaacaaagagatagtcgccttgggtatagtcagtgcaaccggaataaattcagcatgcatgcatggttggtagtcagcgacgcagtatagaccccggccaacccgcttcagtttgctttccttcactaaccgggctaaaacatctcgttggatatcctgttttactaagtcgcttacttgaacaattccaataagtttgataaaagtgagtatttcttcggctcggggcataatcctacattccgtactacttgaaagattaagtatgacactttgtaacgacggtttgcaatcttcgatgcgtaaactttgtcgcactaccgatgatcaaacgtccagttcatgatcgttaatcactttttcaaaaaaaagttgtatatcgggataattctgttcaaggaaagcgcgtaccgccaagtcggcaattaccttccgtacatatccggtaaatttaaccaaatcgaatacattgtcccgataactacttgtagcccgtttaaactcatcttccatttggtaaagttttcccgtcagttcttttctttgtgcttctgaccctacggtttttgtcggatgcgctttactccattgatcttctggagtggaaagcaccaaagttctggtataacgacgcgaaaagtcgttcgcggcattcaagagttcaacaatttcgatttgccgatgataggacacttttttcaactcttcacaagtcaacctcgacacattatgttgacgtaatagaccgataacggaaggagcgactccgatcagcatcgaatccattttacgcacccactcttttttgacattcagagtagcggcgattcgatccagactgaccccttcttgaatcgctttattgatcatcgtatgtgtctcgctaaccgtcaggggattgacccgtttgttgtaagtatagacatcatcgtcggtgccgattagacattcaaccgactcgatctttaactctttcagcgctgtccaacgcaagacaccgtccttaatgtagtagcgtccttccttttcgacgacgaccagtggttcgaccaaaccaatctctttaatcgaactgacgatttttcgataggtcgtgcataaatgacctgtaagctttcgcggaaacaggggatacagattattcaccggcaaggtcactgttccggtacgaaaagagatattgttcatgcggcctcactttttgaaaagtttgcaaacaggtcctgcaaatgcttccctttgagtttcggaaaatccgttaatttttgatttcgcagcaaagacacccaatcgggatcgttgttcaaacgagtgaatgcttctatcagaatcatgatttggttctcgtatcggcgcgacctgcgaacgaagttttcttgcttgtcgagagttcgtcgaatctctttacgcaatgtttcgatagataattcgccataaggggtcttgccggatcgattcgagttattttcctgctgaaaacgaagacgttgcttaattaattttcgcaccgccggtacatcggaataatcgaatacattgttttcgacgcaatcagttagcaaccgttgtaattcgggaatcggctcttttacgatcataaatgccgcactggcactcacttttccttgttcaaccgcctcgattagtaatttgtccccatgctcgattaataagagataatccttgatcttgtccggtgtacggtcaagaataacggaaatttgttcaatcggcatcccagtgtccgcgagtcctttaattacttgcgcgaaccaaatgggcgggggtgtcatccgtgtagcattttcagcgatggacattacatacgccgtttcacggtcgacatcgacggtcaaggcaggaatcgtcgtgtgtcccaatttttgaaacgcctcaattcgaccttgcccgcaaaccaattcatatttactatgttcagggatatatcgggtattcaccacgattggacgctttaatccctgtcgccgaatcgattcgacgttttcttcaaattttgccggatcgcgttgtcggggattgataattttgatcttatcgattttaatttcaatcacatcacgtaccgatttcatcgcaggttttctccttattgatatgtccgctatcgccgaataaatcgtacacatcgattattttgtcgaaacggtatgcatcgagatagataccattcgaccatgacacaaataacttgtcggtttccatggcgatagatgggaaacaatagaaatcgaggatatttcccgcatcgtcggcaagccgaactgcgagcgtaagatcgatgtctacttgccggtcaaaacgatacacccaacgctttttgccattgttgttgcgaatacttgatgccataagttgaatgttcaactggtcgttcaaacagagatgtgtgccgtggtcgaccacagtgagtcccatttccaccaatgcggcaaatacttcctgccacaaccgttcctcaatggatttcaccaactctttcaattcgaaaaaccggatatcatagggaggtacatatccgactaatttgtaagcattgaacagcgaaccgaaccgtttctttagaatattggtggagggcatttgtggtgtcgactcgatgatcagaccggtgagcttcccgtgcgtctggaatagttcctgcaaacgaagtaggatatcttgatcgctccaaaccggatgtcgtttctgaaatatctgctgcgcttcgagaaatgtgtcgggtgagacaatcgcttcaaacgcctgtggaaccaatacccagcggtcacgcggattcttgcgggtaggtccatgcagccgcgaagatgtgcggttatatcgtaaggtcccggtgtacgtctcatctcgaagcatcactcgtattgtattctctgtccattcgccacccccaggagaaggtattttccgctcattcagttcgattgcaatgtttccttcccgtagcccccgtctggtaaataaaccaaaaatatgttttatcgtctccacttcctctgcattaccgggcaccaacgtaacccgctcattggcaatcgctttccgctcaccatcgtgcaaaatgccaactggatttctttgctgatcgagccgcatcctttcaaaaccgtacggcgcaggtgcaccgacccggaacccctgccgcgcgatagtcagcgatccggctaacaccttatcgcttaaattcttcgagtactccgccgccatcgctcgtttcaacgctttaattaaagagtccatgatcgagttgtcgttcttgaactcttccgtaacataaatgatttccttaccgtgcttacggcaaataaactccaaatgcgccgattcgtcgatatcctggaaacgaccccaccgcgttacatccaatacaaggatgatgctaaaactcagttttccgccaatgacgtactcgttaatcaactccttaaaagcatcccgtttcgacatcgttagaccggatataccgtcgtcgatgaagtacttcagaatgtgaatgttatgatgttcggcaaatgcgtcaatcgctttgcgctggttcaaaatcgagttttcctgcatctcgcgggtcgacttacgcagataagccaccgcatgcagcttgagagtagttgatagtttgttatcgataaatgtattcatgaaagccgttagggacagtttacccttgaaaccgttaatcaatggaagcacgcgaactaagcttcgcgaagtttcccaaaccacaaggtactcatgacattttggacgataactatcaactagtgagaattttttacgactaaagagagcatgatgaggaaaaccaagtggcaaaaattattcagcaacatcgaacatggtaggcggttgatagaatttgtaaatatttgcttaaataataaaaataatcgattacaatacgaggacatcgcaaagcagctcgaggttgatatcgtttctgtacatcgataccgaaatcagctcaattgtcttggaattacggtgcattcctataaaaaatctggtgtgttgataaacacggatactctaacgagtgagacggtattatgctttgtgaagttataccaaggctacatattgatcgatgagtcattggtgagggcagagaaatttactgatttaatacattcatcgtcagtcgattccaacaatcttcgatctgtagttgatatgttgaaggccactgttgaatctcagcatgtggtaatacggaatcacacaagtaaaatttgaacagaaaaaaaacggatgcccgtcgtgagcatccgcttgtactatcgtgaaaatttattaaaccgagagcaactccaccaaatccttcttcgaccggagccgcgagatgtgcagttcggataccttgttaaagagtgccggacccttgagtgcctcggtatcgcaatcgggctccatttcctttatgatgcggacaaagtcggcttttgtccgagcaattgaaatatcacgctctttggcaagcttctgcaactcgactactgtcatttgttcgtaggggttttgcgccacgttcgattcaggggcaatttccggtgccgggttggatttgggcttgcgtgtccgcttcggtgcgaccggtattgcctccggtgcgactgtcgcagtttccgtagtcggtgccgattctgtcgtttctgccggttcggattgcaccgttgccgttgatgcggcatctggcttgggtttccgacctcgcttcttcactatcggtgctgtctcagtttcgggtgaagaggattcagcaaccggctcggatactgtcggttgtggcggttcgggtggttcggtcgtcgtatcggaagtggtctccacgaccagtgtctcgacgggttcgctgggtgtctctacggtttcctgtgccggttgagttgattcgattttatcgatccaggcgagcattgccggaatctcttcgccatcgtcggtgcgcagggtcgctttcaatccctgcaatgcgatgatgtttccttgaatgcccttgcgggagccaccggtgataacgacacggtcgccgatttgcttcttggttttggttgttgtggtactcatgctgttctcctttcaagagagtgttgagtgattgatttggatttgatgattacgattgagtgagcagatgctcacgcttccttgaatagaccgttgttaatgagttcgcggataaaccgttccgccaactcctcgtcggatattttctctgattcattgaagatccctttgtaaagattgggacctcccgcgatttcgatggtgtcgaccagttgccgcagatactgccggaacggaagcgaccgttcgaagtatccctgcgtccggagttgttcgacgatctcgacggcagtgccgacgaagaccgcattttcattgacgagttcgtgcttattgatcatttgtgttgcctccttgcaacgttgaggatttgcttgcgatagaaatcaggaatacaccagtcacggcaaccgtcaagtatcgtctcgaggtatccaccggaagggggatagtaaccgttacggtcggcattcattatgtacacccacgctttcgtattgtgattgtttccggatttgcggagcggtaaaattttgcggtgatacaaccggggatatccttcaaaccggtctagtgcgtcgaggtcggatttggtgagcagatacaacgcaccgtaaacacgatgtccttttgctggttcaatcgatgccaccccgcgaaagacaagccggtagttttcgatataggcgacgcagcgaggcagatgccccgggcaacgccattccatatcgtcgagattgagattcgctccatacgcgaaatagggaatcgtcgctttattggacattggcgacctccgtattcttttgcggcttgccatatcgccatgcactattgcccggcaggttcttaagcaggatggttcgtgcggttttgaactcgttgcccttcattcccagaccggcaaccatgaagacccggaagttgaacttgggattgtcggtttcaattttggagtgagtcgtctttttgaggtcgagggcttttgccgacattgcgagcaccagttgaatccaggaagtaattcgttctgagtttaaggaggcttggaaataccggaattcaatcgtgtggattgagcggtacaaattgttgtaattaagacctcgatagcggctctggtcatagtgttgcgggttttgattagcatgtccataccatgcccggttcaaatcggtcatcgtatccggtttactctgaagcaaccggtcgatgaactcctgctccatcggcttagtgtaatgtgctctgcgttccggtgaggtgccgatcgcttggaagagtaaatcctcattgcgatagaccatcttcgccagattggttaaggactgtgcggtatgcggtgtcgcatcgacatgaacatgcacggagcaactccgatgggcgatacagccgattcccttaaccgcgatgatgattaattggagcgtcgggatatcgtcgtaggtcagaatcggcgatacaatctcggaacccttgtgaccgcggatggttgttattgatgcatcgttttggactcgccagatgcgaccatcaggttgcgtgaccagcgatgcttgaaaggttccgaactcttgggtgactcgcccgttgacgatagtcttgatcgcttcggcgattcgcttccgctcgcatccggcagtctctatctcgactccgaacttctggttgtgtattgtgtatttcatgataatgccttgcgttggatttacttgttggcaacaccttaagcgcggggtcttgcgaagtcaaggcaaggcaataaccgttaaagccgctactgtagcggcttgtaggttagctaactagattgggaaaggagagattatcgaacggttgacagggtcaaacgttaggtcgaaagcgctcccatggaaacgcgggacccgggtcaatcttgcgtccgggggctatttcattatgaccgaccagccactggattgggtgctcttcgcggaggagcacgagcagttgctcaagagcagcaagctgtagctccgggaacgactgccaatattcggtgccgatcaataccggctcatcgccatcatagcgttcggtataatcattaggccaagcgaaaaaggattcatcgcgcagcttgagcggaccccagttgacgagttcgattccaatcgaaaaggcattgacactcggacgaccctgccattcggaaacaccagcatgataagcgcgcttgtcgtccggcaccattcggacaatgcgtccgtctgtgccgattacataatgcgccgatactttatttgcggaattctggaaccacgcaatcgtatcctcaatgctaccattggcagtataatgaatgacaaccgtgtcaatcacgatattccttggtcgggaatatgcgttggttcttgccgcaggaataaattcgatgtcgtccagagtcattttgagtcatccttctttaatgaggtcgcaattttctcagcactgcgtccgacgatatagccaccgattccgatattgagtaacgtccacatctgctccggcaccggcacggaggtaatgccaaagatcggtgcaatcacaaagttgtgagcaacgatgtatgtaaacaccaacatcaagagcggtcgccagttgcgctgcagccaactctgcccttgtacctctgcgaccagtaccttcgccttggcatcgatctctttttccagcgcaccataatcgagtgcgagcatctgcgtctgcaggtcgtgattcagtttcgccgcaaggtctttatccgacactaacttgtcgatgatgccttcggctttatcgataatttgtcccacaatggggattgctgtgagaatactcatcattcacctcaatgatttggatagaaatagatttataacgagtgcgatcaatccaccgtaaagtggcgtgaataatacccagagcagcttcgtcatcatgagccggaagttagtattgcgatccatctgcacaacgagcccttcctttccgttgcctttgatcgcatcgtttaattccttcaatgcagcatggacttccttgcgttcttccttcgcttccgtttgcacggtttgaatcgattcttttaagtcctgcagttgctgtacaatctgctccactttagccagatggtactggcaggaatagggtggttcgagatgttcaccggaagtgtgttcaaattcactcatgcgatgctcgtaataatgccattagtgatttcaatgttaattattccgccccagggattcgatacttgtatcatctgagtaataccggtttttccgagtgcatttagtccattattcacattgagcgggacattggcattcagtgccgcaccattatattgcaacgcctctccggtcaactttccgagggaggcggggtcggttaccagttgcccgcttgttacacaatcattcgctaactgtgccgtgccgattgtcggaacaccaaatccaccgatgtgtttgcagatctcttcgtaaaacacggactccgaataaccggtgacccgattaccatattcgcacttcacacaatcgacatagacttgtccggcaggtttatttgacggatcagaaagtgcgaacgagagccggattgaagaggtgttataggggagtttgctaatgtcttgtaccaaataataccggataaactgtccattaccggcagtaagctttaaccattcgatggtgctgagttcattgccgttgttatcataggaagtcagtaatcctgaaaattcggttccggtgataattgcctgggcgaagacgtaagcggatacgacgatagcatcgcgcccgtgcaccgggatcggattgctgcgtccggtgatgacattcggtggcgcagaatcaccaaccaatcgcagtgaactaccaccaaataccgagtaatcggtcgtcgtatcgaagaaactcatcagacccatgctcccgattcgaacgatgggttctgcaccaaattatgtgcatcgaatgctgccagtgcagtcgcattcagtttgttggtagttattgcaccatcggaaattttggtatcgattactgcgccatcggcaagattcgctgtaccgaccgcagaattagcaattttcccggcagtgacagaattacttgccagcttcgatgcatcaaccgcattattgactaggtgggtagtatcgactgaatcacttgccagcttactaccatcgacggcattcggtgcaatctttaccgtagtaactgcgctactcgccagcttgcttgcatcgatggcttgattcgcgactttgatagcggttaccgcgccatcggcaagtttggtgtcattgatggcggcattggcaatctgtgtattccccaccgcaccgctagcaattttatttccagtgaccgcattcgcatcaattttctgggtagtaaccgcattatcaacaaggtgagtgttaccgacttcattgctggcaatcgaagtccctttcaccttgccatcggcgatgacgtaggttatcccgccatctttggtggtggtaagttcgattaatttgcgaccactgggaaccgcatcgttccaattcggagtacccttgagttcctgcagcgcagtggtaacattggcatcggattgtccccctttgattacaccaacggtgaccaaatcgcgggttgcgagttgcgataattttttccgtactgaataagcaatcgtgaagttgacaaccggtattaccgagagttcgatccatgtcgagttattgctgccatcgccgtcgttgcgggaccaaccgggacccgacccgtgcggatcactcccggcagttatcgcattggtcttattctgtttctgccagagcgcgaccaccttaatcggattgccggaagcatcaagtaaatcctcaccattatcggcgcgcgtcagatcgaacatactgtcccaactatcgccgatgttaccgatattgatatctccggtagtaaaaccgggacggtaggtcaagtaagtcggatggactgcggatttggttacatctttatcgagcaggggaatcgcgatatccttattatagatatcggtgtagaattgttcgatccggtcgtcgatggaagcgccactactggtctggagtgctgtggttaccttgccagaagcggaatcaatgagcttggtagtgccatcggaagcgaagaggtcaccttggaaatcaccatccgacttcaatttcgaaagtttcgtgaccatgccgctgtttagccggtcttcagtaagggtgctttctgcaactttagcatttgtaatcgtaccgtcttgaattttgatactggtgaccgcattatccgcaagtttggtattatcgactgcgccattggcgagcttggtggcatcgactgcactatccgccagtttagttgtggtcacggctgcggactcaatagagtcactcgtgatccggtggtcggtattgacaccagcaaccttcttgaagacgacaccgtcaccgaccagatcgagcgaatcgttctcctttagagtatagtcggagaaggcagtgagtttgtccccctgctccgctttcacaccatcaataaatagatcgaagttcggattcgcactcgacttctgaataccaccgaattgcagtttcagcttaaccgttccggttggaaccggagattgatccaaccggtaggtctggtagaaacgggtgaatccggcattaatcgccgattgtaaaacccagtcatggttaccgagcaaattaccattcacatcataaaacagggtgcgcgctacgatgtatccggcagtgtaggtcttgatatagagatagcacgagacagtgactgccgagagtccggtgacatttacaaaattggttttatccggatcggtgagcaatgaagccatcgcactatcggtagtaatctccatcgattgggtgccgaataacttttcagttgttgaaattgtgatttgatttgccatgtcaggttatcctttcaccagaccatttgttcaaaattgccattaataattaaatttggttccgctattgggcactgcggagttgtcactgaaatgcggtgtgaaggtttacttttcaatcgcagtccgcaggcaacgaggtaacattcgtactgtgtctccggttgaactgcgggaagaataccggaacgtgcattacgtcccgggataattactggcacaccagccgcatcgacatcttgacgctcggcatacaattcataatgagtgacgccgtaatcgttgcgcagcgaccacttgaattgcagaccaatctcattattcgctaccactgacgatacctgtgttaacaaaggtgtctccaccgcatcgccgagatagcgggtgcgataatttccgggctcgccaacttcgattcgataacgcgaaaacacgaccagcgcaggagcggtaaagagcaatgcatagcgactgtcgcgcagtccggtgatggtgagtgtgccatcggttgccactgtcactacccgcaccggcagcgagcaccatttcccatcgcgttgcactcttgccagcaggtcatacaacactgcgcttctgcccacgggaagaccacttaatgtcaatatccggtctgccattagttcgctcccgttggcatagctgccgccagcgcatctaattgctcttgagtcggggcttcggcaatggcgcgttggagagtaaagacctgttcggataaatcacgcgttacttgctcacgctcgatctgtttgatggtcgtcatcgctttgcgatcagcatcggcaagctgtgctaccgtcttgccatcgccactctggagcgcatcgacggtaatggcgagactattgctccagttgctcacgacattgtactcggacattgaccgaacgaacagtagcaatcgttgtcccgggtttacttcgatggagaacgactcggtgcggacatcggattcatagagtagtttcttaccggtgagtgtggtgccggagatgggagcattggtaagtggtgataacagcgttatggtcttggtgccgggatcgacagtgcgaactattccgctttcgttaccgacgatgattcgttgattcggttgaaaagacatagtgccggtatagatgatttcactcgtagtggagccattcccaaccgttgtggtcgcatcgtcggtttcgatctggcggcgctgtttagttggtgattcatttacacgaacgatggcatcggtgtgatttgcttcgagcacagcaactgatatatcgaccggtagcgatccggtattgggcaacaattcatagacacgaacgagatattgcacgatctcttcgtggtcgaacagtaacggttttgtccaactaaaaaataatacatactggttgctttgcggttgggagataactgcggcactatcgccgatcagattggtagagtgggtctgttgttggagcgccagcgaacggttttgctccttgccggatttaaccgcatcgatgccagccagcattccggtaatggttgtaatcgaaccaccaaaaccgatctccgggacatcggaaaaataaaacactgcattggcaatattgccggttgccgtagtggaaagtgtggcatgagtgctatcagtgactgccgaaatagtaaattcgagtggggaactattcgcccccggatcgattagggttcgcttgccgatataggaactatcgaaactggtgccgttgccaaccatcgcctgtgaaccgcttgagagagaaaccgttcccggtaggcgcatattcgataacacaccgttgcgaatcaagtcattcttggtattgcgcacttcaaaatcaaaggagccaccgggcaaagcggtattgccgcgcagttgctcgaaagtataacctgcgatttgtttggcaatgaccagcgcgcgcagttcctgcagcgacgataagtgcgccgatatttgctgactcgctattgatgccgcttgatacgaatcgagtgccagcgatagttcacttgatcgttgactggtcgggtacagtttcagttgagcattcgaaagcgaaagcaccggtgcgtttggttgcgaaggaatcttgcgggtgagtagcaactggtcaccattgccatcttggaagttgatcagtccgttacgtaataaattccttagctcgggataaactgagagaatattttccacggtaaggccgacaggtccatcggcacctccgatgcgaaattccgaagcagttgtatgggtatcggtgttcggtgcatgcaaccgttcatcgatcaatagcgaaactggctcccgcagatcggtaaccgaaccatcggtttcaatgtgggcgagcagtacctcaccggattgcggggtgttgtcggtgcgtgatacaatactaaaggagtcgtcgccatagatgttgtatttgtcgccagtcagaaagtgcgatacttcgtgacttgatattgtcgtgtattgtaaaaagacataacgattcgctgtcgattgaaaggatgtcgtttctattaattcaatccgtttgcaactgatataagcgacaccggatgcgcagaggtagtcttggattcccttggaaacaagcaatccccgcaccacaccatcactcaccagatcggattgcatggacgacagcgcttcctcaatcccgtcttgctggtactcgaggtcttcgatggtcggctttataccggagaagtatagtagtttcttcatttgcttttcttagtccacgaataatatttgcgtttgggtgtgcgcgggtttaaagtcatatatcgcttgttgcaattgctcgcgccggtgttccggcagtccattgctgccaatactcaccgtaaagcagaaattccagaccagctcactggcacggtagacccgattctggcggtattcgacatagtcggttttaccggcatcctcttcggaaaagagatgcgtcagattgatttccgcttccagcggttgatcgttaatagacagcaaaatcattccctgcgggtcggcataactttcgacgatctcccggcagacaaaaccgtgcgattcaattaatgcctttaatcccggcttggtgccaatccaccggcaggtattcggccaatcggtgagccgaagagccagtgactcattcgattctaccggataacggcgagtcccgcgtccgagggcaatggtatcgagatcgctattacgttccggcaatgcgtaataaccatcgtccggctccactacctgcgcataccatgacaaccgaattctgcggatatcgcttttcgcatcgtcgagcacttctccaatcgccgagagtaacccgtacaaagcactattttctgtgtccttttgtttgcggataccgggcaacagcatccagaggaaatcgccgatcacactcatcagtagaaattctcccgcttgagtgccggaacggattcgccatcggtggtctcgactggttcgataatgataccagtgtcctggtaactgcgtcccttgaggaaatgctcgatagtaagcgctcccagttccaaaaattcagtgggaccacagagcagatcctgcgcaggcaagagtaatcggacgttgtacacgccatcgatattcagaatcgcttgcagcaagcgcgcaactaacaatccctcacccaacagcaatttgtcagtgtgaatttgaatcacttgacgcgctgtattatcgatggtttcacgatcggcatcagagaagcgccatacattgaccgatacgtcgatggtgcgcttgctgggacccacgacccgtacgtcactagtgagtggtttacgttgccgcagatagagcaatacatccgacaacaattgcgatgatggcatgccatcgacacccaagaccacaactccaaccgtcccgggtccaaagggaaaatcatcgaggatctgtaccgaccgaacacccgggactgacaatgcccattgctcgtaggcggcacggttaccaccgacaccgattgcctgccacgcaagttgggcacgcttgcgcaatgcaccatcagtctcgatgtcactcccctcgcgatagagggttgataccgttttcccatttgcgagtaaaaaatcgtcattgatgacactggtaattccggagatcgatgtcaccagtcgcgtaaccgttccactaccaatgttgtaagcagtgccaatcgcttccgcttccgccagcacccgaacgaatgattcatttgcaggaattgtcgccggttgtatcgtcgaaaaccggtattcattaccggatgaatcagctcggcttttgacaatattacctgccggaatcgtcaagggatttgctgatgccgtccgattgaatgtgatccagagttgcgctttattgccgggcaaccgttcgactccgcactcgcgtgcgcgcaggtcgagccattcaccggtggcgctcatcagaaagccctgttgtgccaccttgaatacaaagttgtacagcgatgcgatgacatacgcgaaaatctccagcagattgcggattccgctcgaggtcgagaaattggtgaatggtgttttacttgcaacccgttcaatcaattcatcgcgaatgtcagtgtacgatttcactttgttgcattccgtttcaaatcatcgatactctttattccataaccccaaacgagtgtatgggtgtcttcgtcaccgaccgcttgaaaacttgcccgaaacgatttctcaatactttcaaacgagatcgcttccacccgaatcgtcgaggcaacaacgcggggatcgcgctcgatggtctgtgtgatatagcgctgtgccagtgcccggttgagcggagtgtcgttgcatcctagcataccaagcaatccgcaaccgtattcaggatgcggaaatagttctcccggtagggtgcgcaatgcatcggcgagatcgtggagcagacagtcgcgtccggttacgagggcaaaatctccagtcgccgaaacgacaaggtcgccatcattatcgaatgctaaatcggtgccgagatgctcaaacataaaaaatcctacattattgctatacccattgttacccatatagacccattaaatttgcagtcgcggtacttattgggtataattggatataattgtgtatcaaattggattacccatgtctatcacactcactccccagattgtccgactcatcgctgaaatcgatgagttcaagggttactggcgcggagtttcttcattatcgaccgatgcgctgcgaaccctccggatgtttgcaaccatcgaatcgattggttcttcgacgcgaatcgaaggggcaaaactttccaattcagaagtggaaatgctcctgcgcggcatcgatattcattctttccgcaaccgtgacgaagaagaagtcgccggatacgctgatgcgatgcgattgataaccgagtcgtttgctgaaatcgacttgaccgaaaaccacgtgaagcaattgcataaaattttgcttgcgcattccagcaaggatcagtggcatctcggcgaatacaaacagcatcccaaccatgtctcggcattcgacgaaaccggtcacgaagtcggtgtgattttcgaaacatcttcaccgttggaaactccgcatttgatgcgcgaactaattgccgatatcggacaacgcttaagggcagaatcggaacacccgttattgacaatctccgagttcacggttcgttttctcgccattcatccctttcaagatggcaatggacgcgtctcgcgcgtgcttaccaacctattgttgttgcgtgccggatacgactatgtccagtacagttcactcgaacaacaaattgaactgcaaaagcaggactattatctggcgctacgaaagacccaattagacctctgcgatcccgcttggaatgagttcttcctgctcacactcaagcggcaaaaggatcgtttactcgagcgggtcgaatcgcaacgcgagcaacagtcgttaccgattcccgaagcaattatccgcctagtcaaagagcgtggtcgtattacgatgtcggatgttgtcagccattaccggttcaaccgcaacacgatcaaaaagcatttggaagccctcgttcgtagcggacaactgataccgcacggaaaaggacgtggtgtttattacaccattgtctaaagcgacaacaagacaatgaatcactccgtcttagcgacctgcgataacagcgagtcgctcattggttcgatcggtggtgacgtcggagaaccgagattgcctgtatgggtgtgggtgttgaaaaaagtcataaatgaatcacctaacacgactttctcctgcgcactcgcacccaactcgacatgcggtgacgacaacggtcctaacagatcggaagaacatgtgcagcatttttccatacgtttggtttcttcgatagttaggcggaatgacgtcagaacatgatccaacacacacctgtggtgcgcaccagaatttccgagacactgattcggaaattcgcctaactcttggctttctctacctgtcattgcacagaccatgttcagactaacacccgcgacactgccaggttctcaccagctcccaatgcccgtagaatagtgactctgcgattgagttcggcactgcgtcgttgtaactcttgtgttttcgcaccgacactgcgaccctctgcgatggtttgcgaaaattttccggcatgttcctactattcatcgggtagtatctccgccgatggacctaaaccgatcagagccggatcgattggcactggaactttgccgcctttcgagtacatccgtacttgctgaataatctcgaccgcatactcggcaggtgatttcggacctgccgcaccctcgccatcaaccacccgttggtcacggtttacacggattgccgcaaggtgccgcgtgaacgcgcgtgatagatcgtcgatagtcgaactggaagcatcgccccacaacgcacgcagcaaacggatataggtaatcgcggcaagttgcgcatgccgcaggtcgctcgccttattcagatcggggaagacctcgtacaaatcggcaaggaacaaatcgaacgctttcttttcgcgctcatcctgtagctccggtaaatacgcaccatgaataacagcattgcgatttcccggacgcgccatgatcgcgccttcgtatttgccaccatgaaaccggcacctgccattcgcctgtgctggttgtcggcattgagttcctttcttcgtgacgacaccacagacggtattaccattcagagtacctgtaacacctgagcgttcttgcgtatctggaaccagcgcagttagcgagcgcgccttgacgcggtgctttttactggaagtactgtcattattggatttcttcattaccggtttccattcgaatcatggtggtgaatgaaattctttttgttattctcttcagaccttttcgtacctgattcagaccttataacctgaggtctgtactcgcattcgctgtaggaatcggacgttgcgatggcgagcagacctctgcacaccttatcgtataacctgttctcacccgcgcgggcacaggcacgcacgctcgcaggaggggtacaatcgaggtctgctgaggtctgcatacgaccggaaaagcgcatccagtaaggattccggtgtgcagaccttgctgcatacatctgcagaccttgacggaatgacaagcatttacctgcgttcaaggtctgccgcacaaacggttgagtgcgctggttcatgcattctccggcgtgaggaaataaaaattgtagcggctctgactcaccccttcggtcgcctgccggatgcggtaaccggcgaagttgcggtcgaccattctgcgcagggcatgtcccagcttggtctgttgcgagcgggtcgtaccgtcgctgcgcaaggcagcgagcaattcattcgtttcgcagaattcattcaactcggaaatcttgactggtttttcccggtacttttcccaccatgccgagacaaattctcgccagatcgcatggtcgggatcggcagattcgtattgcgactgcagattaccgagaaaaccgggtatcccaaccacatcgagaatgccaccgatcatttgcgaccaatgctcgaacgaaccgagcggtttggtatagggcggcatgcccgcatcgacccatgcctgaatgagtactaggattgcgtgcaccaattcgcgtcgctgtttgcgtacccatagcggcaaatcggcatgtttaaatttctccctcagccacggttgctcgaggtgaggatcgatccggcagcgcaccatccgccggattaaatccagcgacatcttcagattgttgccggtcataagccagagtgcatgattgcgaatcgatattttagtggttgcccctagtaagcggtcagaccaaaccgttgaggtcaaaactgttgccagattggtactgttgagtgagcgctgctcgttaatattatcgagtaagattatggaatcgtctttcagcaattcggcagtgatcgctttgcggaactcgtcttcgtcattaggtattgtgcgggcaccggtaatactgccggtggcaatgagggaaataatgttacaaagcagccctttacccgaaccgggcaccggcgattcgatcaaatggagtggcgaacaaccttgtatcaagggtcggatgaatggttggaacaatgccgctaccgcatgcgcgcggtcgctgtcagtaacaaacggaaaatcgaccagtaactcatccagtaaataatcgcgcgccgatttaatttctttcggagagggatgcgatggcacagcaattccggtgagattgtccgggaggtgaacatagagatgttcctccggataataaccgggggtattgagtaaaataccattggcggcaaagaccggggtctggacaatatcgtcgaaccacggaatgcgctcatcgatttcccgcgtaatgtcgcgcgcaatgtcgtgcggtggttggctgtcggagattccggtttcggtcatacgaacccaacgggcacaccggaatagcagaccgaagatatcgacatcatcgaggatttgtggataagctttgtcttcggtagtattgattttgatgcggatgaggtgattcgttcgccgaaaaacgcgcggtggttgattcgcagcaatgagtgcgtcccaagcatcggacaagatcacagaaagttgccggttgttgacgacaatttccggcaaatcatttgcaggttctgtggtcgcttgccgcgttggtagcggtatacctgtttgccgggaaatccattggcaggaatcgcggaaatgtttcgctttaccaatccgaataaggaaatcgaagaccgagatcgtttcaccggtgagaaaggaatgaaacgatccacgctcgatagtaccggtgccggtcgccactcccgccgatggattgcggtcgccggtgggggaagccgggtcgcggcattccaaccattccgcaccggattgactgccagtcaataaatcaccataaacatcggtcagtgtgagtttctctagtgcagtagttcgccattcgtcccattccgatgtggtggtctttgtcgggtgtggcgacggtgtcgttgcggtgttccgacgggtgggtgccaattctggtgaattgcgatggtgtgccgttaatgtctgttccaactgtttcggggaaacggtatcgaattgttccggtagaaatggatcgagttttcccaacatggatgcgatataaaattcgttaccaccaggcgctgcttgatgccaccatgggagccatagcaaattgccatagccttcgggtttgattgttgcttgtttcggaaatacctcgatgccgcgattcactttagcatcggcagattcgccgttagcgagtcgtgcatcttccgggtaaagcgccagacccagttgtcttgccataaatgccggaaccattggttcgaataaaacccacaggtgccacccttgaccaccacccgagcgttcgatgtaagaaggaatcccaaaatcgtttgcgcatcgctgtgacaataatactgcttgtttgggatcgaccagtccattgggatgttccggtccgccatcgaaatcgatgcaaagccatttcgttaatccttcggcatttggtgtgtaggaaccaatgcgaaagtgtccagtaactttcgttgtcccccggctgtggatcgattcgatagttactttcggaagttccttaccgcgaacatgtgccgccagaagcgcggggagcaactcaccggcgagcgccggattcggtttgccagagccattgcgaaacgccactttgtcggtgcgcgagaagaaataatgctgcaataattcgacacaatggtcacgcatgattttgccttgcttcatgaatagttcccaattttcggatcagttcgcggtacaaatcgtcatcgactggtaacggcagttgttcgcggtacgcattcagaatcagtagcaatgcatctgcttcctccggcgtcaattcgatacaaatcgttgccgtcaattgcacattcggttttagctcactcattcgaaacaccctgcccgatccgcgacggagcaagttccttttcatcggtatcttcagatatgtgagaattggatagactcattttttactgctttccattttaatttctgtgatggcggtttgaatacgatcatgctcgcgttgcagacgttccagtcgtaaccgttccgcaaggacgaggtcgcgggtccgacgaattgattccaattcacgaatctgctccgcagccatatcgcggatttggatcagtcgcttagtctgttcaaacttttcgtccactccattgcaccagcacatttcgatttccctatttgtctgcgacgtaagaattgattcatcgcaagtgtccgaaacgactaaacgcaatcatcgtgccaagattgtccggaatgttgtaagtactggaagatgctaatggtgctggtttccgggagtcgttaatgtgaggaatatcataacccgctatgaaccggagcgcctattttgctcgtttttaggggtttatccaccgctcattttaggcactgtcaagcaggcattgagttagagaccgcttattttaggcggtggatatttttttcaccgctatgaagtgttactgattacagaacgaccgccgaaaatgaacgtttttaccaaaattcagcgctcattttgaacggtcgtcagacagggcttggctttgcgaccgcctattttaagcggtggataactcgttttgttttccgcagtaatacctcctcttgatttcctcgctacttaccgtttctgattacatcaattctgtcataaaaaaaactggcacgccggttgccttaatagagtgcagtattgattgatcggaaaaaggtaatgaaaaattcaaaaacattaactgcacacggaatacaacagaccgagataaaactcattgcgatgtatcgcactccgaacgaagaggaaatggaacgtcagcatctcgcgtttcgagtgttggcaaaatggtcattgtctacagcgttacagcgacagtctaatgcaggcgcacgcaatcctccggcagccggagcgcccgaccccgccttgacttcgacaccccttgattgcacccttccagcactcaataacgattcaactggaggagtacgataatggttctgagtaataacaactatcatccggcggtgggatacttgagacgttccaccgatcggcaggaacaatccatcggagatcaacgccgcaccatcgaaggttacgctctcaatcatgggattgagatattgaacttctacaccgacgatgcgattagcggagcatcgaccgatggacgaacagcattcttgaaattgatcgcggacgcgaaactgaaatcgtgtccgttcaagcaggtcctcgtgtacgatataaagcggtttggaagagtcgataatgacgaggcgggatactaccggcatcaactgaaaacacgtggtatcgagatcatatatgtgtcggagggattcaacggtgacgataccgacgatttactgcgtccggtcaagcaatggcaagcccggcaagagttgaaagacctgtcgaaagtaacgatacgcggattattgactcgcgccgaaggtgggtggtggctcggtggagttccaccattcggttacgatctggcgtattattctcgcaccaacgagtacctctgtactgtgcggtttatgtccgatggttcgcgtagcatattaaacgagcagggagaattggttcgtgcggttccgaaaggagactcactccaatttaccaagcgtgaccgttctcgattagttttgagttcacctgagcggattcaacttgtgaaa

SEQ ID NO: 539 - DNA, 43555 bp, Artificial Sequence
  Synthetic Oligonucleotide
gtcttccaccttatccaggtgtttgacgccgtctttggccatgatgtccgcgctgatgtagggatcgtaggcatagacgtccatgccaatgcctttggccattttggcgagaaagcggggcacatttccgaagccatggagcaccagcttcttgccagccagctcggagccgcttttgccgttgaacttgccgcgcgccatgtagatcatcatggccagcgccagctcggcgacggcgttggagttttggccgggggtgttcatggccaccacaccgtgggcggtggcagcggcgaggtcgatgttgtcatagcctgctccggcgcgcaccacgatcttgagttgtttggcggcgtcgaagacggcggcatccactttgtcgctgcggatgatgagggcttcggcatctgccacggcggcatggaagtctttcacgtcggtgtagctttccagccagctatggggatagccggccttgtccagttcagccttgatcttctgcacggcttccgcggcgaagggcttctctgtggcgatcagtacttttggcatattagcctccctatgtatattttatttctggtttcaagactttattttagtgcgttttatgtcaatgcaaatctctgtcatttgagcagcagcatacgccgtgactgcacctttccacccgcttgcaggcggtagagatagactccgctggagaccgggtcgccggaggcgtcgaggccatcccaggtgacggtgtgtgagccgcgggaacgatggccgtcgctcaggacgcgcaccaactggcctttgaggttgtaaattgcgagccggacggagccttcggatgccagttggaaacggatgctggtgctgggattaaagggattgggaaagttttgcagcagggcggtgcgcagggcgggagcttcttccgcgggattggagacgttaccggtggagacgtagctgccctggcgggtgagtgagccgcggtaaacggtccagggccggttgtccttttccgcgcggcgcaggttcagcaccagcactccggtggaatagccgctcaccagcttgagccagccgtcgccgtccagatcgcatagcgtggagggcgtgcagccgttgaagctggtctggaatggaaatccgtccaatacgctgccgtcgtggttgaagccataaaccgagttcacatagctggaaacgaggatttccaggttgggatcgtcgtcgaggtcagcgatgatgggcggggtctgcagcacggcgccggtctgcaccgggaagccgggaaggtctattccgctctggctgaccgcgtagagtgagccattggcggtgccgaacacgatatccagcgcgccgtcggcattgatgtccgccagggcggggctgccgcccatcgcggagctgatcggcttgctgaagaccaggctgcctgcgggcgttgccagatgcaggtggctggaggtgccgaaggctatcctgcggttggcgaggatggtgggcgcgccgttgattgcgccggagacctggagggggaaacccgccaggggagtgccgtcggatttgatcacgtgcagcttgccgttggagcagccgacgatgatctcattgccgccgtcgccgtcgatgtccgccacagccagttcgctgtggaaggcggagccaaggtcaagcgggaagcccggcagcaggtttccggaggaatccaggacgtggatcttgccatccagggagtgcgccaccacttccatcccgccctgccagtcgatctgggcgatcacgggggtgaagaggaactggctgccgccatcgtaatcgaaaagcacttcatcgcctgccagtgccagcactttaccggtgcggctggtgagtaccagagccggttcctggccgtcaatcaactggccataggcggcgctgcgcatcacatcctgctggagaggcgcgggaatggagccggtctgctgccctgcgttatccagcagatggctgttgccgaaattatcggtgtaaagtatgtcgaggctgccgtcgccgtcaaaatcgaagacgatcggggcggatttgctgcccacggggcaatcccagggaaagctgccgtcaatgagggtgatttcatattcgagctggaatctgcgggttccagtgctcaagttggtgacgggatgcagcgattgcagctccagggtgatctgatagctgccataatcgatgccggacggaagttgcacacggaaatagaggccgggatcggcggtctggcctggcaacaactgtggtatcaccagcgggtcgctcaaaagctgcgctccggctggcaggccgctgagggtggcggtcacgttgtgggccgcggcccaattctgatggttgctgatcacggggtggatgcggatgatctcgccgggattgatggtgccgtcgccgtcgccctccacatcgtcgatagtgtagctttccaggctgagcaggggcagggcggggtcaggcagtttgacctcgatggaaggatcgccaaatagcaccatctgatagtagcaccagcgcatcacgtcatagctgatggcggcattgaggttctgctcgcgggaatagctgagcgcggagccaaactgggtgttggccgtttggtagagaccgatgaagtagtcgcggtcatagaactgggaggcgccattggtgttgccgggggaataccagccatagcgggtgtttccgaggaaggcaaagacgccgcccgaggctgtgagcatgtgttccgcgatgctctcgccgtcgccgctggtggcctggtcgaaagcggcgggatagcagccctgggtgtaaagaaagccatattcggtgttctggagctgctggatgctgccgttgctctgtcccatcaggaaggtttggttggcgtgtcccatgtggttcatcacgtggacgccctcgttgatggcgttccagacgccctgctcgctgtaggtgccgtcgcgctgatacatggtgcgcaggtggtacagttccgggacgctggtggccacttcgtccttgtaatctccgccccaggtgagggggttgttgttcaggttttctccgaacatgatggcggtgttgttgctgaacgtggaattgctggtgtagtattggattttgcggatgatgttttcaaactcgggttgggtctcggcgggaaagcgtccgatatgcacttccggcagcatgtccacctggtcctgcggttcgccccagatgtcgtttccattggcgttccagtctccatccagattgctgaaatagaggtcggtaggcattctgagatcaaccgtgtcgcccacctggccgtagcagccgcgcaggggcacgatctcgtcatcgccgcccaggatcacatattgcagaggctggggggtgcttgcccaggcttgataggcgtcgctgatgaaggcgcgcaccttggcggcgttgtcggttccgggatagctggcatagatatccgcggtctggaatacgccggtgctgatgtcgttgccgtcacgccagttggcatagctttgcagccaggaggaggcggtggagttggtaatgatgaccatttggcgcggagtggaaaggtcaatcaggcggctttggggagcgtggttccgatagcgggaagcctgctggtagctggccagggcctgggggttgagggcaaatccttccacagagcgggcagccagggcgggggcgtagaagttggcctgttgggtggccagggcatcatcccatccggtttctatctcgatgctgaattcggaagccgcgtgaatctggcgggaaaccggattgtatttccaggggaagaggtccagcacggcatattggaggccgcgctgcaactgggtgcccagataacggtgattggcggccgggaacagcgcgtcgctctgccagatcgcgggatcgggctgagtagcgtccggacggggctgcgaagtgggctgctgctggcgcgcgtagtccagatacacgccatcgcgctgcaacaggtaaggggagctttgcacgctcacgttgagcaccttttccccaaaggggatcagcacccgcacggggtaatagttgagcgcgggaacgccgggctccagcaggggtgccgtgggctggccgcgcaggctgccatcccaggcggaggggtcaacgcttacattgagggtgagcgccaggctgattccgcagagcagcgtcaggccgatcagggcggtaagttttttcataatctgtattccatcttggtttatcgaaatgtagtcgaaaaattcttatgtgagaaatggcagaatcagtcaagtagttttttgagggcaaagaaaacagacgtctgggctgcgtttgtgatctgtgaatacctgcggaagacaagggatatgaaccaatccttagaacaatgctgccctagcaatttcagctcgcaatgggcgcctcacgctgtatatccggcgccttataaattttaaagaaagaagttgcgaatatggcggacttgtttaaactatcattctgtaagctgtttgttttgcgtctttatgtaagggcagcgcctgcccgcgggacttgttatcttttccaatctatttgaaaaggagtctttttcatgaaacacacggctatgctactactgctgctcgccaccagcctggcttttgccaaccctgtctggactgaggacgtcgtggtgcgggaagcgcaggatctgagttacactggctgcacgcagcaagcagatgacggcagcctgatcacgctctggacgcagatactggatggagaaaactgcctgatggcaaaccggatcagcgcgctgggcgaggaggtgtgggattccccactgcgtatagcgggttgcggcctgggcatcggcggagagcagatgaagagacctccggtctctgtggcaaacagactttcccacccctgggcaccggatcccgggtcaagcacgcttgcccatgatgacacggtatatagtctggtagggtctgtttcggggtctggtggacttgtatccaccattccaccttttcaccttttcacaaaatacttagaataatctccataatccttcatagcgccctcccttgctgctactgcgtttggtgccatcatccttaggtcatccctcaccgggttaaggatgaccccaggaagacagagacttagctgtctcgcgcgcgcgagagcggactgacaccagtcttagttttttgcgcccttgttttagaattgatttatccactcagtgttagagatagcctgattttctgccagaaaaggaataagctcaagtccctcccggcatttcctccgtgccagatcgtaaaatccgtttagattattcaatatcaagccttaaaaggagtatccctatgctaacagatcaagagatcgcgcgcagcgtaaccttgaaacccatagatgagatcgccgcccagattgggctaagcccccaggaactggaacattacggcgagcataaagccaagctcagctattccgcgctggagcgcatcaaagacaaccccagaggcaagctgatcctggtctccgccatcacgccgacccccgccggggaaggcaagaccacggtcgccatcggcctttcccaagccctcaaccagatcggcaaaaagagcatcgtcgccatccgcgaaccctctttgggccccgtgtttggcatcaagggcggagctgccggcggaggctggagccaggtgttgccgatggaggacatcaacctccacttcacaggcgacttccatgccgtcaccgccgccaacaacaccctcgcggccctggtggacaaccatgtttactttgacaactcgctaaatatcgatccccgccgcatgacctggaaacgggtgctggacgtgaacgaccgcatgctgcgcaagatcgtcatcggcctcggcggcagcaagcagggcttcccccgcgaagacggtttcgacatcacccccgccagcgagatcatggccatcctctgcctggcaaacaacatggacgagctcaaggagcgcatcggcaacattaccgtgggcttcaccttcgacggagaaccggtctatgtgaggcaactgggctatgaaggcgccatcgccgccctgctcaaggacgccctcaaaccaaacatcgtgcagaccaccgaaaacacagccgccttcgtgcacggcggcccctttgccaacatcgcccagggcgccaacagcatccttgccaccaagagcgcgctgcggctgtcggaatacactgtcaccgaggcgggcttcggtttcgacctgggcgcggaaaagtttttcgatatcgtctgcaaatatggcgggctctgcaccgacgccgtggtcttggtggcaaccgtccgcgcgctcaaggtgcatggaggggtcaagctcaaagacctcgccacccccaatcccgcggcggtggaagctggcctggccaatctgggcaaacatctggaaaatatcgacaagttcggcatgaagtccattgtcgccatcaaccgcttcgcaaccgacaccgatgaggagatcagattgatccgcgactatgccagctcccgcggattcgattcatctgtggtggaataccacgcccggggcggaaaaggcgggctggacctcgcccaacaggtggtggatatggtggacagggaaatctgccactaccacgggctttacgactgggacagcccggtggaagacaagattcacactatcgcccacgaaatctacggagcggagaaggtggattactccgcggacgccaaagcggacttgaagaggatcgccaaattcggcttcgacaagctgcccatctgcatcgccaagacccagaagtcgctttccgacaatcccgacctcatcggacgccccaaggacttcctggtcaccgtccgcaagatagtcatctcgagcggagcgggcttcctggtgcccatcaccggagagatcatgcgcatgcccggcctgcccagacacccctccgccgaaaccatctccgtggaagacgatggcgacatcagcggcctgttctgattaaccctaaagaccttgtgccgggacactaaaaacttaggttccggctttttttgcccttatcgccaaggcgcggatcgacagggtctttgaaggtggaaaggattatagaacgcggataacaggatcaacaggatatttaaggtgaaacagcgaaaagaaggccacgaaacaagcgtcaccaagctacattccgtgtcatcccgggcaagccggggtcctcgacggatcggttacgatccggtggggtgaaatagcttgacccgggatccagtgcccaggggtggcaaagtctgtttgccacagagaccggaggtctcttccaaacaggcaactccgttgcctctgccgaacagacttcggcagcccaatccgcgccttttatccgcgtatatctgcgtgaaccgtttgacccgggatccagtcttttgaggctccaaacagccatcctgtctttgaaaaatgccttccaaaaaataaagattcaacctgccgatatttttcttgacaaatctactaaaacccatccagtatatttccaaatgggaaacccatcatagggaggaaaaaatgaaagccttgcgaaactcatttttgtgtcttatcctgctctgcggagcgatggttttgggagcgcaggcgccccagtggcagtgggcagtccgcgcggggggaactgactatgaagaaagcatatccatagcgaccgacagccagggcaaccagtacatcactggtatgtttgatgaaatcgctacattcggcagccataccctgacgaccagcggtggcggtgatatctttgttgccaagctggatgcctccggtaattggctctgggcggtcagggcaggaggaacagagaatgactggggattgttcatcaccgtggatggagccgacaacgcttatgtgaccgggtatttccagaacacagctaccttcggtaaccataccctgacgacaaatggagagcatgatatctttgccgccaagctggatccctccggcaactggctttgggcggtcaaagcagggggtattgactgggatataggaggtggcatcgacgtggatgaagcgggtaacgtttatgtgacaggatacttttgctacaccgccactttcggcagccataccctgacagcaagcggaggcgctgatatttttgccgccaagcttgacccctcaggcaactggctctgggcggtaaaggcaggagggtcaggcaatgactttggaattagaattgccttggatggaacgggtaacgcttatgtgaccggattatttcaaggcacagtctctttcggcagccataccctgacggcaaacggagaatcggatatattcattgccaagcttgacccgtcaggtaactggttatgggctgtaatggggggagggaataacgatataaatgtatttggcttcgttgtggatggctcgggtaacgcctgggtgaacggttctttttatgacaccgccactttcggcagccataccctgacggcaaacggagagaaggacatcgttgttgccaggcttgaccctgccggcaactggctttgggcggtcaaagcgggaggaatagactatgataatggctatggcatcgctctggatagtgcgggtaacgcttatgcgtgcggttctttttgcgaaaccgccacttttggcagccatcccttgtctgcagtcggatggatagatatctttgttgccaaacttgactcctccggtaactggctctgggcgatcaatgtgggaggaaatgaatatataaataacgctggatctggtatcgctgtggatggcgcgggtaacgcctgtgtgaccggatatttttacgaaaccgctactttcggcatccataccctgactgcaagtggagaatctgatatctttgtcgccaagttgggaagcggaacccccgtggaagatgaactcgctccgcaagcggttgccaggctgcataacgcctatcccaatcccctaaacagagatggaagcgcgctgatcaaagctgacattccggaacgctcctccgctacactgagcatctttaacctgcgcggacagatcgtagcccgccacaagctgggttccggttcgcagcagatatccttcagcggggaagggcttcccgcgggggtctatctctacagcctgcaatgcggggactaccgggaaaccaggaagctggtgcttttgaagtaagataaaatggtggaatggaaccgtccgcgttctgtttccatttctccttccggctttagcatcataaatccgtaaatcggttaaatccgtcaatccgtataagattggcatgccaggcatcatacggatgaaacggattacacggattaacggataatactgtttagcttgcattattacaattgaatacaattatactattttacctttccacggccatttcaaaagactggatcacgggtcaagcggttcacgcagatcagcgcggataattgaagggctgccgaagtctgttcggcagaggcaacggagttgcctgtttggaagagacctccggtctctgtggcaaacagactttgccaccccccctgcgactggatcccgggtcaagcatacgcttgcccgggatgacacagtatatagcttgatggacttgtttcgggggaacctttccaccattccacctttccacctaaaaaacccctttccacggcgatagccaagatcgccatcggtaaaggcttggggggcagagcgaggttttttgttgacaaaaaagggctgcaatttgctattgcatcctgtcctgggtgattagctcagcttggttagagcgctacgttgacatcgtagaggtcactggttcgagtccagtatcacccaccaccctgattgttgggtgattagctcagctggttagagcgctacgttcacatcgtagaggtcactggttcgaatccagtatcacccaccactttcccccgcaaagcaacccggtcagagaaatttcttgacagaaagcttgcggagatatctactgttcatgttaatcacgagcaaacgaaagaagaggcaaaatccaacattatatacggaacacaggcatttacgcggtatgctgctgttgtgaataatatattttttcttacaccgagatttggagcatagctaatgatcaaagaaatgggacgtctgaatctggacgactacaaaataatggacgcccaggtggaaaagattttcaaaagcctggacaagggcaaacgggaacaggccatcaaggaaattgaggaaatggccaacacggcgaactatttcgtgcgcgaagaaatgggcaagaggctggccacctaccagggcaaggggcccttggacgagatttgcgccgaaatgctggatgatttcatctacggtatccgcgccacggcgctgttctatttctattacaagaggcaggacgacccgcgggtgatcgtgaagaccctggaaaagaccgtggagaccgttccctgggaaagcgagaccatctgtttcgagctatggaagaactatcccgaggtcatgaaggaagagatgccccattgggcgatgtctcccaacgaaaacaagcgttccatgtccatgcacggcatggaaaacatcgcggataaaaacccgcaatacatcctcaccttcatcggcaggctgctggacgacgaaagcgaagaagtgcaaaaaaagatcggccacatcctcacccaggtgggacggcaacgcccgctgcagacctatgccaatatccggcgctggctggtgggggccagtgaagaacgggtggacgccatctggcagaccctgcgcaaattgggcagcatcttcagccaaaagaaccagcgcgacaagggattcgactttatgaacgtcaccaagcgggtgatccaggaatggaaaaacgatcccgaccccaacgtggcgcagatgagcaaccgcctgggacaactgctgcgtaaacaatgatccacgtaatcctggtggaacccatctatgagggcaatgtgggcgccgtcgcccgcatcatgaacaactttggtttcaccagcctgcgcatcgtgggcagcgtgcccaaaaagaacgacttttacctggccatgcactccgaacatatcctggaggaggcgcaggtctttgacagcctcaaagatgccagcgccgacctggacaggctgatcgccttttcccgccgcgtgggacgctataaaccggtggatctgaacccgccccagatggcggactactgcgccaaaatccccaaactggagattggtctggtgtttggccgcgaaacattcggcctcaccgacgaagaggccgacctctgccccctgcgttgccacatccccgccaatcctgcctttccctccatcaacctcgcccaggcggtcaccatcgccctgtggcagatctacagcctccccctgcagggagcaaaaccgcggcagttaagggcggtggatggaaatgaacttgacagaatccgcaactatatgcttgatgtaatgcgcgactgcggttttttccgcagccacgagaccacgaactgggagcttttcctggacaagatgctggcacagctcaaccccggcaagatgatggtctggcgcctgcggcagatgtttaaccgctggcacgtgctggtaaccggcaagggaaagggctacggccaggatcaatagattgcgcggggcgattcagatgccccgcaagttatgcctacaaggaaacaagagatgatagcactcaccgccgtcacggaaatgaatgaacgccagttggaaatcttttgccactgcgaaaagtttttcttcgaccacgaaaaaccagcgttggtcaacaaatatgcccattatttcaccgaaggctatgacgcctttggcattagcgaagaagagatgaaacagctgcgcgacgaagtcctgtcaaaatgggagcccagcgtgcaggaactggcggaactgggcaggcacttctttgccacgggaaaatatgagttcggctcgctcgccatcatgctgctcaagaaacaccgtccccgcttcgaccgcgaggtatatgagagcgtcaaacgcttcaccgaggagtcccttgccaactgggcccacgcagacctgatctcgaccaagatcacccccgtgtttttggagctggagatagccaacatggaggatttcgcggagtggcggagttcgcccagcaaatggagccgccgggtgtccgcggtgaccatgctttggcagcgggggaaattgcctccggccgagctgctggactttatgcgccccctgatgtccgatccggaacgcgtggtgcatcagggcgtgggctggtttctgagagaactttggaggctgtttcccactgaggtggaagaattcctccttgaacacaaggacagcgcgccgcgcctgatcatccagtatgccacggaaaagatgagcaaggacaagaagaagcgcttccgcaagaccacggcgcgcgaacgctcccaggaccgccagggcaaaaagaacttcgcggacaagcggaacttaaaaaaccgcggcaaatcccaaaacaggcaggggttcaaatcccgtcgccgttccgcggacgatgccggcatgcccttcaggatcaggcacacggaggaatccgatgaataagctttgcaccatcttgctgctgtccctgcccctgctgctgtggggtggaaacctttccctgagcgtcgatctcggcctgcccgcctcctccagggatatggaactgcagggttggggcagcctcagcgccccgggatacccacaacttccatataagactataaatgtgatcctgccacccgcggcggaggaactgagcttcagctacaactggagcggagcgcagacctctggcctgcccgccccggaacgcaacggagcctttttgggtggagaacgcctgctggacagccccgcccgcgaagcccgggccggacaggtgcactatctgggcaagggacgctggggcgacgtgagctacgcccgcttccgcgtgctgcccgcggtctggaatggaaactcctggcagggttacagcaggttggaactcgatctgaactggagcgaatccgagcccgcgcccaaccgcatcccgcctgtcctggcagaactgagcaaatccaacgcgaacctgcgggcgaacttctttgccaatccccgtgatctggacaaatggtatcagcccccggcaggcaaaaactacgactacctgatcgtcaccactcccgcgctctatgacgtgttgtccccgttggtcagctttcgccagagccagggcctggtcacctccttcgcggatatctccgtgatcctggcctccaccccgggcgccaacgcggcggacaagctgcgcaactacctttgcaatcaatataacagccatcctttcacttatctgctgctggtgggcgatcacgacaccgtgccggtgatgtatctgacgccggagccggatggcggcgatacagtggcttccgacttctattatggtgacctcagcagtatcgtggacacggacggagacaaccgcctgggcgagtattcaccggttgaaggagtggatgactacctttgcgactataccccggaactgtttgtgggacgcatttcctccaataatcccgtccacgtgtatgacgttgccaaccgcaccgtgctctacgagcagagcgacgccccctggaagcgcagcgccctactgcccgctgcctacctgaactacggcggcgaaccggaaactatctatctgcagacggatggcgcggactttatggaatacgccaaagccaccgccctggcaggattccagaataccaccctgtacgagcaaaccggctggctgccctcccatccctgcgatcatcccctggactaccaaggactgcgaaacctgctcaacacccaaagctacgggctggtgaactggagcgcgcacggctcttccggttactctgtccgcaaggtgtggatgaacgatgacaactccaacggcttgccggacagttgggaaatggagtggatgagcatggtggacaggcagagctttgacaacctgaacaacagcgacggcacggtcatcttcatggcctcctgctacaacggcatgatcgacagcagtcagcagtgcatcgcggaatacgcgctgcaaaggaaggctgtggcggcgatggcggccacccgcacaggctggtacaagatcggctggcgcaatcccggctggggagggctaagctcctataacctgcactatctggaaaactttgcccgcaacgggctgtcctcgggagcttcactggcctgggccaacctcctccacacccaatattacctctttggcgatccggtggacggcgggggaatcatatatcccgaactgcaaaacgtttacacctacctccactacggcgatccagccatcggccacagcggcagccagatccagcccctgggcgaaatcctggtctatgaaccctcccgtcatggcggcttgagagtggtggatgcgctgaaccagatcggcgggctgaacgtggtctataccgataagctgatcccggattatgactatatcaaccgctttgaagccgtgttttgcctctttggctggggcgacgccgcctatgtcccgcatcccgattccctggactactcgctgctgcacggctatctgaacggcggcggcaagctctatctggaaggggatgtggcctggaatagccaggatcctttctggagcaagttcggcgccaacgccccgctgaatatgttcaccaatattgaagctgtaaaatgctatcaggatggcgaagcctggatctgggactacaacccccagtccaaccccaacgcgcaggtcttgctgcccgccctgcccgccgccgagaccatcttcagcacccacggcgccgcctccgcggatgccagcatcggaatcctgcacgcggttccggagcatagcaccatcgcctcctcctttgctttggcaggcctgcaaaacggcgagtgggaactgaaagacatgctgggcctcatcctggatcgctttggcgttttggaatacgtcaatacccaagtggacgagccacagataccgatggtgcaaacctccctgcgcggctatcccaaccccttccgcagccagaccagtctgcgcctggaactgcccgccaaagccagggtggacttgaacatctataacctgcggggacagaaggtgcgctccctggcaaggctcgacctggacgccggcaagcacgaactcaactgggacgggcgcgacaactccggaaaccggcttgctcccgggatctatttctggcgcttgaaagcgggtgacaccctacgtcaggggaaactgctcaaactggccgactgacctcccccacgactccccaatactatatatggataggtgcgatatgtcttgttgcaaaagaatcttcctgctcttcgccttgatctttgccgtcctgagcctcagcgccgccggacttcccgccgccttcaccaaaggcggcaatccatccctttacaaggaactgcacagccttgccaaagagaacctgaaacgcctgcgaaacgggcagggaaaagcctaccgccgcttgctgaaccggtacccggatgtggtgatggcctatctgctggcctatgaatcggacgctaacctgcaatgcgccgctcccgcggatgtggcaagcaactaccgggagatagtcaaactgcttgcggagcaaggctgcaaacacagcccggaattctttctttcctatgtggcggatcagactgtatccgatgaacgcatcgaggcctaccgcgccgcgctgctggatgacggcctgcgccagatcatgcgcgactccgtcgatgagctcgagctctaccgcaagatctcccaatggtgtgtgagcaaactcaagtttcaacagacctccgggcgcgaccagtcgcccctggacatcacccgcaggagcatcgtgggacgctgcgaggaaatgcaaatcctcttcgtggcagccgcccgcaccgttggcctgccatcccgcccggccagcaccccctggtgggcgcatatggacaacaaccacgcctgggcggaagtgtggctggacaacgcctggcactacacgggagacatggatgccgcctactatcccgatcagacctggtttagcggcatgatcgacaagacggtgctgatccttgccgacggttcccttccttcagaacaggacgaggtgctgagccgcggccgctacgactgtgtgatcaactcggtgcgcaactatgccggggaacgcgcccgcaccatcaggatcagaaccctggacgcgcagggcaatcccctgggcaaggtgccggtgcgcgtgatggtttacaactggtattccctgcgcgtgctggcggagtttatcaccgcggaggacggttctttcacgctcagcaccggtcgcggaggcttctatctctgcgccagcctggatggccgtcaggcgctggttcccgtcccttccaccgagcaaaacgagcttgatgtcgatctggttctgaacgaaggccccctgccacctcaagatatctttttggagtatccctccaaccccttcacctggaaacaggctccccctgagtgggatctgggcgtgaaggaagccaaggctctgtgggacgggcaggatagctcgtttaccgagcggggagcagcctgcgcggacaccctgcaaggcaaggtactgagcgcctgccggggcaatcatgccgcctgggaaggctttctgaagatgcagccccagcccggcccggactttttgaactatctgctggagagcgaccccaagttcctctggcaggcgaacgcggcgcagttcgcggcgctctatcagaactttcagcgcttcgatgccggacagttgaatccggaagaacagtcttcgctgctctcgccctcagttttttatgaagagctgccccgcccctttggcaagccagacagccccagcctctatcccacttcctttgccaaagcgggaaacaacgatctggagcggctgcacaacgccatgcgctggctgaagaaaaagcaccggatcgaccccgccaaagccctgcgcggcctcctgcccctggaagaggcatcccgcagcaagtatctgagcaactaccaatactgcatcctggctgtcagcctggcacgcgccaacggcatccccgcccagttcacccgcatccccgacctgatctatgtgctggtgaacgaccagtggcgctattgcaatgtccggctctgcgaatttgaggatggcgggaagaaggattctgcctccagcttcaccctgcgggtgcgcactctggatgaacagggcgcccctctggacatcgatccccaaaacctttccctggcacgctggcagaacgggctgctctacccgctcaaccacaaattcaccgccacaggaggcggaacggccacggcaaacctgccccggggagaatactatctgcaggcgggctaccgcgtctccgacgccaggacagcttaccagttgcagcatctcactgtggaaagtgagcttagccttgacctggtgctgcgcgagtttccccgcaaatgggaagaactgccggaagactccgaattgcgccccctactggctgaagcgggagattgcgactgcctgctgatcggcaactttgaccgcgaaaacagcctgcgcctggcggagaagctgaacgcggagggagtggtattcctctggctgggctatgaggaagctgccgccgcacccgccaattaccgggtcagccccgcctggcagactctggtggcggcagatcagatcaattcagtgcgcagcctgaccctgctacgcaaggacggcgtttggcaataccatcagggcatctgggaaaagctgccccgttaaacgttctttacagcttgccgcggctgaagcggtaaaactggttgcgcagcgccttcacgtgcattcccgtgatagatttgcgcattttgtccggaggatggatcaccgagattccgtccgggttgatgccgccgatctccaccaggaaagcgcccgtgtagtggatgtggaaaaagtagttgcgcgcgttgccttcccttgaactggggccggtggcaacctcatagcgtccgccgccaaaggccttgcgcgtctttttggcataggcctgggcaaagcgcagcagcgagtcgtaacgctctttctggctggcgacggagctgtcgatggcgggcaaaaatatcttttcggaataggctccggtggcagaactatggaagaagatcgccagttcaaaattgttttcctgggccagtaagacgctcgccttcacctctgcttcggacatcggagtgctgcctttgaaattctcgtgcgagcccggcacaaccgcgccctgttcccaaaacaccggatagttgcggttgaggtccaccccgtccgtccgccagtccaaacctttcctgccgtctgtttcctgattgtttttccgtttgaactgatattgcccgctggtcaccacccggtagccttccggattgagggtggggatgatggtgaactcgaactccgccaggatttttttgatcttgccggagtgcttgtaattcaccgccagttctcgtgcccatgccagggcggtttccacacccaaaacctcgcttccgtggtgctgcccgatgatcaggactttgcgccgggcgtccggtgtgccgatgcagagggcgtggatgggcagcttttccgtgccgctgaagccgatcacccgcagggtcaccagatcgggatgcttgctggaaagcgcctgcatctctttttgcaaactttcccaagtctgatatcccttgggaaggggataaacgttgccaaccgctgcggcaaaagcgctcgcgctcaacgccagcaggggcagaatgagtaaaatactgtatttattcatcatgagaccaagctgccgcagccccgcatttcgtcaacaaaatccgatcttatgaaaagtagtggaaaggtggaaaggtgaaatggtggaaaggaactcgtggtgaagtggtgtcgtggtgacgtgtagatggtggatgcagcccagaacaagcccccaagccccaaaaccgtgtcatcccgggcaagccggggtcctcgacggatcggcaacgatccggtggggtgggatagcttgacccgggatccagtcttttagaaacaaccacccagccccgaaacaacctccccacagactatatccgtgtcatcccgggcagacggggtcctcgccaaagcgcgtagcggtttggcggggtgatttgacccgggatccagtcttttgaagcccaaaaacaaccaccagaatcccaaagcaaccgccccttttataaccccaatccgcgctcatctgcgcctctatcccgtatatctgcatgaaccacttgaaccttgatcctgtcttttcaagtcccaaacaagcacccagaccaaaaacaaccggcatcatttatttgacaaccgcaaaaaatatccaatacattccgcaatatccttcacacctccctcctttgctgctactggctttggtgccatcatccttaggtcatccctcaccaggttaaggatgactgccggaagacccacgccggagagggggatgcaaatgaggccgccctctataatatataggtgctatgcccgaaaggtcatggaaggatgaaagcaaacgcgaaccgccaaacccaaatttccaattgacaaatatctgccgcccagatattggttcagtaaggtaaggaataaactatatgtgtataaacagcaagaagataagtgataaatataataccctgaatagaacaaaagcatttgcaaatcagcagatgctttttttttaccccggaggatagcatggatctggacaagatcataaaacttgccctggccgaagacatcggcagcggcgacatcagcacccagtatctggaactggaacccctcaacagcaacgcctacatgatcgccaaggcggaaggtgtgctggctggggtggaagtggcgaaagccgtgttcctgcaggtggacggcggcctcaagatcaccctctaccgcaaggacggagaccgcgtggttcccggcaacgagatcatgcgcctggaaggcaaagccgccagcatcctgcagggcgaacgcaccgcgctcaactttttgcagcgcctgagcggcatcgcaaccctcaccgactcctacgtccagcgcctcaaaggcaccaaagccaggctgttggatacccgcaagaccactcccctgctgcgcggactggaaaagtacgccgtgcgcgtgggcggcggtttcaaccaccgctttggcctctacgacatggtcatgctcaaggaaaaccacatccgcgcctgccgcggcatcaccgaggccgttaaacgcatcaaacgccacaacaccagctacaagatcgaggtggaagtcacctgccttgaagaactggaagaagccgtgaaagccggtgttgaccgcgtcatgctggacaatatggacctcgcccagatcaaagactgcgtgaaaaagttcggctcccaagtggaactggaaatctccggaggcgtcaccgcgtccaacatccgctccctcgcccgcaccggagtgcagtatatctccagcggagccctcacccactcatataaatctttggatataagcctgctttttgataaggagtaaaatatggaagaacaactgcgcaccctggttcaaatgcaaaaactggatgaccgcatcggcgctctgcgggtcctgcaaaaggaactgccccagcagcttaacgaaatcatcgggcatgtggaccaggcaaccgcgaatttgcttgcctgcgaaacagaacgcgccgaactggccaaaaaacaacgctcgctggaaagcgacatcaaacagcatcaggaacagatcaaaaaatacagcaaccaactctccgaaatcaagaccaacaaagaatataaggccctcaacagcgagatcgcctttctcaaggaaaagatttcagagcaggaaagccaccaactggaactgatggatgccgaaaaccaggccgcggcgcgggtgaacgaagccaaacaggaactggacaaagcggaaaaagctaaaagcgaacaggaaggcgaactgcgccgccaaatcgactcgctggaaggacagatcgaggatctgcgcgcccaacgcaacaccatggcacgcaccctgcccttgcagatcgtgaagctctatggcaacatgatcaaaaacaaaggcaacctggcggtggtcttctgccgcaagggcacctgcggaggctgcggtttcgtgatccgcccccaagtccgcatcgagctgcagttgcgcaaaaagataaactattgcgaaagctgcggccgcatcctggtggaaccgtttgaagacagctcatcccccaatgcggcggattagccccgtccttttctgctaaaggcttttgagccactatgcttggctactttggtgtccgaaataatggacggcaagcccgtttgccgcggcaaaagtttatgagcaaagttgggcatggaaaggccaaaaaagcactttaacaagttaacccaaacattatacttgacagatttatagaatgtaggcattagaatttaagagccaaaatatgctggcataccatagcagtgaaagactatatattaagtgattatataacgactgatggcataaatgtctctatcggcctggaggaagagtccgccggtaaagactcccgaaaatcggtcaataattagaaacaacccaaatagaaaacgggaataaggagatatcctatgagaaaaacccttcttttcgcgctgttgctgatcctgggcttcggcctgatcagtaatgtctatgcccaggttaacgttaccataggcagcgggaccagcaccaataccacaaccggtgctccagccccctatggaacctactggaagaatttccgccagcagttcctgctactggcctcggaaatcgaggatgccggcggcggagcgggcaacatcaattcagtcgccttcaatgtggccaacctgaacaactgttccccgatgccgaactacaacatccggctcaaacacaccacccagaccaccctgaccaccgcgtttgaggatggggactaccagaccgtgtacacgcaggctgagtatatgcctaccgttggctggaacacccacaccttcacgacccccttcgtctgggacggcacttcgaacatacttgtcgatatctacacctccatcattccgggatcctggacccagaatgcctctgtttattactccaccacagctttcaatagttccctgcgcttccaaagcgacagcgctgatgccagcaccgccaccagcggaaccacaagcaccaaccgctccaacatcagattcaacatggaagccctggtggttaccgatccgcccaacccggcgctgctcatttcacccgcggacggcgctgtggacgtgatgagctctgctaccctcaactgggcttccggcggcggagcacccactggttacaaggtgcattttggcacaaccaacccaccccccttcatcgaaaacaccattgaaaacagctacgcccccaccctggacctccacaccacctactactggcagataattcccttcaacgccattggtgacgcggcaaactgccctgtttggagctttaccacgggtggcccggtggtcatcatgaccaacggcacacagtcggtgccggatggaatggtctattccttctacgattcaggcggccccgacggcaattatcaaaactcagagaactacaccttcaccttctcagccgccaaccccaactcgatcatttacgtgttgttcacagaattcaatacggaaaacagctgggattacctgaagatctacaacggaccggatacctccgccccgcagatcggacctgctgacggctacaccggtaccactctgcctgaagagatctttggctccaacgctgtgaccttcgtcttcacttccgacacctctgtccagcgccccggctggtcggccttagtgactgctggaaatctcgaccacgaccttggcgcgaagagcatttccggtaacagcactccctccgtgggcgatcccactacctacacggtggcagtcaagaataacggaaacaacaccgaaaacacctacaccgtgaagctgatgggcaccggaaacgtggagctcgcctccattcccggcaccaccatcgctcctcagcagaccatcgaattcggcctcacctggactcccaccgaaaccggcccgatacagatttggggtgaagtggtgcttgccaatgacggcatcgctgccaacaatcaaaccttgcctctaaacgtggccgtgcaggcagcgggaatcgtggccattaccctcggtgacggcagcgctgtcggccgcatgcccatggacatgtactggaagaactccctgttcgaggccatttacctgggctccgagctcaacattggtggcctgataaccggcatccagttctacaacgacttcgtcagcaacctgcccaacatgcccactaatatttggttaggcgagaccacccagaccgatctgtcggctggctggatcccttcaacccagctcaccgcggtgttcgccggtaacgtcgattatcccagcggtccgaacaacatcaacattgccttcaccaccccttacacctacgcgggcggtaacctggtattgctggtggaacgcccgatggataccgaatggcacaattacaacgataacttcctcacccagactggggaccttgcggcccgttctctgaaggtccagtcggactcccaggactacgatcctgccgctcctcctaccggtacaagtccctccgctatgttccccaagaccactttcttcctggtcgtggacgacatgggcgcgcttaccggtaccgtgcgtgacgcgaacaacgttgccatgcccggcgctacggtttccatcactggaacccccctcaccaccctcaccgacgccaacggcgtttacaacttcccctacgtggcgatgggaccccagagcgtcgtggccaccaaacacggctacaacgtcgttacccacaacgtaaccatcatcgaagatgaaactgtcacccaggacttcgtgctcacccaactgcctcaggtcaccgtgaccggccgcatcgtgggcagcgaccaacccacagttggcctggctgacgccaccatcagcctcacaggttacgagccttaccaggctacaaccaacgccagcggccaattcaccatcactggcgtctatgccagccagacttacgaatacaccgctcaagccatcggttaccaagctgccatcggccaagccgtggttggcaccaccgacctgaacatgggcgacatcaccgtgaacgaactggccttccctccctgccaagtggttgccacagaagcagcggactattcgcacgtaaccgtcacctggatggctccggatcccaatgctcagggtatctccgaagactttgaggaatacgaagacttctccctcaccttcgatccctgggttctggtggacgttgatcaaagcggcacttatggtatgaccggctacacttggccgaacgtctattcccccatggcttacatgatcttcaaccccagcgctgccactccgccggttaccactattaccgcccacagcggaaacaaaatggctgcctgcttcgccagcactgatgctgtcaacgacgattggctgatctctccgccgatgatcgcgaccgcaagtcagttcctgaacttctacgcgaggtcctacagcgatgcttacggcctggaacgcttcaaagtgggtatttccaccggcggcactgcccccgcggacttcaccatcatcagcggccccagctacatccaggcgcccattgaatggacactgtacagctatgacctcagcgcttacgctggccagaacatccgcttcgccatccagtgcgtttccgacgacgccttctacttcgtggtggacgatgtgagcgtgggccccgttcctacagccaaggaacactttgcctccgcttcctccttcagctcccgtaataccaacacccagagcttctccaccagttcaattgttaccagaagcattggaaacgcggcttcggcatcccgcaacgtgggaaccagccatgccaataacccccgtattcaggtaccagacttccagatgttcactccttccaattcggaccgcgtacttggtggatacaaggtctatcgcctgcttgctgacaaccaggacaacgagtcactctggacgaccctgaccccatctgtcattcccagcactaccaccacctataccgacaacgcctgggccccgctgccttccggcgtttacaaatatgcagtcaaagctgtttacaccaacaacgtcctgtcccccgccgtcttctccggtgagatacacaaaggcatgatgggcaccctgaccggtaccgtgaccgaattcggcaccaacgtcccgatcgaaggagctaccatcaccgccggcgattacagcggcacctccgacaacaacggacattattccttcagcgtctatcagggagtttacaccgtcacctgctcgaaagtcggctatcaggccgcttcccagaccggtgtgagcgttaccggactgcaaaccaccacccaggacttcgtactcacagagatcaccctgcctccttgcgcggtggaagccgtggcagtgagcaacagcttggtcaacttgacctggatggagcctggcactggcggcggcgaatggatctactacgacaccggcgaaaacgatgacagcatcggcctcgtctccggtggtgaattcagtgtcgccattcgtttcccgccctccgctcttaccgactatgccggcatgagcctccacgccatatccctcttcccaggcgatgtgggcacctactccctgcgtgtctggaccggtggcaccgccagcgctcccgaaacccaggttgttgaccaacccttcaccgtgcaagccgtagacacgttccaaaccgtggttttggataaccccgtgcttatttcaggcaacgaggaactctggtttggctacaacgtcagccatgctgcgggcgcctatcccgcaggctgtgacggcggccccgccaccaacggcttcggcaacatgatctacaactccggtgaatgggcaactctgaccgacctggctccgagcctcaactacaactggaacatccgcggctacgtgggatattcagctcccaacgatgtgtgcgcgatcgatcccagcatcctcaaacacatcccgtccgacaacatcaaagccagcaaagacatcagtgcctgcaaagacaacgaccgtgtcctcgtcggctacagagtctggcgcttgctgcaaggccaggaaaacaacgattcagcctggactcagctcaccaccggacccatcaccgcgactgcctggccggacaacggatggggcggcgtgcctgacggctggtacaaatgggctgtgaaagccatctacaccggcgaagcgcaatccctgccagccttctccaatgctgtgcagaaacttacccagatcggaaccattgccggtatcgtccgcgatatggccaacgcccccatcatgggagcaaccgtatcttgcggcgacgtgactgccaccaccaacgccagcggagcctacagcatgcaggttcccgcgggcacctggagcgtaaccgccagccacccgaactacacacctgtcacccaggacggagtgattgtcgttaccaaccagaccaccacggtgaacttccagctgccgatcagcaatgtgctgctctcggacggatttgagtcctacgaaaacttcgttatcgaattcgcgccctggaccacggttgacgttgacggcagcgcgacctatggcatgaccaataccacctggcctaacacccaaacaccacaggcctacatcatcttcaatcccagtgccaccactcctcccgccactaccatcgtacctcacggaggagataaaatggcagcctgtatcgccgcaactacccctcccaacaacgactggttgattactcccgtactccacaatccgctggaacttcgcttctgggcacgctccctgacggcgcagtacggaggactggaaaagttcaagatcggtgtctccaccactggaaccaacccctccgacttcaccatcatcagcggcagcactcccctcgaagctccccttgattggacagagtatgtgtataatctcagcaactacgatggtgacacctacgtgggcatccagtgcgtgtcccatgaccactggatcttcatgctggatgacttccatatcaccggcagaactgacagcgacgatcctatcgtccctgtggtcgccaccgagttgcacggaaactacccgaaccccttcaacccggaaaccaccatcagcttcagcgttaaggataaaggccacgtaaaggtcaatatctacaacgtgaaaggccaactggtgaagaccctcgtgaacgacaacatgaacgccggcaagcacaccattgtgtggaacggccgtgacaatgctggtaaagctgtctccagtggcgtctacttctacaagatgagcgctggcaaatacagcagcaccaaaaagatgatcatgatgaagtaattcatcgggatataacctataaccaagccccgggaccgaaaggttccggggctttttctactctcctgaaaagaacgtggatgacaggatcgactggatctttgaaggtggaaaggtgaaaaggtggaatggtggaaaggttcccccgaaacaagtccaccaggctatatactgtgtcatcacgagtggggtggcaaagtccgtttgccacagagaccggaggtctctcccaaaaaggcaactccgttgcctctgccgaacagacttcggcagcccttaagttatctgcgtatatctgcgtgaaccgcgtgaaccacttgaaccttgattctgtcttttcaagtcccaaacaagcacccagaccaaaaacaaccggcatcaattatttgacaatcgcattaaatatccaacacattccgcaatatgcttcatagcgccgtcccttgctgctactggctttggagtcatcatccttaggtcatccctcaccgggttaaggatgactgccggatgacccacgccggagaggggaatgcaaatgaggcccatccctctataatatataggtgctacgataggtggaaaggaggacttcgtggtgacgtggtgtcgtggtaacgtggtgctgtcggaaaagagatagaacgcggatgacaggatcgactggatctttgagagtggaaaggtgaaaaggtggaatggaggaaagtttcccccgaaacaagtccaccatgctatatactgtgtcatcatgagtggggtggcaaagtccgtttgccacagagaccggaggtctctcccaaaaaggcaactccgttgcctctgccgaacagacttcggcagccctggtccgaaacctccccccataatactaatccgcgctcatctgcgcctttatccgcgtatatctgcgtgaaccgcttgacccgggatccagtcaccccagaggagccacccccgtttcccgcctgttcagcgtgcagacagcagtcgtgtcaggaaagcttgtccagttcttcgcggacgtttttgcagcggggatagtctttgccaaaggtgttttcccagatgctcagcaccctggtcagtagttcccgggcggtgtttgtgtcgccttgtctggcgcgcagcctgcccagagagaagaggtaatgggctgtctgggaatggttttcgccatagtggagggtatggccgtctatcgcctgcttgagcagtggttccgcttcttccaggcgtccctggcgcagcagcacactgcccagatttccggcgcagaccgccgtaaaccagtgcccctgtgggaaaaggctttccatcatttccagcgcggcgcggagcatctcctccgctttgtccggcctgtccatcagactgtagagcgaggcgaggttgttcatgcggtctgccacgttggaactgggcccggggcgtttttcgatattcagcgagcggcgcagcagtttttcagcctgctcgtagcggctggtatctttgtaaaagcgtcccaggttgttcagatagggggagaggcgggggctgcgtggcccgagctggcgggttctggcctccaccaccttcagatagagcggctcggcatcgtccatgcggtgcatatagtgatagagcagggccagatggaagagccgttcgatgtgttccgggctgtccccgccccaggcctggcaggacaactcggctgccagcagcatacattcctcaatcttggccagcagcatgcggtcccagaagtaatcggccgccatctcatagtaatgggcggcttttttgagttccccggcggctttgaagtggcgggcgatctccgcggaatgctccttgagtgcctgttcaaagacggtttccatggcttcggcggccgccaggtgcagttttttaagctccttttcgcggatgctggcatagaccgccttctgtaacaggctgtgggaaaagatgtaaaagagttcatcggcatcctgccagattttccgtccccccgctttgcccagttgctggatggggttgccttcgagcatgtgggagaggaggacaacattgaagcggaagcccagcacactggcgccgcggacgctttcctgaacctttttggagagccgggcaatgcgccgggaaatcacctcgtcgatgcctcccgccgccgcttccaagccctcttgcgctatttcgccgtggggactgagcagcttgttttccagcagataagcggcaagctgttcggcattgaaaggattgccgcccgcgcaggcgtggaaagcggaaaaggcctcgcggggcaggcggggaaggcccagcagattgaggtagagcttgcggctggcgctggagttgagggagcccagggcgaggctctccaagccatcttttttgacggcaagctccgcgggcagcctgcccttttccgtccgggcggtagccagcagaaagagcgggcgcacgccgtgttgccacagcagttccaggaattgacggctcaggggatcgagccattggacatcgtcaataaagataagcacaggggatttggcgcacagccagcgcaggtaatccagccaggcctgctgctgacggggcagcctggcttcgggggcgatcccgcgccagggcgagccatcccaggagagattcagcagcgaggcgagggcggcttcgcaatcctgtcccagcgaggaaccgcgggtgcgcttttgccacgcttcgcggaaatgctgcaccgcctgcgcgggagcctcatcctccaaaagccccaaactggcacgcagcaactgggatacgatatccagagggaggggggaatcctgcctgcaagccagcagatacacctgccgccggggagtctcgaaggcgcgcaaagcttcgcgtgccaacctgcttttgcccactcccgccgttccatgcaccaccatcgcctggggcgaggaggccgccaaaccatcgcgtatcctgctatgcagcagagcggtctccttctccctgccaatcatgcaaagcggttgtccggtgatcagttgccccggcagcatgcccagacggtaggcgcggggcgcggcttttgaggcggctttttcccttttgaggggggtgaagatgaaggagttgtgctgctggttgcgcagcttgtggtcggcgagggcttcgccggggcgggcaagctccaggagcttctgggcgcgggtgatggcttcgcccgggaagaaggttgccttccacaggtctttgccggcagccatggaaaagatgtagccggtgcagcaggcggcgcgggctttgtggcgcgtggcagcttccaaagccaggcggcaggcgcgctgcattttgttgaccttgttgtgggggaaatcgaagagcaggatggcatgcagccgcttgtgccgcacatagatggctgccaaaaaggcgtcgtagatcaccgccagcagttccagcgcctggatggttggctccagggggccgtccggaggctcgtccaggctgaggcagcagcaaacgctgtgccggacgtcagccgcgggattgagtctgtgaaagcgggaatgaatgaagtggtggccgtgttgcttgcccaagcgcttcctttccggaatatcaggcaactggggaaagggcggatgctcggcaagtttgccaggcctggcatccaactcccagcccagtctgttcaatgcctggggagagtaataaggttggttgggctggccggggttttcacgcaggacatccagttggggagaccagaacacatattcaaactggagggggttctcaaagatgcgccaggacagggtgccaaaacccacggccaggcggattacattcggcattccatgatgggggctggcgtagctgttgatcgcaccgatagtgtgattgatgcgtgccagcagcgccgcgatcagcaccggagtgctttccggcaacagggcgtggatgcagtttccctcatactggaagagcagtccgcctgcgttcctgatcaggctcagcatcctttcataggcttcggtgaaagttgcttccatcctgtcaatcacctgctgccgctgcttgagccttactcctttgatattgtaagtggcaacggtgcaaaagcgcaggatatagccggtgatctgcccctgcaggatgttttgctcatactgctgcaggatgtagctgggcaccacgcggttcatatctggctacctgccttgcctggcttaactataatctcctttctgcctacttatcccccaggctcagattggcgaaggcggtgagggtgatctccgcgtccgcgctttccagatagctgacgcgtgcccggtcgcccgcgcgggtgatgggcagacggctgctcaggttgctggaggcgataaagattatatccggcgcttcggtcagggtaaggtagtagtaggtgcgtccatccgtggtgtccgagccaaagcgggcgatggagcctgtgagggtggcctgcttgtccgctgcctccggggatatccccatccggcttccggccagggccatctgatagttgtcgcgcgcgctgcgcacgctttcacccactcccaccagggaaaagtcgcgcactgaaacgaagctgaacatcttgattagcccggcgctgtccttgagggtcataaaataggtcggcttgccgttcatgttcaccaggatggggaaggtggcatagtatttgaagttttgcaccttgccttcggcggagcgcatggcggcagtctcggtggcaccggagaccaggtagaggtggctgcttttggtgcgggtgtccgtgagcgcaaagcccaccgttccctcgtccgaacccacgctggtgaggccggagtagaaatagctgcgctgatcgcggccatagatcacgttgtaaccgggcgtcacccgcagcaggtcgcgtttgccgaacacgctgttccaaaagccgtgcacatatttgccccaccaggaaagctggggaagcacaaagtaggagggctggatgcggtcaacccaggcgggaatcttgctgtcgtcatagatgccgccgctttttttgaggggaaagtatttgatctcacccgtgccggcatgcacgatggcgagtccggtggcttccggggcactcactccgatcttgtgggtgtaggtggtgatggtccagtagggttcgccattgtcgtccagttcaaaggtatcgcctgccaggccgatgcccgcgaagccgttccaccagagatggcggtagaggtcttgtccaaagtaggcgttgcgctgatagcggatttggatgggtttgcctttcagctcgcgcacaaaggtgatatcctgcggattggtggccgagaccttgatgtagcccggggtgcctttgcttgtgttggtgatccacttccagaagccgctgtgcagcaggggacagacccagaaaagcttgccatccaccatctggatggtcgggttgccgagcaccacccggctgccgagggcgaagtcctcgcccagtttcttggctgccaaatccttggcgaaagcggaatccaggatcggcacctgatccagattgaccggcgccaccaggtcggaaaactcggtcttttccacctcgccgatcatgcggcggtagctgccggaattgaagatgccggaagagaagaagggcgccaagatcagccacagcgccagaaggggatagaccacatagaggatcttgcgcaggcgccggattgccagcagcggagccaggcagatcatcagggggacgatccagtccaaaaagcggatatgcagcaccggaagcacaaagtaaagcataaaacccagcagcaggacggacagcactatggcaggcagggctttgatcctgaacttgggaaacttgatcacgacaggtttgggcgtttgttgttgaaacatggtaacctccctgaactaagctttgtttttatactctaccagatggcggcggatttgtcaagccggaatcgctgcccgcctccaatacagaatggaaaaaagtggactcggctcgaagaccgctcctatccttgcggatacagaggcgcgaccgcccgctcaaacactccctgaaccttggaaatggccagcccgtaattggtgatcggcactccgcgccgctgggcttccacgatgcggcggctcatctccatctggttgagcatgcaggctccgcagtggatcaccagcgcgaattcctccagattgggcggaaagtcgtgtcccgcgtaaacttcatactccagttccttgcccgtgaactggctcagccagcgcggaatcttcacccgcccgatgtcatccgcctgcacgtggtgggaacaggcttcggcgatcaggatcttgtcgccgtcgcgcagcttgtcgatctgcctcaccccttccgccaggacgtccagatcgcctttgtagcgggcaaagaggatggaaaaggtggtcatcttcacctcggggggcaggtcattcaccaccttcagcaccacctgcgaatccgtgatcaccagatcaggcggctccttcagggtttgcaaggcataggccagttcccgctctttcaccaccgtcaccaccgcgtcgtgatccagcagttcgcgaatcacctgcacctgcggcaggatcaggcgtcccttgggcgcggcgaggtcgatgggagtcaccagcagcaccctgtccccggccttcaccaagtcacccgccagggggcgctcctccagcagatgggcgggcgccagcttgatcagcagttccttggcggcatcgatgttttcccccttgagggcggagacggagacccagggcagtccccgttcctcgcaccaggcgatattggcgggggcaggctcgcgcaaatccctgtggttaaagaccattaacagcggtatcttcatctcgcggatgcgtttcagggaggacagctcgctctccgcgaaggggcggccatcgttcacaaacacggctatgtccgtgcggtaaagtatcttataggtggcgagtacccgtttttcgcccagttcgccgctgtcgtccagtccagcggtgtcaaagaaggtcaccgggcccaggggcagaagttcatagcgtttgtccaccgggtctgtggtggtgcccggggtgctggaaacgatggctatctcctgtcctgccagggcgttgatcaaggacgattttccagcgttgcggttacccagcagggtgatgtttacgcgttctccgcggggtgtgctcatctatcttctcccaaaaagtcttgcggcttgcggccgctaatagcttttattatcagttctttcatgtttctttccttgtcggactggataccagcccatgtaaaaataatatatgtgaaaagcgcgaatctgtcaagcaaagagaattctggcagacaggggcctgtgtttttgatatatccacaaattacacaaattaacacggattaaaagaacagaataaggacaagtgtccagcctaaaaacaacaaccagaccctgaaacaaaccgccaccaagccctaaagccgtgtcatcccgggctgtcggggtcaccgccaaagcgcgaagcggtttggtggggtggcttgacccgggatccagtcttttaaaaacaaccagcaagccccgaaacaaagcacaacagactaaaaaccgtgtcatcccgggctgtcggggtccccgccaaagcgcgaagcggtttggtggggtggcttgacccgggatccagtcttttagaaacaaacgcgtaaggttttaaaaaagcaggcacctttccacctcaaaacacctttccacaaattctccccccatatatataggtgctacgaccccttcatgccaggcgggaagcggatcccagggcaagtatatatatacttgcccgtaattgcgcggccatgggctggctgccctccctttcccctcgcgcgcgggtggctctcatttgcatccagcgttttggcgtgagtcttccttaggtcatccttataatttataaggttgacctaaggatgatggcatcaaatccagtagcagcaaaggagggcggtatgaaggattatgcggaaggttgtggtatttttgtggaaaggtggaaaggtgcccccgaaacaagtccaccaagttatattttgtgtcatcacgggaagtcggggccccctctggggtggcttacccgtgatccagtctttttaaaagaaacatccacaaattacacaaattaacacgaattaaaagaacattaaagagtcaacacacccgactccggaacaaaaccctccagactaaaaaccgtgtcatcacagcctgcgagccgtgatccagtgcccaggtgtggcaaagtccgtttgccacagagaccggaggtctcttccaaacaggcaactccgttgcctctgccgaacggacttcggcaacccttatattacaccaatccgtgtcaatctgcgccctttatccgcgtttatctgcgtgaaccgtggaacccgggatccagtcttttggaatgtttgaacttcgctgaaaacatttttcgctaccaggaatgaaaactggacaacaaacgcagcttgggatatctgacactaagagtgtaattcacacgatcaataagaacatagcgtgctgtgcatacaaaacatattaccgacggacttctgttctgaaatatggacgttttgaacttggtaaacagtccgtatatggactaccagctgggacttgccattaggcatatgcccgaatgtaaagctatattcttatataacgcattgtagacagcacaggttgttctctgctctttccatattacactagtggtcatcatttcaccagtaggggtttttttacgcttttttcccgggagttttcatgtaaagcaccctactggacaaagagatgggagccggaaaacacagcctgaactgggacggcaccgactccaacggcgcccaactggcaagcggagtctatatctaccgcctcagcaccggaaagacgagcgccagccgcaaaatgatattgctgaagtgacggacagccgcccttccaagtccgataattaacttgaaccgccgcgcattacacacggcggttctttccaacaagccaagtatcagcagcgggaaaactgcgctgaaaaagccgctggtggggctccgtaaaatgggagtggaagccgccgcatggaacaccttgaaagtaacaagataccgccccaaattgatctttcctaacccaaaatccgcaaagcaaatttcttgacaatgatctttggcttaaatataaggttcctatcgaacaaaaggagcatgttatgtacaatcttctttgtgataattgggtaaacgtggtctatctttcgggcaaaccagatagaatatctttagttcaaactcttgaagacgcacactgtctgcaactggcatacagcaatcctatggaccggttcgctgttttcagattcctgcttgctcttggctactggtgtttcgccaacaccaacggggagcctgaacctgataagccgcttccgacctcctggatatcctggctggaagaaaacaaggggtatttcgagctttttggggatggacagagatttttccaagccgatcccagttccaggatcagagccattaccgaccttattcatgagataccaacagctcacaacctatgccatttcaatcatgtcaccgactatatcgatgggctctgcgaagcttgctgcatcaagggactgctgagattacctgtctttaccactgtcggtggcagagggataggcgcgggaatcaacaacactcctccattttacctgctctggcatgcaaatgacctcgctggcatgctggttcaaaattggcaaccctgggataatatggggattccggcatggttgggttcttttcaaaaagaaagcaggaaagtgggcttacttgccggaatgacctggctgccgcgcaaggtgcatctgcatgatcctgtctcaggtcaggcagcatgttgttcctgcggcttaccctccaaagctctcgtctattcctgcagcataaaacctgaaccagtgccggaaggccttaaatggaaagaccctcatggtgtttacaccgatcagggaaaaagtctccagtccaaaatcaaactgatgtccaatgatagatacactttcgcggaccgggattggtatagcccgttgttcagctatttgcacgcggaaggaaactccagacaaggaaaactatggttggttggatttgccagcgataaagcaaaaagcatagacatctgggacaagatcatcgagcttgagggaactgatacaaatgatgagctactggctcaattggcaaacagggctactgcccttaatgccatgcgcaagaagcctctcagaggtgatttcaaaaagtcagtgggcactccccagattgctgacattatcccccatgccgaaagcagaattgccctcaatgcgggtaaaatgactgagaacaggggctattcctggcaggatgccgatactgaatacggagaactgctcaccaaggttgcatgctctttggagccggctcaaacagtggacgccaggctcaagagaggtaaattcatttcccgcaagccctggccagttataccagaatccaaaacaaaacccgcagaggaggaccagaatgaatagaggaaccgttgacttcattgcaagcctggagaacctcaaagaaggcgatttgggcattcttagaaaactcaggggagcccggcttgatgaaaagcttcccggatttgacctgttttccgccctatggtggcctttgcggcaaaagaatcaacgcgctcccaagcgtgaagtggcttggttgatcgccaaactttttgctgaattccgctttgaacagcgcgagggagccacattgcccattcttatgggaggcatctgccggaagttggaacccaaaaaggaattaccccgtgtattggcacgctttgatcaactcgcatcgcttgacattatgcagatggaagagccgctgtcggtcattatgggtatcttgcgcaagcaccagcaggtctgcctggactgggtagggcttactgatgttctgtcattttgggagcaggaacctgtcaaaagagaatggtcggattcatttattaaagcatacaagatcaacaaggaggattcagatgttgattgaaattcatatgattcagaatcacagcccggcaaatcttaaccgggacgacttgggcgcccccaagacctgttatttcggtggagtattacgttctcgcatctccagccaatgcatcaagcgcagcatccgttttgccccggaattcgcggaccttagaggaggtatccgaacaaggcgtctggcagagaaacttgaagaaatgctggaaaacaaagataagaagctggttgccaagtttcttgaagcctgcggaatcaaaaccaaatcttccaagaaagctgcaaaaaagtccgaaaagatacccgcggaagccgatgaagatcaggatgagcagcaggcggctgatacatctgacatgctggtttttaccacttatgatgccctgcgccaaatggcagagctgctttccgactccaaactaagtgaaagcgaaaaactgctgcagttcaaagatttgctcacaaactgcgtccattctccggatatagcactttgcggcaggatgttggagaccaaagagcttaaaaacactggcgttgaaggcgccctacaggttgcacatgcgatctccacccacattgccagacctgagatagactattttgtggcggccgatgatgttcccggtgaagacgccggagcgggtcatattggcgaatccatgtttgcctcagcctgtttctacaaatacttctccattgattgggaacagttggtcaagaacctgaaaggggacacgaatctggcagcccacaccgtgggtgcctttctcctcgccgctgccaaaaccaaccccagtggcaaacagaacagcttcgccgctcataactatcccgatggcatccttgttgagttcaagaattcccctattagctacgccaacgcattcgtcaggccagtttccgtggtcaaggaatcggacctggtggaacaaagcatcggccagctttccaactacgtgaacgacatcaggcttggctattatgatgagcaatccccagttatcagcttctggttttctccaaacaatcgctattcccttggcaatgagcattccaaactggcttccagaaacattggcaacctcaatgagcttgtaggcgctgtgttggattatattggcggcttcaagtgggaagaagttcagaaaagcaaggcttatgttggcggctgacatgagtgcgccacccaacaccttattcttgcgcttggagggggctttgcagtcttggggcagcaacgaggctaagtttgctttgcgcaggactaccgacgctcccacaaaatcaggtgtcctggggctgctttgcgcggccatgggaattgggcgcgcggaggctgctgattcatggctcccaaaactcgccaacctgcgcatgggcgtgcggatagaccgccccggcatacgctggtgggacttccatactgttggagcgggacaaagaatgcgcatggcagagctgaaggcacccaaaaaaccttccatggttggagctgccctggctgataccctgacaccaagcaaagtaaaaaccagggcagagaccttgctctcacgccgcgaatatcttgccgacgccagttttctggtcgccttgcagggtgagccggaacttgtggaaaagctctccgccgctctggccaagccggtctgggcaatttatctggggcgcaaatcctgtcccccttcacgtcccgtgggcgagcatgctccgggcttttataacactttggaggaggcgctgtccgcggttcccctgcaaaagcgctggcacaatgaacccctgccgcaaatactgccttgcgtcatggactggatccccagccaggacggagaacatgcgcctgatgacgcggagattcattacgatctgccggtttcttttcagccgccccgccatttgccgcgcttcgtgatcaggcgtgagctggttgtgggagaggatgtgcaagtgagcagggaaaccggaaccagcgtttggaggcccaaaggaacccgggcggattataacaattccgagtataagaaggtcagggcggagcggcttgtgatggaccatgccgcgtgcatggtatgcaaagctcccgccacgactgttcaacacgtgaattaccgcagggcgggaggcaaggaaataccggaagacctgcgggcgctgtgccgcctctgccacgacgcctgcaccatgctggaatacggttccggcatgaccaccgaccgcatcgacccctgcgaccccatctggcgggagcgaatactggcaaagcgcaaagatatagtcgagttccgttcgcgcgggcagcgtttccgcaaaatgaagccagaggaggaaaacggatgatctacttgtccaagctattgatcgatactggaggcaatccagaccgtccccgccccggcagaaagtggctggacaatatctataacgtccaccgccgcctttccatggcgttcccttcaggtttgcgccgggagcaggatccgcatttcctgaagcccttttcgccaaacgacttccaaaaaactcccttccttttccgggtcgataacaacatcgacggaaacgataaaagggcgattattatcgtccagtccgttcttgagccggattgggattattgcttccaaaacgcgcttgatttcctggcagcgccaccggaaacaaaggagtataatccagagtttcaagcgggacaactgctccggttcaggctgcgggtaaacgccagcgtacgccgtcatattcctgagaaggtgcaacaggacggtcaaaccatagaaactggcaacatcctgcacaaaagggtttctctcacctgggatccctcttccaccccggatcaggcccttgccgactggctggctgccaaaagcccaaagctgggcttcacccttcagcgctgtgagcttcttcaactgggttgggtttatggctccaagcctgaacctaaaaatgtcaaagcaaaggaacagggacagggctactggcgtgaacacacatacaatcctctgcgcttccgttcggctctactggagggaattctcaaagtggatgacccgaaactgttcctggaaacgcttagaagcggcattggaaaagcgaaaagcttcggctttggcctgctgtccgttctgccaatcaggaatgatgaataaagacctgcactctatcccccggatcagagatcggcttagctatctctatgtggagcatgccaaaattgatcagaacgggcaagccatcgccattcacgatgccctgggagaaaccccggttccttgtgccggcttggctatgctgatgctgggaccgggcataaccatcacccatgcggcaatactttcactggctgcctgtggctgtctggtagcctgggtgggggaacatggcgtcaggttctatgccgcaggcacaggtacaacccgtagcgccgtcaatcttatgaaacaggcaaagtactgggcagacccggttttgcatttacgggttgtgcgctccatgtatcagttgaggttccaggatgagctttctcctgatttaactttgaaccagatcaggggcaaggaaggtgcccgggtgcgcgatacatatttccaactctcccaaaagtatggtgtgcccatgcagggcagaaactatcaaagagacaactggaataaagcggatcccataaaccgggcattatctgtggcaaactcctgcctctacggcatatcgcacgctgccattgttgctgcaggattctctcccggattgggctttgtccacactggcaagcaactgtcatttgtctatgatatcgcggatctatacaaaatggaaatggctgctcccgccgcattccgggcgaccgctgaagggatcggcgaactcgaccgcagagtcaggcttgcctgccgtgatgaattccacaggcagaatctactcaaacgcattgtcgcggatattagttctctcttcggtgatattatgccagaggatagcccggatgactgttttgccgaagaaccagccttgcctggaggactctggtctccagatggagaagtttccccaggcggcatatcttacgggcaggatgatctgccaaaggaagattgatggtggttttagtattggaaaatgtgccaagctccctgaggggtaagatcacacgttggctgctggaagtaaaagccggggtgtttgtgggtaaagtctcagcaatggttagagataaactgtgggataaggttagaagcaattgcagcggtggaacttgcctgatgatctggagtagtcagaccgagcaagggtttgatatcgaattctggggtgccgcatcaagagtcgttacggaatgggagggtatcaaacttatgaccaagcatccttaaactaaggcttgaaggagttcaatgacctcttagacctctattgatcaagtgtattccccatgcatgtgggggtgaaccgggaca

SEQ ID NO: 540 - DNA, 38977 bp, Artificial Sequence
  Synthetic Oligonucleotide
caggctggctgcggtattgttcccagctcgcatgcgtataatcgggtcgcgcccaagcaatcgttaagaaaccccctttgccgaccttgaacctaacatgctgtcctttgatttcatcctggtaatggagggcgccgccgggaacctgggcacgttcgtcatccgtgacttcgctgaggaactcaatcagttctcccgcaatctccggaagcgcggggcggtcgtcaggttgaacatggcgaacctccagcgacgccgactcgggaacaaactccaaccatgccgcatcaacatgctcgagcttctgctgggtttccttgctgagggtccccaactccacctgccccgaacagcccaaatgagtgcgcatcttctcactcccttccccgattgctacaggccaagtgcccgtagtgctggtcccgcgctgacagataggcattcttagcgccgaagggactcaaggtctgccccaaggagattttgccacaggtagaatcaagaacctagcgacttgtttgccgaaagaaaaacgccgctgggaattgaccctctcccattgggacgatgtgcttgccgaagtaccgctcgactagcgcgggccgtgccgggcaatggaaatcggagtcggtttgccgtattgcaatacggcatgcatgctggtattatgaaggcatggcaaaagaacagatgaaaaagcttactatcatggtccctcgagacctcctgcgaagggcccagaaggcgaccaaggcgggggcgactcccacggtgcgcaagggtctggagcttctggcagcccacgatgtctatgaccagcttcgcgcgttggaggggaaagtcaaattcagcctcacttggcaggaaatgagaggagaagaatgatctgtgccgacaccagttctcttgtggctctgctgggtggtgaacctggtcgcgacgttgacctggttcggcaggccctgagcgatcggatactctgcgtctcgccgatctcagtcacagaactcctgagtgaccccgaccctgcgccttccctggaggagttggtcacccagatcccgcaattagaaataagtccaggatactgggagcgtgcagggaagctccgagcaagaatgtttcgccgccaagtccggcccaaggtcgcagacaccctgatcgcccaaagctgcctcgaccacggagtgcccctggttacccgagacggggatttttcgtcttttcagaagttcgccggcctgcgcgttttggcgattggcgatctcgtgcaatgacggcatggcaaggtaaggctaagggagccgtcgccgggtgggcgtcgttccgatcccgccttgcgggagaggaatctccctctgcgccgctaggcgccgtgaggctctcccgcgatgaagcaccgtatcgcgatggcgactctgaagccccggcaggggcggcagaatttagcccacggcgcgatagcatgacccctgggtctcgagtgccgccccttccccctgccccctcccccgccgggcgggggagggggaacaaaagggggcgggggccattttccccagggctatctccctgggctactatcttccgcccctaccggggctggtgcgacttacatcacgaatcactgggataagggactaggcgtatgcggaggaacgagccgggcgagattcctcgctacgctcggaatggcaagtctgtctggcctacttcttgcgcggcggctgcgagggccgcatctcgatgcggctggcgagcgtggacagcggataagagtaaaggtcaaccaccgccttggcgatatcctcgccggaaagcttccaactcgctcgggacttagaccccggcgctcccccaaagtccgtatccacgcttccaggcatgatgtaacttacacgaatgccgtcgtagcgaacgtcctgcatcatggcctcgctgaatccattgaccccgaacttcgaggcgttgtaggcgctccccccggcgaaaggattcaccccggcgagacttgaaatattgaaaatgtatccgccccctcgcttgcgcataatggggatggcctcgcggcagcagtaaaagacgcccgacagattggtgtggatcgtggcatcccactccgcgggcgtgagctggtccaccggcttcataattccgattccggcattattcacaaggatatcgatccctccaaaacgctgggcggcgctttggatcagctttcggcactcctcatagcggcccacgtccgccaccatgccttcaacccggccgtcgccatgcttgcgcagctcctccagcgcctgcttgagaatcttcgcatcgcgcgcgcagatgtagacttttgcgccttcctgaagaagcctctcagcaatgcaataaccgatcccgcgcgatcccccggtgaccacggcgactttgtctttcagctcgtttgtcatcaacccctcctcgtttgacagcccccgccccgactcccctccccctgtcccctctcccctggggagaggcgatggggtgagagggtaaggggttctgcccgcctttcatgcccctttcatacaacttttgacagaaccatgcaggaaactaacagattaacccgcatacaggggtttgggcaaccctgcgatccggggtagggcacactctcgctcttcagatagtctgcggccggcgctcaatggcgaatctctcaaccgacggattcgggcccggggcagcgccgccggctattcggcgagcagttttccgagcagcagatcgagttcgcggccgtcggagtcgaaagctccttggcggcaacggagcgcgccctggcggtcgataacgaggttggtagggtagccgttggcttcgtaaaggcggccagccccggcatcgtatccggcgggaaaggagagagcgtgctgggccatgaagcgggccaccttatcgcggtcttccgcgttgtcgcaggagatggctaggatttcgaagccccggtccttgtacttggcgtaggtccgtgcgaaaagaggcatctcgccgacgcaagggccgcaccaggtggtccagaaactcaccaacactactttgcctcggtaatccgatagtttgtgtttcttaccatcgaggccgtcgaattcaaaatcaggagtgggcttgcggataagattgcgctcgacggactcggccgcggcctggtcgagttcggagcgaagcgcggcggcttggtcttgcttgccgaggccatcgaggaccgtggcgagatgggagagtggctgggtatcgcggtcgagatcgacggcctggcgcagcttagccgcggcctcttcgccttttccgctcttccacagcacccagctcagggcgtcgagcgcaagcgcgcgctggcggaggtaattcttctgctgctgctccagggaaggcacgtagctggacggcacgttggcagggcgcgggagcgggtgaaactcggttagcgcggtctcaactcggctggcgagggccagggctcgggagaggtcgcccccttgatcggccagggcgagggcgaccagggcctgcggcgtgaggtcggttggatcgagggccagcaggcggtccgcatggcgctccatggcgtcgatgtcgccgttctcgcgcgagagccggaagagcaagctgtgcagcaaggttcgcaaagccgggctgggattctggtccaacagcttctggtaatcggcgacagccacgcgccagtcaggatcgcgacggagggcgatgcgtttgatggcgtggttgatggcgcactggcggttgacagccagcaccggcacgaagattccgctgatgttgttgaaggacgaaaactcggcgcagccgcgctccgggaaccacgaggggtcgagcttggcaatttgccgctccagcctatcggcggcggcttggtcgttgagaacctcggagtacccgcggtaaatggcggcgagaagttcgaggttggtggcgccggcggagagtttggccaactcggcacgcagggcggcttgcgcttcggcgctgcccttggtttgcgcgaggcgcagacgccagacgatgggcagggcgacggcgcgggtttcagggcgagcggccatgcgctccgcaatggccagggcctcggcgaggcgaccgaactcctcctgaaagaagatggcgtcctcatagaattcggggacggatgggtcgagctcggcggcgcggaggaactcggtgatggcctcttcagccttggcgtcaggcttttcgttcatcaggaagaacgttctgccgaaggtgacccaggctttcgcgtagtggccccaggaccagtccggcgccaaggaggcaaccgtcttatatacggccatctggttctcggcgaggagtccgagcccgagtagcagagcaagggggtagacggggttcgtggggttcctggaggcaagggattcgtactcggctttcacggtgtccaaatcgccttggaagaacgcgcgggtgcgaacgtactggcggtgagcggcgacggaatcgggtgcgagagcgatagcttggcggagaagagcgacagcctcggcggggcggtcgcgcccaacaaggtcggtagcttgctgcacgagggcgcgggcttggggatcgtcggaagagggggcagcaccggctggggcgaaggcggatgaaaacaagaagaagagggagactacgattgagtgcacaaaaacccctcgttgcgatgaactctacactatatcaggaaaggcggagcacgtaacggccaaaagcgtccccaggtgcgcgacatagaagttgggagtgtagaaggtcgagtgattatggccccgcaaggggccaccccgtgagtagtcccgcagtcgcgggacaggggcgttacgatcctgatgtaccactacgcaaggaaggaccgaggaaatcgaacagaatgccaggcctcaactttcatgtcgcgcacccacctaacgcggccggcgcggtcatttggaaccggacgtcttggaagcaatccagagcagaatcccaaaggcgggaactacaaacgggaaaatgccgtagagcgtgtcgctcgccgaatgcgagtggcggtcaacggccgcgaacacctgcgcgcagaacgcaagagtcagcgcgagacaaacccaagcctgccaggatacaggaaaatatacccaaccccactccttaaaccaagacttcttcatgacagcattcctccttttctttaccgaagtgggtagcgcgcagtctcgttgttcagagactcctacgacaagaccctagttctgtgcggggcattgcacgcccttcaggcttgccccattctcacgcaccgcctgcgcggctcgtgcgcgagaccagctccaggcacgccagtcagacgcctgggggaacgcccaacgcttcaggatgccggctgccacagcgcagcgctcctgtgggttcagattagggagggctgccacaagttccggcacggcgtcggcgctgagccgggttgcatagccggcatcaaaagagcgccctgctttggctcgcgcgagattggtgcgagcaatgagcgcgtccggattaagcgcctccaggacaataatcaggaagaaacctgccaccattgctccgaaggcaaaacgcttgcggtgcccactcaaaacggtcatggcgaaccagaggaagactaccacaagccagcccataagcgcggtggcgtacaagcgctcttccgtgaggccatattcagcttggtaaagacgcatgcgttggaatgcagataccacaatgacaaacagcagaaggatttggacgcctgccagaactctgaaaactcgctctccggtcgggccattttgggcaatcagccaatgcaccagaaggagaagcgggagcagcaatgccgctacagccaccagctcaaagaagcctgcacgcgcatattccgcgtaggtcaggccggtggtcgcctggatgagggctgagccgccaaagaaataacgcacctgcacgaggacgaaggcaaggaacagaaggtcgagggcgctcagcgccacggcaacctcgattatgcccagggagacgcgcgggaggctcttctcccttatgatcgatacctccttgccccacagcatgccgcgcaggtatccacccacacaccaggcgaagaaggcggccacaaagaagtgagtgaatacttgccggaggttcacgtggaacgctctcctgacgatatggtcgaacaccgcgtccgcccccatgaacagcccgccaaatacgagtaagcagggggtagcaaaaagaattccgcgcaccaccgccatcgcccgctgcgaccaccgatcaccgagtagcttcttccactcggcctccccgaataagactggcagcaagccgaaggctgcgttgagcccggcaatagcggctcccagggcatactcagcaaggccggcaagacgaacccggccccccttgggcccgccagatgactagggaaagcgccgtgagggtcgcaaaaaggcccagcattttcaatgcgggggaatcgtgccaagccagccccagcgcgaaaaccgccaccacaacgagcaaccactgaccgcctccggaaaggctttcctctctccagcgggcgtgaaatgcgatggctgcggaaagcgccgccatccataggaagagattgaggccccaaggcaaaatgcggagaaaagcatcgccgagtatgcccatcaccaccgccgttccaagtgcggaaagttccaaccgcccttcgctcaacatcgtcagccggccctccgtcgaattgggtctttgccctctaccaaggggagagggtggactgcggccggggctttcaccagccggcgcgggccgggtgaggggtcacttagaaattcgaaacacgcaaaagacgctgctgcgaccaattggggccgagtttcgagtttcgattttcgaatttcgattctctgcccgcgcaaccggcaatcgtcaatcggcaatcaccgtggtctccggaacgcgcccgaaacgccgatggcgggaacggaactcgagcacggctgcctcgaggtcggcagcgtcaaagtccggccacatccggtcggtgaagacgagttctgcgtaagcgcactcccacagcatgaagtcgctcaagcgctgctcgccgccggtgcgaatcagcaagtcaaggtcgggggccggcgctcggccgtgttcgcccccggcgagcaagcgggcaaactcttccggcgtggctggctcgccgttgccgagcgatcgcgcggcacaaagaatggcgtcgcgagccgagtaatcaatcgccagacgcaggtgcaaccgccggccctcccgcgttgcggcttcggcagcctcgattgcggccaccaggccgggctcgagccgatcccgccgcccgataacgctggtccttattcccgcgtctacccactcgccggccgaggcgcgcaagaactcttcaaaaatgctcatcagttcccggacttcacacgaagggcgttgccagttatcagaggaaaaggcgtgcagcgtcagcgtcccaatccccaggccgggagcagcctgcaccgcgcggcgcaccgcctccacgccctcgcggtgtcccgcgctgcgcggcaggcctcgtgcggctgcccaacgcccgcttccgtccataataatggccgcatgaatggagtgggcggtggcgccgcccctatgggcgaccccccgccgcgagtcaagtgatgaggcgcgggccgagcgatgagaagcatcgggcgcctgcgcccttaagacggcttgccttccaaaggactttaccatgcaaagctccagcccaaaaaaatttggcccgctgattaccgcgggcgcatggattggatcagcgcttccatgtgatccagatagcgctcgagcgcccgctggcccgtcgttgtaagccggtacacggttctgggcagccggcctgcgaagtatttctcgcagatgatgtactccgcttcctccagcttgcgcgcgtgtacgctcaggttgccatcggtagtcttcagcagtttcttcagctcgttgaagctgagtgattcgttcaccgccagggcgctcacgatcccgagccggatgcgttcgtggatcaggcggtccagttcgggcgcgcacacccgcgcctgatcaggcagccgcggcacttcccgcaccagccgccttgccccggcaactcgcaccgcagcattcgaaacttgtctagccaccgtacctcctcgcgataatcgtcccgaaaacgatgtgaagcccgccaaaacccgccgccatgatcgagttggcccaggcggccgggcagagcagcgcgagaattcccgcgaacatgaagcaaagccccatgatcgggacgactcttacggaatacgcccccgccgtcaccaccccggccccgtaaagcagcagccagactccgggcagcaggttgaaaacgccggcgcggtaaatcacgatgctgagcacggcggccgccagcatggggggagacaggcccaggacgaatttccgcccaggctgtgaaagcaagggagtctgcgccttccgcgccttccaaaaaatcgcggacccgcccaccgcaaaagcgcacagggcttcgagcccccacaccccaacccaccactccacttgcgggcggagtgaagcaaccaccgcagcggctaaagccgtgatcccgatcaccactccgccccatccggggacagcagtgaacgacgctgcgctttccatggtctcgcggatgaagcgcagatcgtccatggcgtggctgggcacgggcaccggcctggaccgtcgtgagcgagctggacccgcacatgccatagggtgtttatacagggcgcttgctgctttgtcaagtactttgtgatgcaaagtcgcgccaaccaactttacatgttcagcagcctgctaccctgtcgtcgcggtctgaaccccggaggggttcaaattgagtagccgtgggcaagggcacggttattgtgcccgccgcccacgggccgcgcaaccaccaatcctcccgaccccgcaggggtcgaacggttcgccccgctagaaccgtgaggatttaacgtgcgccgtcacatctccccttcgactctgaggaatataataaaagcttacgtgtgcaggcctcgcagggagaaaccgaaagtgcactctccgcagtcaccatcgtcgacctgtgtgacaactctgaatctcgcgggcggagcccgctttggagtgcggggagcttgctggccctgtgcacgcaggcagtagccaagcgggcaggccgcgagcaagctcgctgcatgaaagcggcggcgagccgccgcactccaaagcgcctgcggcgtcctcgggcccgccagcctggttatcacacagacccccttgggggagagggtggcccgccctaccgccgctgcgcctgggtcagccggtcgctccataagttatcctgcttcaggccactgactgacgaccttcggcgggtgcaacagggtctgcataaccacacaatactgttccgtcttctcgcgcaaggcgcgcacttgttcgggtgtagccttgggcgcggagacatcaaaacgcacgcggatactttcgaaaccgacggggacttccctggagatccccagcgtgccgcgcaagtccaaatctccctcgacgttcacttcaatgcgttcagtctggatgcccatggctgcggcaaccatttggcaagtgatttccgcgcaggccgccagggccccaaggagaaggtctccggagcacggagcggtgccggcgccaccgacccccgtgtgggcttcggcttgatagatagcgcgtccaatatccacggagcatgctgcgggcgacccgctctgtccgcctttcacacgcattgtgacccgcgaggagtcggggtcattgcgatatcgttccttcaagggcttttgaagcgatcggaggtccacgggaaactccttcaaatcactggtgctcgaaacatggtatactatactgaagctgaagagcgcagggcttttacccaaaggataggataacagggcgggttggaaacgcgagggggatttcgtaaatccccaggggcgagcgcatgtctcaggaaatgtcgaaggaagaaccgcctacagcaccacttcccgcggcgctgtctggagctgactccacgacgctcacgcccaaggcacggttcgggccatacgagattctctccctgattggatcaggcggaatgggagaggtttatcgtgccaccgacgtccgtctaaggcgcgatgttgccatcaaagtcctgccgggaaagctctccgcagatagggaactactcggccgcttggagctggaggcgcgttccgcgtcggccctcaatcaccccaacattgtaacgatttatgagctaagccaggttggctccacacattatatcgcgatggaattggtggaagggaggaccttgcgcgacgtccttgcctccggcccgatcccaatccggatggccattcagatagcggcacaagttgctgaaggcttggcgaaggctcatgaaaccggcattattcatagagacctaaagcctggcaacttgatgatcactcaagatgggttggttaagattctggattttggcttggcgaagttgactgcgacggccacccatgtgccagccctgcgaagtccatgttgcctaccgatgccgccccttcaagaaatacccacattgggtgccccccaaagtcagcctgggttgattctggggacggttggatacatgtcccccgagcaggcttgcgggcgcatgctggactttcgatcagaccagttttcctttggtgctgtcctttacgagatgctcacgggcaagcgcgcctatcataagcccacgaacgctgagaccttggcggcaatcctgcgcgaagcgccggagcccatcggtactttgaactcagaggttcctgcccccctttgttgggcggtcgagcggtgcctggccaaggagcccgaagaccgctacagctccacgcgcgacctcgcccgggatctggcggccatccgcgaccgcctgttgcaaccctttcctgagcgcgtagagagtcacgcgagtaatctgccggttcagcgcaccgcgtttatcggaagagaaagagaagtggccgctgccaaagggcttctgctgcggaaggatgtgcgccttgtcacggtgaccggccccgccgggattggtaaaacgcgcctcgcgctccaagtggcggaagagtgcagtgaaagctttccaggtggcgtatatctggtgcctcttggagcagtaagcggtgctgggttgatcccttccgtaattgctctgacgttgggggtccgcgaaaccgcaggtcagcctcttgtcgaaaccctcaaagaacacctgagaaactcatccagcggatcattcctcctcctgctcgacaacttcgaacatttgattaccgcggcgcccttggtttcggatctcttggctgccgtccctggacttaaggttctcgcgaccagccgggcggcgctgcacgtttatggtgaacatgagtttccggtgccgccgctggctttgccggatccacaagctttgcctcctctcgaagcgctcgcacactatccggccgtggcactgctcatgcagcgcgccagggctgtcaaaccggatttcgtgatcacaccggaaaacgccgcggcagtggcggagatttgcgtacggctggatggcctgccgctcgccattgaattggcggctgcccgccttaagttcctttcgccatccgccatcgaaacgcgtctggcgcgccgcctccaactgctgaccggcggcgcgcgggacctcccggcgcgacagcaaacgcttcggggcgccgtcgactggagttatgacctcctcaacgcggctgagcagaagctctttagaaggctttcggtttttgtgggtggatgcacgctggaatccgcggaggcagtttgcgacaccaaaagcgatctcgggttggacctgctcgagggaatggcctcgcttgtggacaagagccttctgcggcaggtcgaagcaccgggggacgaatcccgcttcgtgatgttggaaacgatccgcgagtatggagaggaaaagctggcggcgagtggggaggatggccttacccagcgcgcccactccgcctatttcctcgtgttagcggaggagggggcttcagaggtcagcgacgcggaccggcgcgagtggctggatcgtcttgagatcgagcacgacaatcttcgcgtggccctcgagtatctgacggattccggcaacgcggagtggggcctgcgactcggcgctgccctttttcggttttgggagacgagggaatacctttcggaaggccgggatcgattgcagaagatattgaatttggccggggcagcgcctccaaccaaggctcgggcgcgagtagctttcgcggctgcggttctggcaggggggcagggcgactatgcctccgccaaagcgcttcttgacgagagcctggcgatctcccggcgcttgcaggatcaacacggcatcgcggtctcactcaacgccctggcggtcaccgcgcgcgactctggagacatcgctgcctcacgctctctcttcgaagaaagtctctccctgtggagagagctgggcaaccccctggatgtctctcgttcgctcagtaatctggccaatgtcgtcaagttgcagggcgactatgggcaggcgcgcgccctttatgaggaatgtctcgccatcttccgcaaactgggcgatgggacgggagccgcttggtcgctcaaccatcaaggggatgccgcgcgcgaacaaggcgacaccttagccgcgcgatctctctacgaacagggcctggatacatttcgggagcttggagaccaatggggtatcgctagctcactggctgatctgggaaacctggcgcgaggccagagggactaccaggcagcccactcgaattaccgtgaaagtttgaagatttttcagcaactgggatataaacgcggcgtggcccgtctcctggaaggtttcgcgtgcctggcggcggctcaatcgctgtgggaccggtccctgtcgctggcggggacagcggccgccctccgtcaatcccttggcgcgcccctcaaactcgccgagcagcttgaattggaaagcagcctccagcccgcgcggcaagctctgaccaatacagcgggttcggccgcttggttggagggatgggggatgccgcttgaaaaagccattgatgaggcgctgaaaccaaacccttcctgtcccatgttccgacaggccgaaaccggcgctactccgccgtactcgggtcgatgagccggcgcactgcggaaatgcgattcgcggggaatccacccctcttggcgtgctctcgcagggtcgcctcgtccggcgcgagataaacgcaataaaccttgtcaccggtgacgtagctgtgcaaccactggatctccggccccatccctttcagaacgttcacggatttgcgggagatttcctgtagttgcgcgtcggtgagattccctgcccccggtatttcccgttcgatgacaaacttgggcatttccgcctccccgctcgccgcatactaacaagccggaatttctattttggactccaaccccgctccgcagcatacatccggccggcaacgaatgcaactgtccgtcgggttgcaacgtgttgcggtggcctcactgagattccgaccgcgcgagtgcctcctgatggttggccatccggaagctggaccaatgtgtttgcgtaggattatttcaagaactgtgacacagatgttggattcttttgaggaatcgcgagacaggttttcatcaattgtgacatcgagcgctggaagtccttcgccgtcaacggccacgatttcagttaccctgacatcctgcacccaagcggaaaccattcgggaaatgccccttcggccgacggataatttcgccgctacattgccacgctcggcttcttcagtaacctgccactgtgcattccggtggctctcggaaccccaaggggttcagccggtccccgtccgaaccccggaggggttcaaattgagtagccgtgggcaagggcacggtttttgtgcccgccgcccacgggccgcgccaccatcagtcctcccgaccccgcaggggtcgaacggttcgccccccccaagggccgtcaggttttaacgcgcgccgtcggtagtggtacagtctgattttgccagcgggtgtacgacaaggtttcacgcagaggcgcaaagggcgcaaagaaggccagcgcgacggcctttttccctttgcgctctttgcgtactctgcgccttcgcgtgaaaccgcctggagtctgcttatctgaggtgcaggtcaaagaaatccgaggcggcatgataggccgccagccaggtgcgatggcgcaagaaatcgtgaatctcgtccggaaagacgagttgttggaattccactccctgtttccgcagcgcctccaccaggcggaccatctcggtgaagggaacgttgcggtcatcatccccctggaccagcaacacgggcgagcgccacgtcttgacggaggccagcggcgaagactcccacgccagccgcgccgcgtcagcacgcgcggcaggatcgtaggagggcgtccaattctggatttcccggttccagtcgtgcacgccgtggaagtccacgccgcaggcgaatagctcggaggctcgggccaagccgagggccgtcaaatacccgccgtaagacccgccccacaggccgatgtggctcgagtccacatcggcccgctggcgcagatagagcccggcgccctccacatcgttaaactcgctcgccccgctggcgccgtagttgagcgcctcgcgaaactcctgcccgtagccaatgccgctacggtagttgagcgatagcaccacgtagccccggctggcgagatactgattcagggcataggcattgtgatagtagcccatataatgccagccaagcagcatctgccggcgcgagccgccgtgcatgaacactaccgccgggtgccgctgcccggaggcctcatccttaggcagaaaaagctgcgcgtggacgcgcaggccgtccgcagcggggagaatcacctgctgcggggtgacgagatcagcagcaggaaagtcgccgggaagggtttcaggagcgaggtcgcgaattccgctcccgctcgccacaatcgccggccgcgcgggacgctgggcgtcagaatggaaaagggcaaccgcgccgccgtcgctcaaaatcacgggtgaccattcgatgccttcgccccgggtcagcgccgtggggtgatcgtccgtgactggctcggaccaaaggtgccgccggtcaatgtcgtcctcgttcgaggcgagaatcaactggcgacgatcgcgactgagggaaacgaattccacttcgaaatcgccgggcgtgagaagctttgccgcgccacccgcaaccggaaccgaataaagatgcgtccagccgtcgcgctcccaggggaaaaccaagttgtcgccagccccccaaaagacttggtgctcagccacaatctcgcggaagacgctgccccgccccgcctcggcgcgccaaacctcgtgaccttggccagtggcagcgtcggccacgcggatcgaccacggcggcccggtgcgtttcggcccgaacataagcccatcgcgcgaagcaggaagacgcacgaaggcgacttggcggctgtccgttgaccagaccggctcgaaatcctggtcggcgctcggatcgagatactggatgctcttgcccgccacactgtacacccccacgaagctgtgatcgccacgccggctgacgaaggcgagctgcgaaccgtcgggcgaccaccgcagcgagctgtctttgcccttgtcgtggatcagttgttccggcttggccccttccgccagcttgaccagccacacctggtccttgaaaacgtaggccacactatcgcccttgggagaaaccgccggcgaatgcccctccgccagcttgcgcgccgccccaccctcgatggagacaacccaaacgtcctgttcgaccccctcgggggcgctggccgggttggggtaggagccgcccgtctcgaagtcgcccccgcgtacgtagacaatcgcccggccgtcaggagtccacgcgagttcggcgatctcctgaccgtcgtcttgcgtgtaccgggtgagctgccgtgacacatagcctccgccaccacttggctcagccacccagatgttgcgcaggccgcgcgcattgaacacccaggccaccctgctgcccgagggtgcagccacgagctcggtggggaagggcgagctcatcacctgctcgagcgtgaacgagccgcgcgcggcagtgacgcccacgagcacgaaaacaatgaaggcagcggcttggagtctcttgccagggtgtgcaagcacgattgttcctccttgcgcggcgctatggagtgcggcccgccgcggcgggccgcggctttatacaggctgcggaaaaacgcctggaggctgtcattctgagcgaagcgaagaatctcggcagttgttaagtgaagcaactacagggatccttcgtcgtctgcggctcctcaggatgacaccctcaagggtttttccgcggcctgtttgtagcgccgaccccgcctcgcggggtcgccattctcttgctttgccaccctgctgaccccagcatgcgggctcagcgctacagcgcgggatcgagcaagctcgcctgctgaaagcggcagcccgccgactggcgggccgcactccagagcttcgccgattggcctgaccgcgtagcccaaatgctacagaacctcgccgcgaaagtaaatggcggcgcatccaggcgcagggccgcgccaaagcctcgaagttcccccaaaggggaacgagatcattactctcgcagcggctggatgaaacctacggacaaggcgcttgggcggtttcccggccctctcccccttgggctgagcatgtcccgtatcttcggctggacaccgagggtcggaggtgaaagaacagcgctgccaagtgagcgagcagccctctcccttggggagagggtgtcccgcgacggcgctttttccagccgtcgcgggacgggtgaggggttacttctcttcgcaagccctgtggctcggctaaagcttcacaccagttaaagcctccccctggccgtgcggtccgcttaacaccagctagtctcctgagtccgagattcgttaaagaagtcagcccgcggagcgggcggcatagtttagcccacggcgacaaccgtgggtcctgagtgcggccccctccccccgcccagcgggggagggggaatagaagggggtgggggccatttttcccagggctttcgccctgggctacagtatttcgcccctggcggggctgcgaaaagccccccggcatgaggaagactttgtcaagggacttctgactcaggacactacttgaaactggatcaaagttcgtaaaggccccatcgttgaccctaagtggaaggtggctcaccacagccgcaggcagcattgttactggctggtgtttcggaagtccagaaagtgcgagtgaaggctaccgccgctacgattcgcggaccatccccacgcgcgtggggagaacacctgaaccgctgagacgctgagacgcagagacggaccgtccccacgcgcgtggggagaacgtaatcgagcccctgggtgtctgccacttccccggaccccccccacgcgcgtggggacaaccctgcgttgattctgcgcgaaatttgggccatcggttcacccccacgcgcgtggggacaacggaaagataaacacagcctccgtctggtagtatcggttcacccccacgcgcgtggggacaacgtttacgggccaatcggcgtagcgcgaaacctcggttcacccccacgcgcgtggggacaacgtcaaactgagggatgccctcatctccgccggcggttcacccccacgcgcgtggggacaattacaggttggtcatgaccatcgccgcagggttcggttcacccccacgcgcgtggggacaactcaacatccaccctagcgtcttgcgggaatcgcggttcacccccacgcgcgtggggacaaccagcctgtcaccttcagcacacagcctgtcaccggttcacccccacgcgcgtggggacaacgccaccggcggcgtgcaaaccgcttgggccaacggttcacccccacgcgcgtggggacaaccactacatctagtcgagtacccccttgacacgcggttcacccccacgcgcgtggggacaactagcagttaccatgttcctcctttgcctacaacggttcacccccacgcgcgtggggacaacggggtatccttctcctcgttttccgacctttacggttcacccccacgcgcgtggggacaaccccatcatgctctgcatgtcgagcgcgccttgcggttcacccccacgcgcgtggggacaacagttacgagatcaagacttgggacggaaccaccggttcacccccacgcgcgtggggacaaccgcattagtgtcgaatacggccaatctaaatgcggttcacccccacgcgcgtggggacaaccttatcgaggtttggcattcgatgaaccgagccggttcacccccacgcgcgtggggacaacagacgctggacaaattcgggcgcccgctctatcggttcacccccacgcgcgtggggacaactcgggatctggcagtccggggaccggcatgtacggttcacccccacgcgcgtggggacaaccccctcgtgggaagccaggcaaccatcgtaagcggttcacccccacgcgcgtggggacaactgacgcaactgctgcgtcgtgatgttcgcgcccggttcacccccacgcgcgtggggacaacggcccggactccaacccttcacttcccggaaccggttcacccccacgcgcgtggggacaacactagagaagtcattgattccacggcatacgaacgaggaaaaggccctcgaagtcttcgatctgccgtgccgttcgaccccaggttcggacttgaaagccctgttcgttatcgctcgagtggagcatcaggcaaccgcccccttgggccttggcacacgccttttcccacaagcgctcgcggaccagggcggaaacgcgtcccacgaatacaccggcctgaggttccagaaaccaccgtgtgagttcgccgcgcagccctggcgggacgcgctcaagaatcaggactaccatcgtcgggctccgtctcgtcgatctcgggggcgagcatacgtcccccctcgactactccttccaaatcgtcccagaggaagccgggggcggcggcatccacgtcgaagctgtcggccggcgacgcttttgacagcatcagggcggcttggacgtccgggatgattctctccagaagccttgtggacacaaactgatcgcggcaggtgatacggacgcgccgctccagttggcctaccccctcggcggcggcccgaaacgccaccggaactgtaacctcggtcttgtaaaggtcggcgaggtcgtacacgaaggacagcatcttgccggtatggataaagccgagggcgggcgagaaaccagccgatacgatggccgcatggcagattccatacaggcaggagttagcggtcgacaaggctcggttggcagggtccgccttgctccactcgtcccgtttatagctgcggcccgaccacgtgatcccggcttcctgggcggccttggcgtaggcatcgcgaactcgcacgccctccatgccccgaatttgctggagagtcagggcgggctcgaacttctcggaaaaacgcaactggtagaggcggcgcacgacctccatatggaaaccctggtgggcccacacgcgcgcctgatgcaggagattgccagcattgcgcgtctcccccatgcccacggcgtagaagcggactccctcctccccgcaccacgccaccaggcacccatggtccgccagcaccgagatggcggcgtgagtaatcgagacgcccggacccaacatgagcaaagccaggttggcgcaggggacaggcaccttcccggcttgatcgtgaactgcaatggcccggtcctcctggtcgacgcggcagtgctccacgtacaggtaactccatccgtcgctgaatttcggtagaacgtggagatcttggattctcatattgcctccacagacggcgccgcccccgtaacgccggcttccagccagcacgcgctgtcgcgtcgatctccgatcgacgtgccttgtagcgtcgacctccgatcgacgacggcggtcggagaccgccgctacaaaaccaagcgatgaatctcgccttggtacggccaatcttccggacgtttgactaaaccggcacggaccggattctgtcggacatactcgtatttctcccgataggattcttccgatctcatgacgtgatcgaagaaatccttttcccagtgcgtgccttcaccttcatcctggcgaaggactttggacaggtcgccccgcagggctttgacccatttccacaaaggtggggactcgcgacaaaagccgacgaaaagatggatgtggtcgggcatgatcatgaagaaccccacccaaactagaaaatcggttgcccgttcggagaatctcgtgaattcctggtggattgcggtgtttgccaacgagcattttcgatcctgcgtacagagcgtaaggtagtagatagggttgtcggtgtagagccaatccagtcgccgtaagcgtggtttgaatttcatttgtagcgccggtctccgaccggcggtcccattgatctgccatcagccagccttgtagcgtcgatctccgatcgacgtgacggcggtcggagaccgccgctacagcgcctcggtcgagggtgaggtgcggcaaggcgccacggagagcaggccgaagccgaaggccttccccggcccgatgccgcgcagaagggtgttacggaatttgtcgggctccgttacttcgagaatcccttcgtaccggaccgagaacaagcggggccccccgccgtgccgttcctttcccgtgcggtcttcggtatggctttcctgcccctccttaagtttcttgaaatagatatagcccgactggaccgtcgtgcgatccctgtggatacggaatcccgacggctcgtcgcgcccatcctggcggagccgccattcagcaagccagtccagaagccggtcatgcggcacgggaacacgtttccctatccacttcgcttcggcgggctttccatcccgctccaacgaatgcttggagagccgccgtgtaggattagcggccaagcggaagcgaagacgctgctctttggtgaaagagggatcgaactccttaacctcgggttcggccgtaaggaggtagcgggcgttatggaacgcgtagttccagtcaggcttaacggcagagccagattgtacgagaatcacgaccccgccgcgtggctgcgggtctacgcgatataaaaacccgtggtccgcttcacgttttacgtggacgtggtttctggcgaagtgccctagcgtgaaaggtgtgaggaagtcaggatcatcggatttttgcgacgcgcagggaaacgccatgcaaaggcgttggtggacgtgatagaggtttcgcagccacgttcgtcccggtcggggccggtcggggttgtcgccggtgtcgatcaggaggcaggagaggtacatggctactccacctcctccgccgcaaggcgacggcggcgcgtctcgagcgagcggaatttgatgatctcctctcgcttctgttcgatcctatcccaccagcgcggctcctcgggattgatgcggtccaggcccatgcccaggccgtactcgatcatggtgatagcatcatggcaatagcggcaaagagagcgcaagtcatcctgcgcctcgtctcccccagcgcgccgatatgtgatgtgctgcacggtggttgctggagccttgcagaagacgcagagtccggcatcgcgttcgagcctctctttccgccggtttctatattctgtgttggtgtaatccgctcttggacgaggaggggccggcgcttcgatctgtgccggttgagccgcaagttgtacgtcaccttcgggtccaacttgcaattgcttgcgaattacgaatcgaggttggtgcgcgggcgggtcgaaggtgagcgggacgtcgtaccagatgagcgcgtcgtcgggagcctcgggctgttcttcgctcggctcccagtccagtagacactccagtttttgcggcgctggctctgcctccagacgtttccgccaagtaaccgacctgagggcggatagcaaacccgagtgttcggctgttggatgctccagcagagggcgggagggcgggcagcactttctgccgaggtagagcgtccatgtgggagctctgacagcggcgtcgagttcggcgatcaaaccagggtcaccctgaagggcgaccaggaaggacgcgtcgcagaggtattcgcgccgggtgagcatggcgccgggcttgcttccgccgtcggctgtgcgcatctgcattcccgcgccgacggtgtgatagtcccaccagcggaccccgggtgaatcgatgcggacgcccatgcgctgcgtggcgagtctgggaagccatttttcaggggcctcagcgcggctgacgcccaaggctgcgcagagcagccccaacacgcccgatttggttggcgcctccgccgtccggcggacaacaaatttcgattgctgatcgccccatgattgaaggggaccttcgaggcggaggaacagggtgtttgcgctcatcaggccacctccgcgttcacaaccaccttctgaacctcctcccagtcatagccgatttcttcgactacggaccgtacaagctcatcgagcgacttaaggttgtccgcagtcagttcgatctcacggattgtttccttttgctcctccttaaccttctcgcgtgcaactaagggaaaacgaagattgggagagaaccaaaggcgcttcaccggctttccgtatccattgtcgatgtcgtggacgtactgggcgagttgcgcgatgctctgggagatgatgtcgcgctcgccctgggctgccaccggccgggcaaaggcgttggcgtagctgatgggagtgttcctgatctccaccagcacgccatccggtggattgtgcgccgcgaaactgttctgcttgccggtggggttggtcaacgccgccccgcggacaaaggcaccgagcgtgtgagcggccaggtgctctttattgcccgagaacccggcgagattcgtgaccaaagtttcccaatggacggagaagtacttgtagtaacaagccgaggcgtacatggcctctccgatgtgggcgccgccgacgtcttcgcccttcacatcgtctgcggcaacgaaatagtccacttccggacgcgcctcgtgggtcgagatggcgtgtcccacttggagagcagcctctatttgggggtccaagcctttccacacctccttcgcggtcttcgagggctctaacatgcgtcccgacaacgccatgtctggcatgtgacgctctcgtgcgatcagttgcgcaaatttgcgggcgacccctctgatttgctcctcgccagacttgccactcagatcgcgaaggtattgcgccatgcgcggcaacgcgctttttgatagaaagacgatgacatccttttcttgtccgtcgtcgcccgccagcactccgcatctctggacgacttgttgggccaagtcgaaaaaatcgtccttttccttaccctgaaagttctctgaaagtaacttcggtaggcgccgcgtacgaactccaccacataacaacttgaactcatcgctcatgcggatgctccgcttgaggcactggctggaaatgcgcgagcgcaagaccccgccaaaataacaggtcttgggggcgcccaaatcgtcccggttcaggttggccgggctgtggttttgaatggcgtgaatctcaattaacatgacggtcctcctttgaagatttcaaaaattcctcggcccagttgagccgggtggtctcgcgttcccaaatggaaaggtcgtttgtcagcctcacccagtcgactttgaggtttttggaagctatgaggtccagcgcccagcgcagggcgggctcgattttggcgagcggcagcgtgagcagcccgtcaaacctttgggcgactggccggattgtagcgtcgatctctgatcgacgacggcggtcagagaccgccgctacagcgttgttgccgcatcgcccaagctgccgggcgagcgtctggccgggtgagtgctcgaccggccggaatgcgtaaagtttagcgatcagccacgccacggcacgacggggcgcgcgctggttctttgctcgcaagggccaccagagtccggcgaagagatcaaagccgtcaaccgattggtcgaggccttgcccggcatgcctgcgaagcagcgcgagttcaccggacttgagatgtcttaggacctcaacgtattgctctgttggagtcacctgtcacctccctttttccggccggccttttcatcggctcccggcctcggacgcatgtccggccttgcgttggcgatctctcgtcgccggcggagggcagcggtcgtgtagcccggtgaaagcgatttggcgacggcggccatcagcgggctatatgcgcgggctgcctgctcccatgcatctccgcctgccgcgatcaattcggccattttctcggaaacctctgcttccgcttgggggcgaatggcggcgataacgggaggaatttcgaggtgttttcgcttttgggagctttccctcggcttagctttgctggcaagcttccaaccttcactccgccacctatcgacctgttggagactcccctcaaccttcccggcccccggcgcggtcaccagggggatctcgtattcgaccgcctcgaggtatttgtcgttctgcactgtggcaaagctgaccgcccacaggtgtctttcgggaatggcctctttcccagcgagaattccctccgctatgtttgcccattggcccgccgccgcgtcggccgcaccgagggcgttgctgggtttcagaacgtcctcgccgtcatccaaggtgtgtgggtcgttccagacacggccctcgtcgcctccggtcacctttgtgcttcctatgcccgcaaacacacattggcgtatcaaagcttctttgcgcccgcatgagacgcaattggcttgaggctcttcgggattgtcgagccacacgcgtcggggcagccaggttaaccccataagcagcggaacactgccacattccggaagcctttgatctgccctttcccatgtgggcgttccaaggtctgggtccgataccttccgccaggacaggcgtagcgtctcggaaagcgagacgccaactgggatgacataaaccggtggtttttggttcacgcccggcggcttaccgcgcccggcagacgtcgcaaacaacggcaggcgcaacaaacccatcgcgcagcaggcccgacacaatccgtcctccatgtcggttgaatgccggaaatgccacgagttggtgccggtgggtacttcctgaatcaggtaattagcggggagttttttctctttgcctgattcggtcttgcattgatagaagcgcttcccgtcccccagaaggttgaaacattctttgtggtcatcgagcttcttgaaccaatccgagcgaaacgaagagatcgaatccttattatccggcggatttcccgtgcaccaataaagcaacgcgagcaggaagcggaggatcgccacgcggtccatggggttgctggccgcaatttggcgaattctgcctgcttgcgccagcgccttacgaatacccacgcgatcgctatgtccgtctttccagagaacgggaatccactcctcttcgagcaagttgtagttcacggcttcctccttgtctgggcaggatggggcagcaaggccaggagggcttcggcgacgcagccgacgttgaggcagtgatcacggacggtgatgccgggcttaccgtctttggtcgtcttcgcccaacagtcttcgtggcgcggaggctcgcccacggccagcaccggtctgtctcttacccttggagctggcatgcacccaattctatcaaaagatcgggcgggcagcgcacactttggcttgtgagcggcgagaacgtggaataggttcgccccagcctgcgagggccggccgggtcaagcaagccgagcactggcagtggcgccgcgtggggagcggctctttgtcagtccgcggcctttggccccgccgcgttccgaccggctcatcggagccgggccggtgaagctgcccatggcgagcctgcggcggtcgcgtccaaacgcctacaaaagccgcagacctaaagagcaggtctgcgctacgggaaccgcccggcattggctgggcagccgatccaagtgcctgtttcaggctacgacactgtgtctcttgacacgaggctaggattgtggtaagctgctcggctggaatggtcaggaatgccaagccgcaaggattaaatgacaagaaaactaggccacaacgacggatcaaggggcccggaatgccaaaaagatgttaaaatagagggaacgaactcaatgatttattgcaaataaacgacttaacttagttcgttttgcaaaaacgaactggttttagagtgaaaaaagtgcgcattttaggcaaaaaacgccccttttcggcctttgaggggctatatttgggcttctgcgcactatttaggaagacaaaaaccaccgggttcgaggctagggagggcaggtagcgcagacctgttttttaggtctgcggcttttggcctcgcccggctgaactcgctcctcggcaccgcgctggtgaagttgcccatgggtcgaagttgtggcggccgttcctataccggcaaaagagccgcagacctaagaagcgggtctgcgctgcggcttttggcctcgcgcgtggggaccggctcatcggtgtcgggctagtacgatcagaaaagccgcagggtggaaaaaccagggtggcgcatacgtcccgccgctctttggcaggatgtatgcgccctcgcgaaaggggcgcagggtcgaaaaaccacgtgctgaaaataaaggggatagctcaaattggcgagagagttggtcatcataaccgtttttcatgaactttcgccggccggaggcccatgacgacagacatgccaaactacggcatgtctgcgccacccctggttttcatcgaccttggacggggctattttgggccttcaatgcaccacctaggaagagaaaaattggatggttcgaggctaggaagacttttcaagtgcggcccttcctacctcggggatgtaccttgccgaattgatggaaaagccgcagagtctctggaaagcgagactctgcgctacccactacccgctctgctatactgcggaggtggttacattgttgggcgtggcggaactgcattgggggattcccactgctcaatccgccgcgtcgaaaggggtttttgccgtgcctccagttcgtttgaccacgatggtgaaagcggcgggttgagcggccaaactgagtccaagtattttggaccgagtgctggccaagttgccgaaacaatccgacgccaacgtcctggtgggcttcgacaccaatgacgacgcgggagtgtatcaactcgccccggacctggcgctggttcagacggtggatttcttcactcccgttgtggacgatccctacaccttcggccaaatcgcggcggccaatgcgctcagcgacgtctacgccatgggtggccggccgatctccgcgctctccatcgtgggatttcccaacaaagaagagggcctcgaaatgctggaggaaatcctgcaaggcgggcacgccaaaatgcaggaggctggctgcgcggtgattggcggtcattcaatcggcgatgaggagatcaaattcggttatgccgtgaccggcctcgttcacccgcaacgcattctcaccaattgcgcggcgcggcccggcgaccaactgctcttgaccaagcgcctgggcaccggaatcatcagcacggcgttgaagataggagaggctagccaagcggcggtgatggcggcaagcgaatccatgtgcgcgctcaatcgcgccgccagcgaagtggcccggcaatttgacgttcactcggccaccgatatcaccggcttcggcttgctgggccacgcccgcgagatggccgtgggaagcaaggtgagcctggcgattgactcgactaaggttgaattcctggcggaggccgaggagtattcgcgccgcgggtttctgccgggcggccttaaaaggaatatggacttcgtcggcgactgcgtcgagtttgccagccgcgttccgcaggaggtccgaaacctgctcttcgacccccagacctcgggagggctgctgttttccgtcgccgctcaagacgctgctggactcctcgaggccttgcaggccctcaacacctccgcgcaagctgtcggcgaagtcgtcgaaaagacgcgtccgcttattgtggttcggtaggctgagatccgccggtggattcccgcttgcgcgggaatgacgatgccaggcatgagtgccctgaacaccggtggattcccgcttgcgcgggaatgacgatgccgggcatgagtgccctgaacaccggtggattcccgcatgagcgggaatgacgatgccaggcatgagtgccctgaacaccggtggattcccgcttacgcgggaatgacgatgccaggcatgagtgccctgaacaccggtggattcccgcttgcgcgggaatgacgatgccgggcttgagtgccctgaacaccggtggattcccgcttgcgcgggaatgacgatgccgggcatgagtgccctgaacaccggtggattcccgcttacgcgggaatgacgatgccaggcatgagtgccctgaacaccggtggattcccgcttgcgcgggaatgacgatgccaggcatgggcgcccagaatactggtggattcccgcttgcgcgggaatgacgatgccaggcatgggcgccccgaataccgtcattcccgcgaaagcgggaatccactacccgcgtttgggtgagtgtcggggtctcggtacgtcaagcgtggtgatgtaaaatcgcttctactacgtgttaagatggctggcatgaagaagcgtataccagttcaattgatcctcgcagtttcaatcctgatcatcggcagtggcttggcggggggcgaatacttcctggtgaagtggtatccagggcaccagcagcgggtgagcgtggcgaccctccagcagcgcccctaccacaatgatgcccttggaattgatattcaaatcgcgaacggactctacgggaatgtcgaggctttcccgggcggggtgaagatcagtcgctccgtgttttggagcatcggcccttcgctcaccatcacctcacaacccaaccccgacgagacatgggagttttctcaagaggctctggcgaaatgggaggccaagggcgtggccgaagaccttccgctttatcatctcgagcattcgaagattaacaatcgagacgccatgctgattcgcgagctcaaaggccgctacatgcacttgacggcaagaatcatgtgccgagaaaggatcattgaggcggattgctcccctggagcggaagatgaggttctttacatgcaggcgtgcgacgagacgctgcgcagcattaaggccgccggggctgagccaccgcccgccgctccacccggcgttgtcgagctctcgccggcggtaaaggttaagtagcaagctggccgtcaggagcgcaaggcggcacaaccggcgaagatggacgatggccgattggcaccgcgattcgagaccgtgggttttcaatcgacaatcgacaatcggcaattccggagaccaagcatgccaaagtgggaaatcgtggagggtagccttgcttccgcttgcggcttccgtggggccgctatagcggcgggaatcaagaaggcgcggggcgagcttgatttggccttgatcctctgcgacgcgcccgccggcacggcagccggcgtgtttaccaccaaccgtgtggcggcggcgccggtactcctatcacggcaaaaccttgcggaaacccacgggcggtgccgcgcggtgctggtgaactccggcaatgccaacgcctgcacgggacgcaaaggcatgcaggcggcgcgagagagcgcgcgcgcagcggccaagctgatgtatctccagcccgcccaggtcctgccggcctccacgggggtcatcggggtgccgctcgagctcgacctggtcacgagtcaacttcccaccctcgtggcgagcctttccgtcgaaggcgcctccgcggtcgcgcgcgccatcatgaccaccgacaccttctccaagtcgtgcgtcctccgctcggaggtagggggaaaacccgtgtacctggcgggagtcgccaagggctcggggatgatcaatccacgcctggccaccctgctttcctttgtgaccacggatgcgcttttcgctccccgcacactccagagcttgctgcgggcggccgtggatgtctctttcaatcttgtcaccgtggatggagacacatcgacgaatgacaccgtggtggccttggcgagcggcgtttcgggcgtcagcgtgcgccccggcaacacaagctgggcatggttcctggagggacttacgcaactctgccagagcttggccaaaatgatcgccaaggacggagaaggggccaagaaactggtcaacgtcgaggtgcaaggggccagaaaaccttccgacgcggagcgtgtggcgcgcgccatcgccaactcacccctggttaaaaccgccctcgcgggaagcgatcccaactggggccgcatcatttgcgcggcgggttattccggcgcactcttcgaccccaacaaagtggatatccgcgtcaacgacttgctgctctgccgggacggggtggataccggcttcgacgaagccgccgcgcgtaaggagctggacgggaaggaaatgaccctccggctcgacctccaccagggcaccgcctctgcccatatctggacctgcgacctgacacacgactacatcaccattaacgcctcgtatagaacctgaaaggatttcatgtcaggaattattggctatatcggaaacaaacgcgtcgtgcccgttttgttggaaggattgcagcggctgcaataccgcggctacgactcggcgggtattgccgtgattcagggccacaacctggaagtgcgccgcgccacgggcaaactgcacagcctcgaagaggtggtccgcctgaatccggtggacgggacttacggcgtggggcacactcgctgggccacccacggcgcccccacggaagagaatgcccacccgcaccgcgattgcaaggggacggtggtggtggttcacaatggaatcatcgaaaattacctggagctcaagaaggggctggtagacgaagggcacaagttcgccacggaggttgatacggaggtcatcgctcacctggtggagaaacacctggagggcaacgccgagttgccaggggccgccaactcgaataatctcgaagaagcggtgcgcgccgccgtgcgccagctccggggcgtctttgccctggccattatttccacccgcgaccccaacaagattatcgccgtgcgccaagggccgccggtggtcatcggcctgggcaaagacgaatacctggtggccagtgacgttcccgccattctctatcacacccgcgatcttttctttctcgccgatcacgacctggccgtgttgacacccaacggcgtgaagctgagcggctttgacggccaccccgtctcgcgccgcgttcagcacatcacctgggatcccatcctggccgaaaaaggcggcttcaagcacttcaccatcaaggaaatctacgagcagccgcgcgccgttcgcgacaccgccctgggccgcttctcgctggaaaccggccaggtgtttctggacgagatggaaatccgcgaagaagaattccgctccttccgcgacatcaaaatcgtggcggccgggacctcacgccacgcaggcctggcaggcaagatcatgatcgagcgggtggcgcgcatccccgtggaagtagactacgcctcggagtttcgttatcgcgaccctctggtcgactcgcaaaccctgaccgtgctcatcactcagtccggcgagacggcggacaccatcgcggcgcaacgcgaggcgcaggccaagggctcgaagacgctcgccatctgcaacctgctgggaagcatggtctcacgcgaagcgcatggcacgatttacacccacgcgggccccgagattggcgtgggctccaccaaaacctttaccgcccagttggcagccctttatctcttcgccctctacctggcccaggtgcgcggcttcctctcctatgaagagagcaagtcctggttgaaggccctggcggagttgccgaaacaactggagtccgtcctccagcgggacgacgagatcgccgaactggctcaacgcttctaccggtcttcggattttctcttcctcggccgcggcgtgcacttcccggtggctttggagggcgcgctcaagatgaagaaggtttcctacattcacgccgaagcatacccggcgggcgagatgaaacacggccccatcgctctgatctccgacgggctgccggtggtggtgattgccacctgcaattggaactcgcctttttcccggcaacgctacgaacgcaccatctccaacatcaaggaggccaaagcgcgcggcgccaccatcatcgccctggtcaccgagggcgaccgcgaagtgcgcgccatggcggaccatttggtggttctgcctcataccagcgggacgctctcgaccgtcctggaagccatcccgctccaactgctcgcttaccacatcggggtgcttcgcggttgcgacgtagaccagccgagaaacctggcgaagtcggtgacggtggaatgacagtcaaaggcgcttaaaatggatcaaagatgggccgcctgggccagccgattgaatgccatcgcgcaaaacggtctcgcttttacgcgcgatgcatttgaccgtgagcgatatatgtcaatacgcaatatctcaacagaaattatctcttcatatacggacattgacacagccacagttcgtgatttctttgcgcgtgaggagggctacgccacgcccaaagtggatgtgagaggcgtggtgtttcgcgagggcacgctgctcttcgtcaaggagcccgatgaggggcggtggagcctgcccggtggctgggcggacgtgggggagtctcctagcgaagccgtggtgcgggaggtgctcgaggaagccggctacacgacccgtgctgtcaaactgctcgccttgtatgatcggaacaagcacccccatccgccctatccatatcacgcctataaaatcttcatccggtgctagcttttgagccaagcgcccgccgggagcgcggagacggaagcgcggttctgcgaggaggatgcgatacccgagctttccctgtcgcgagtcacggcggagcaaattgcgcggctcttcgaacattatcgccatccggactggccggcagacttcgattaggaacttggcagcagtgggggcagcgtcttgaaactcgtctattcagatcgttatgacttgaacctgggggaccacgtgttcccgtccatcaagtatcgtctggttaaagaaaaggtgcttcacgagcatattgccgagccgggagatttcgtcgagccccctccagcctcggacgacgacatcgcattggttcaccaccgggaatacttgcgcaagctccagacgggcaaactctcctacctggaagtgctgcgcttggagattccctattcccccgaactcatccgggcggtttggctttgcaccggcgggtcgattctggccgggcgtttggcgctcgaggatggagcggccgtcaacgtgggcggcggttttcaccatgcgtatcctgaccatggcgagggcttttgcgtgttgaatgattttgcggtggccattcgccgcctgcaaaaggatcggactatcgagcgcgccatgaccgtcgattgcgacgtccatcagggtaacggcacggcggcgatctttggcggcgaccacacggtgttcactctgtcgattcaccaggagaacaattatccctacccaaaaccgcccagctcgctcgacatcaacctgcgcgacggcgtcggcgatgaagagtacttgagtgaacttacgcagggaatggacacagcgctggcggaattcagccccgacctgatcttctacgtcgccggcgccgatccctaccgcgaggaccaacttgggggcctgaaactctctctcgcgggcctggaaaaacgcgaccgcctggtttttgagaaggcaagagcgaagaacacaccggtggcggtcgtgctggcgggcggctacgctcgccgactcgacgacacgatccaaatccactccaacaccgtctgcgtagccaaagagtttgcaaagtagcgccgacctttaacgcgctgcggaaaaaccccgccgcactgtcattctgatcccgccttgcgggagaagaatctcggcagttgtaaaatcaagcaactgcggggatccttcgtcgtccgccgataagaatggcgggctcctcaggatgacagcgtcaagggtttttccgcagcctgttgggtcggcaccgcgcgcaaaaggtggcgcatacataaagaacaatgtatgcgccacccgcgcagccaaggagtttgcgaagttgttggcgctgattgcaccggaaacggggcggcagagattagcaagcagccctctccctggggagagggtgtcccgctgccggcgctttcaccagccggaacgggacgggtgaggggtcggtccaacgtgaatctttgaaggccgcaggtcttcgcagcccatcccagatcgttacggtttcggaagcagcctgcccagctcgcgccaggtcaccaccgtgatgtgatattcctcgagagcctttcggaattccgcgctcgtcaccacgttgaaatcgcgctgccgccaggcgctcccgtagtccggatggtcgacggtgacagcctgcatttcggcgtcatcgtaggcgaggtgaacgatgagctccgaaaccccgggaggcatagtcctcagaatatgcgtgtaatagctcaaccactcgtccggcttgatcggcggaacggccatgaacacgtggtccaggatcacgtcggtgggtttgagggctgcgtacatatcaggtggcacgccgggaatcttcaatatcaaaaatgggaggtgataatcatgcgcgacgttgacgaggaccgccagcaaggcagggttggcgaaaagcaccgccatgtgtgaatcgaggtgggtgggacggattcccatcttcagagcagtctccacctgcgcccggacctctcgctccgcctcttccggcttgatatgccgcacggcttctccggtatcggaaaagagataaccctgaggatcgagcagcgacgggacctggtcgcgtggcgcggtaggtccccacttgtaggttttccattcactcgtcaaggttaggtgcaaacctaggtcggcatcggggtgacccttcgcgtagtccgctacttccgtcagccaggggcatgggaccatgacgctggcggacgacacggcacctcggttcagggcctcgaagctggccatgtcctgcgcgtgcgccaccgccaggtcatcggcgtggatgatcagcagcttggcaccgccagggtagcccagccgctgagcaagagcctgatcttgcgcgcctgccggtaaagagaaggtggtgagaagacatgctgtgaagagactgttggtccccatgcgtgacctccgggcattcggaaaaacgaggggtagcgcggacccccggttttggggtccgcgggttgtccacgggcctaagaaaaagccgcggaccccaaaaccgagggtccgcgctaccctatattcacgaggagaggattcatggaacctgtgcggtagccttccaggtccagggtgacaaacttgaagccgagtggtttcagaacctcgaccaacttgcgcgccatggtcgggtccagcgcacgcggcatttcctcagcggaaatctcgatgcgggcaagttcatcgtggtagcgtacccggaactgccggaaaccgagtgcacgcagggcctcttcccctttttccacaatcgccaagcgttcgggcgtcacctcgataccgtaggcaatacgcgaggaaagacacgccgacgccgggcgattccacaccggcacatcggcgcggcaggcaagttcgcggatatcagccttggtgagacccgcgtcgagcagcggagttagaactttgtgctcgcgcgcggcgcgctggccggggcgccagtcgccctgatcgtccacgttaacgccgtaagcaacggcggcaaatccgcgctgggcgacgagttcatcgagcttgtcgaatagttcgtccttgcagaagtagcagcggtcgggattgttggcgcgataggcggggttcgagagttcgtcggtggtgatgaattcgtggggcagcttgaagcgcgccaccaccgcctgcgcctcttgccggtcgcgctcggagtagctggcgctcagcgccgtcaccgccagcatgcgctcgcccagcgcccggtgcgccgcataagcgaggtaagcagagtccaccccgccggaataggcaaccaccaacgacgacacttgccgcagttgctccagcagtctcccctctttcgcttccacttcactcatccctgtcacctgaattacagaataacgccgcaaggccctacacgcaaactggcccgctaacctaagtagcgcggacccccggttttggggtccgcggcttgtccaaagcccaacaaaaagccgcggaccccaaaaccgggggtccgcgctacccacacccacatctactgaattagtttcggctgctgggcttcgttgtcgccgttttcgctgctcaccaggcagacggccgcgacctggtcgccttcttcgaggttaatcagcctgactccctgcgcggaacggcccgattcgcggatggtgctggcgtcgaggcgggtgatcttgccttgctggctgatgagcataacctccgactcttcggtgacgctcagcacacccaccactttgccgttgcgttcaaccgtcttgacgttgatgacgcccttgccggctcgggactggaagcggtattcggtaatgggggtacgcttgccgtaccctttctcggtgacggagaggatcagctccttctcgcccacaatctccatgccgacgatgtagtcgcctttctccaggtccatggcgtagacgccgtaagccgcgcggcccatgtcgcgcacgtcgctctcgggaaaacgaatggccatgccctcgtgcgaggcgaggaaaatggtatcgcgccccgaggtcagcgtggcggcgatcagcgcgtcgccttcctccaccttcatggcgataatgccgcgcgagttggggctggagaattccgccaagcgcgtcttcttgatgatgccgagacgcgtcaccagggtcacgtatccttccgccgcatacgtctcgccctcgatagtcacgtccttcggttcgtcgggcaactccctgacagctaccatcgccgcgactttctcatcggaagcgaggttaaccaggttgacaatattcttgcctttccccgccgcgcccacatccgggatctcatagaccttcagccaatacatcttgccggtgttggtgaaaaccaagatgtaactgtgcgtcgaggcgatgaagaggtgctcgacgaaatcctcgtcgcgcgtcttcatccccaagcggcccttgccgccacgaccttgctggcgatacatgctgaccggagtgcgcttgagatagcccgaatgcgagacggtgatgaccacatcttcgacggcgataaggtcctcgagcttgatttccgcctgctcctcgataatctccgttcgccgcaggtcgccgtagtccttctggatttcccttaactcgttcacaataactttcttcaacaccttttcgctggcgagtatttcctggtactgcgtgatcttcttctgaaggtcatcatattcctgctggattttctcgcgctcgagggcggtcaggcgctgcaactgtaactcgagaatagcctgggcctgccgctcggtgaattcaaactcggccattagaccttggcgagcttcgggcggggtcttggaggcgcgaatcagcttgatgatggcatcgagctgccgaagcgccttgaggaacccttccagaacgtgggcgcgctcctgggccttgcgcagctcataagcggtgcgccgccgcaccacattgacgcggtggtcgatgaatagctggagggcttcgatgagcgataaggtacgcggctggccattgacgatggccagcatgatcatgccgaagttttcctgtagctgggtatgcttgtagaggttgttcaggatgacttccggctgctgctcgccccgcttcaactccaccacaatgcgcatcccgtcgcggtcggactcgtcacgaacgtcgccgatgccctcgatcttcttctcctgcacaagctgc

SEQ ID NO: 541 - DNA, 37972 bp, Artificial Sequence
  Synthetic Oligonucleotide
accaaaatccctccggtggtataaatgcctccgccgtccatgccggcggtgttggactcgaacgtggttgaagtgatggtggggcctgcgccgttgttgtacacaccgccgcccgacccggtcgcgttgttgaaccccaaataacaggaaatcaaccgggggccgcctccctcattataaacgccgccgccatcgcgcgccgtattgtacaggaacgtgcagttggtcaggcgatgggaggcggccttattgtaaatgcccccgcccatttccgatgcctgattgttgaaaaataccgtgttttctacaatcgccgaagcgccgagacaattgtgcatggcgccgcccaagaggccgtagttgccatagaagcggcagttggccacggaaactccgccgccatgattgtacatgccgccgccatatcccagactttcctctccgtccgcacgcccgccggtaatcgaaaacccgtcaagggtggcgcgattgtttccctcgataacatgataggccggaataccggggccgcggccgtttgaaccgtcaataatggtcgtgcgcactgcccagtcgcgctggttgcgttccgtctccgttcccgcgaatcccccgtacagatacacgcggcgctgggttatcatcaggctaccgttcggactgggacgggtttcgtcatagatcccttcggccacccagatttcgtcgtcccgtgccgccaaatccagcgcgggttggatggtttgaaaagccgtggcccaactcaagccatcttccgttccggacaaattatccctgtcaacgtaccatacccctgaaatagcaggaagggaacagagcattgtcagcacgaaaaaacggtctttttcataattcgtagatcctccctggcgcactaccccgctttgttttcatttaattaaacttccctcacatttgaattttacacttatcatagaaaaaagtcaaaaagttttttttgtattattaacttgagagtaccatgttctcgaagttgggaatgtaacgccgatttccaaatcggcttgttgaaacgcgacatgccgatttggaaatcggcgctacaaagcagccattttcaatttcaacacaagatctcgttgcctgatccgacatgaaattgcccggaaatgccaatcttcctggaaattctcatccttattgtctcgaatccgctgaaagaccgcgttggcgaataggtgttccttgtctgaaagggggccgatcccgtataagggttcaggcctattggaggaaacgggcgatgggacgcgtgaaggcgttttacgggaccgtggcggttctgggcggctttgtattgattacttactggggcatgatggttgtttggggcagcgggtcctggctgcatgggacgcgcagtcttcgtctcggccccatttatgtgccgatgttgctgttggggctggcgacgttgattgtcctgccggctttcctgttgagcgtgtgcaggatcatgcagactcgcggccgtttccctcgatggaccgggcttccgggcgccagttgcgcgatggcgtggcaggcgttgttgcttgcggcgctggtgctggttttcgacacgccatggtccggtttgtttcgcacggattgggccggggtttttcgcaatgcgggcaagccggcggttctcgaattgggcgacgaccacctgaattatcctgagctaccgcttcagcccgtggattattatgcgtggtccgtttacgatctcgacggacgggaagtgccgatggcgtcgttccgcggcaaaacgcttttcctgaatttctgggcgacgtggtgcatgccgtgccgttccgaaatgcccagcgtgcagcgtctttacgacgcggcgaaggataagggcgtggcgtttgcgtttgtttcgcgggaagaggcggagactgtccgcacgtttatgaaagcggaagggtacacgctgccggtgtatctggcgaaagaacgccccccggcgttcatggccattaccgggatccccgcaacgatgatctttgcccccgacggccaactggcatttcgccacacgggcgccgcggcgtgggacacacccaagactcttgagtttctcgcgaaactaaccggcgttccgtgaaatggacagtcccgtgaatgaaacgaaaccgcttggcgggggtgatatccggcgattgcgcgccgattttccgctgctgaccgattccggcgttccggtcatctatctggacaatgctgcgacgacccagaagccgcgcgccgtcattgatgcgcttacccggttctatgcgctacagaacgcgccggttcatcgcggcatttaccggcttggcgatcaggcctcggccttgtatgaacaggcgcggagccgggtgtcgcggttcattggagccggaagcagcagcgagatcgtgttcacgcgcggaacgacggaaagcatcaatctcgttgcgcagaccttcggacgtcggagactcgggcccggggatgaaattctcgtgaccgaaatggaacaccatgcaaatatcgtcccttggcaaatcgtctgccgggaacatggcgcgatcctgcgatggatacccgcgggccgggcgtgcgaagtgcgggccgatgaattggcgcggcgcctgggtccgcgcactcgcctgctggccgtcgtccatgtttccaatgtgaccggaaccgtcaatcccatcggctccctcatcgaaatcgcccatgcgaaaggggttcccgtgttggtggacggcgcccaagcggccggccatttgccggttgatgtgaccgcgctgggctgcgatttctatgcgttttccggccacaagatgctggggccgatgggcgtcgggatcctgtacggacgtggggatctgttgcgagacatgcccccgtggcaggggggcggcggcgcgattgcgcacgttggccgcgattcgtccaccttccgcgaaccgccggcgaaattcgaggccggcacgccgcccgtggcggaggccatcgccttggccgaggccatcgaatacatcgaacgggccgggcgcgcgcgcctcgcggcctatgagcaatccctgattcatcaggtcgagcgcggtctgaaagccattccgggcgtccggattcatggcgatcccgccgaacgggccgcggcggtttctttctctttggagggtgtgcatccgcatgacgtcagccagatgctcgatgaagacggtatcgccgtgcgcgcgggcaatctgtgcgcacagccgttgatggatgcgctgggcgttccaggagtcgttcgaatagcgcccgccttttacaacacaccggaagaaattgacttgacgatgcaagcgctggaccgcgtgcgcgggatttttcgatgaacctatacgaccaagtcctgctcgaccataaccggaatccgcggaatttccgccccatgcccggcgccacgcattccggcgaggcggataatccgctgtgcggcgatcgtatcgccgtttttctgcgcgtcgaggacggcgtcgtggccgaggcaagttttcagggcaaggcgtgcgccgtggccacggcatcggcctcgctcatgaccgtcgccgtgcagggggaggttgtggaggaagcgaaaaaaatgtgtctttccgtgaaggcttttctcaatgaccgggcggaaccggcgccgaccgcttcccttgccatgcttgaacgggtccgcgattatcctgttcgcatcggatgtgccgaattgccgtggacagcggttgccgccgcgttggcgacgggggaccgacagccctaaagcggatcgattggcaattcggggcaatctttttcatcagatggtattgacaatatgagaaatcagcgatatagtagtcgcgacaagtgatagcttgtgcagtttggcggcgaatagagaagtttgcgcgtcggtaaatgcgacaaaaacatgagaaaggagatcgttggggacgtttacccaagcaggtgatggccgaagtgtaagggcagttttccgaactactggcgaagtccaacacaaagggttgtcacatgaaaaagcaaggttttacgctcatcgaattgctggttgtcatcgccatcattggcatcttggcggcaatactgttgcccgcgcttgcccgagcccgtgaatcagcacgccgttcgagttgccagaacaacctgaaacagcttggcgtggtgtacaagatgtacgcgaacgaaaaccgcgcccagaaatttcccatgatggccgcccggttgtcgtatcaggtccagaatgcggaggtcatctacagttcgtacaacgaatgcggatacaacaatccgtatctgccgccgacggcgggcggcgacgcggaattcgtgccggacgggaagtccatttatcccgaatacctgacggacgtgaacatcctgatttgtccgtcggattcccaggcgaaaaaggcccagcagtactggtttatcaacggcaaggtggatccgtgcgcgattacggccgaatcgtacatgtacgtgaattgggccctgacaggacgcgacggcgaaggatatttgaaatccggcgcggatcccaatccgggcaatatgcccttgggcgtggcggcgattggcacgtatctggatcttggcttcatcaccaaggtcaacacgcttctcacgcagcagtcggccatcgatccccccggctcgcaaaacctgtatgacaccgacttcaagttcacgaaccaggacggaaaagaaatcaccatctatcagatgcgggagggtatcgagcggtttttcatcaccgacatcaacaatcccggcgcaacgacgcgcgcgcaaagcgtcattcccatcgaatgggatcttgccagcacgaccgccgatgagttcaaccacgtgcccggcggatcaaacgtcatgtttctggacggacacgtcgagttcatcaagtatccgggcgaatttccgattacgcaggcctttgccgtcatgacgtccatgttctagcgtcgtgagtcgccgatgcaagggacaaacgaccacagcaagtgaacaaaagggactgacccgcttttcgggagtttgatcagcggatcagtctttccttttttcgcggcctttctttcatccttgcccggcttgccgaaaaagaactcgatgcgaagatgtgggaagaggcgaagcattgcacccgcatcccgcattcaagtttgaatcgcttgcatcgaacatgtaggtctttttttcaatctctgggtatctgcgtcatctgtggaagatcggaagacggtccgtggatgccgaaaaaaggaagtgggattgtctttgccccaatcgcctgcaaagaacttgacgcaaagggctggaaaacgggactcctgaaaaaagcgcggttattccggtttctcttccacggccgggtccgggacgaaaaaggccagggaagcgaaactgatggaggttcgggtgtcgcccgttttgcgcgcggaaatgtcatgggccagcaggcggccggttgcggatttcggcacgatccgcagcaggatggcgatggcgtttttcgcgcagattggattgcgggtatcgtcgagatagcggacaaagccccggaaatcccgcgtgagaatgaggcggaacgcctccttgtccagtgcttcgatggattcgatgatgttttccttgaaagggcggtaactgaagttgttgccgtaatgcgtaaagtcggaactgacgaccagcagggtccgatcatccatcagggggtgaagcgatttcgcgacggcttcgatcgcgtccacgtcggtcttcttctggtaatcaaggaaatcgccgactaggatggggatcaagcggaacgttccaaggcgttcctggaggaagggcaacgtcgcctcgattgaatattcgatttcgtggacttgcacgcgggacgaatcggcctggtagttgacgctacgcacttcgatgagcggcgaaagatccaactgccggatgctttggccatccaacggaatgctgcccaagggggtttggtaaaactcgaccgacggaatcgagcaaccgcggaaggaactccggtgcgacgcccccagcacgataacgcgatcgtattgtcccggctgaagcattcccagcgcggcgcccgcaatggcgccggatgtctggtacggcgcatgcggcacgatgcatgccgccattcgttcgcccgccgggggccgcgcgtctttcatgcactccttcagggccgattccagcgctgctttgtcggctggataccagacacccgcggcgaccggcagggcaaaacgcgttacagcttcggacaagccgctccacagaagcgtcaggcagatgccgtaaaaaatgtggcgccgcatcgcgcgttgtctcccgttgtcggaacgtatctgaaaatgtatcgaatcggctgcaggattgtccatgtgaatggttgaacaaccgagcggccgtttagggtatggttcgatggttcattgctgttcaggcgcaatgcttgggcatgggcagggctttgccggccttggatgatttttcggcggtggcgatcaccgcgatgacgcgccgggcgctttcgggggtcacgacaagcggctcgccgagcatgagatgatcggcaatgttgcgataataggcgtgccagtcggactcgaagtacttgagcgtcgcctcggatcgcacgccgtcgcggtaactgatgacagtaaacttgtcgtcatcgtagtcgaggatgccgcctttcgtacccaggatgcgccatcgcggtttgccggccgcggcgatttgcgacaattcgatgaaggcgctgcatccgttcgagaagcgcaccgtggccgagcaatggtcctcgttggtgacatcgtgccagacgcgtttttcctggaaatagccggagacctcgacgatttgcgccggaacgagtccgagggtccaatcaacgacgtgtgcgccccaatcgtagaacgcgccgccgctgatctttttttcggaccgccaccagtaactcggatggccgtatccgcccatgcaggcctcgatatggaaaacctcgccgatcaggccgctggcgatcgcgtgtttgatggccatgtagtcgccgtcccagcggcggttgtgaaagacgctcaacatgcgcctgttcctgcgggcggcggcgatcatcgcatcggcttcttcgatggtgatgcagaagggtttctcggtgatcgcatggacgccggcattcaggcattcgatgacccgtttggcgtgatcgttgtgctcggtgatgaccgtggcgagttccacgcctgatttttcaagcatttttcgtgaggaggcgtaggtcggaatgccgggaaagtcctcctcggcctcaatccggcgctgttcgacaaggtcgcatgcggccacaatttcaaaaccggcggcgcgcatgctttcgagatgaagtcggcccatcttgaacgattttccgtatccgatgacgcccgccttcatggatttgatctctttgcgaccaaaggtccagtccacgcccctccggatcattttctggacttcggggtgattcagcgagcgttcgtcgtggcccagcgcgaggaaaaagacccggcctttgccgtgggtccgtgtgtatgccatgggctgcggcttgccccgccacatggccgttgcaaggacttcgcaggaatccgcctggaatttgtcgagcagatacagttcgtccgtcacgcggaaaggttgtatccgccgcgtgatcatcgaatccgccgctgtcggcgtcacgggaaactcgaattgcgcatcgtgcccggcaaacgtcgagccgagcatgtccacataagccgcatttttcgtgaacgaggccgccgcgccatgcaatccgatgaatgcgccgccattcttcacgaaattgacaagcccattttcctgatctttccgtagttccccgccgtcggcataaacgattgccgcatcaaaacgcccgatatttcccgcgcgcagcgtgtttaggtcgtgcgtcggtgtgaccagataccgcccggtgtcttccagaagtttttttacaatttcgccgcaccgatcgaggggatgatattgtccccccagtaccatgaggatttttttcatcgtcgccattccgcgtcctttctctgctataattacacggtgtcaaagtgcattgagtgcgattttacgtacataacggaggaataacaaatcgccgcgggcggggaggcaatgacgaaaatggatggggaggcgaaagtggttgcctgtgccgcatgcggtcatgtcatgaaaattccgccccagtatgccgatacgccggggcggtgtggccggtgtggcgccacggtaaacgatcgcgttttgatacccgccattgatctgtccgatctggggccgccatcccccaaaaagaagacatctgcggccgtccagaattcagaaaccttttcgactactgttcgccgggcgttgctggcggggttggccggtgctttggttggggggggtgtcgtaggcgctttctttactattcgtcgcacggaggggcaggccatcacgccgggcactcttttcgcaaacgccaacacggggctcgtgctcggtttcacgatatgttcgctgtttttctttgtcaagcatttgaattggggaccgttcagggcggccggggctggaatgctcagttgtgtcgtgatcggctccgtcatgtttctcttggaagcccgtttggttgccccgccggacataggtttgtttgcccaaatcgcgatggccgccatggcgggaggggtcgcggggttgatcatgggggccaaattgaacaacgaagactgaccgtatgccggagacctcggccgccatcatgttccaattcataaggagatggcggatcacacattgaatctccgccattgcagccgttttttggggcctatcccatcgcgtgtgcgcgggccgctggggttcgtttttttgaatcatgttattagggaggcatatacttttttcgatcgttgagggaacgggaggtgagcgatgcaaagagtgagtgtgttggcttttttgctgttatggtgtggggttgctttttcggtcgagttcgtgtttgaagaacaacccggatcgtgcctgttgaaaggcgatggaaaaacgtggatggccacgatgatggccgctttcgatccggcaaaacgcgatgagacatacaaagtctacacacatatccacgattttcagggcatcgccccgattaccaagggaccgggcgggaaatatccgcatcatcgcggtatgttcattggctggaaggatgtcgtggccaacggtctccacttcaatttgtgggaaatggcgaatacctcgcagcgccatgtggcgtggctggaacgcaaaggagggctggactccgcgcggcaatcggagcgcatccactggtgcgatccggagggaaaagtgcttatcgaggagacgcggacccttgccgtccggcccggtcccggcggcgtgcgccttttcgattttcagtctgtgcttttggccccgtccggcgacatccagttgcgcggggatcttcagcacgccggcatgcaggtccgcatggcgcaagaagtggcggaccatgaagattcgacgaaatacattttgcccgaaggcgcccaggaactgccggacgacaaggtcgtgggtgcatggtgggtatgttgcagtccggttgtgcgcgatgtgcgctattgggtcgttcatatgacaccgtccggtcatccgttgggtcagccggtgtattcgattcgccggtatgcgcgattcggtgcgttttttgagccggacttgcaggccggaaagccatcggcattctcgtttcgcattgcggtatcggacaaggaactggaccgcgccgcctgcgaatcgctgtatgccgattattgcaagcccgccccctgattcgattcggagacttacgcgtgcgcaagttggcggtcacattctacggcatcattcacggatcgttgatcaaggaatgcgccgtcgtgccggaacagcgcgcggaactgtgcatggaaggcgacccgtggctggcgacggtttcgacgccctacgatccctccgcccattcggatacctgcaaagtctttacgcatttgtatagtccttgcgacgggctgccgattacaaaaggggcgggcggtttcgattcgcatcagcgtggcctgcatatcggctggcgacgcacggaagtggaagggcggaacttcgacacgtggcatatgacggattgttcccagcgccatggcggatggctggctgaaccggggcatgtggccgcccacgcgttcatcgtggattggtgcgacgcgggggggcggcctttcctgcgcgagtttcggtccgtgttgtgccgccgcgcgcgatatggcgcgcgcatgttcgatttgcagtcgcggctggccgccgtggaccgtcctgtcgccctgcgcggggacccgcaccatgccggtgtccagattcgcctggcgaatgaagtttgccggcggccgtggggcacccggttcgtgctgccgggcaatgcacaacgccggcgcaacgatgtcgtgcgcgatgcgctctgggtttgctgcctttccactattcgagacaagcgccatgccgttttgcacatgacccatcccgccaatccgggtctcgaacatctagtctatgggatacgcgcctatgggcgtttcggggcctttttcgatgcggatttgaagcccgggtttcccatgcgcatgcgtttccgaatcctgtggaccgagggcgaattggacagagatgaatgcgaggctctctatcgcgagtacacctcatccttctgaacattacaagcccggcaaggcaatgataattcccgccttgtgggcaggatgaacgatggggaccccatggacttgattcggcgcctgatatcttatcgtctccgccgcggtccacggcgtcgctggtgtggacgtttacggtgggaactgtcgcgctggggttcgcgggggctttcgggaacccggatcgtctcggcgggaatgtaacgggcgagtttgtcttcggtcgagttgtaacagtcgcagcggggacaccttgaaagccgttcggcctgctcgtcaaggtagatatatccgcaaaacgtgcaccgccagagaaactgtttggttaggaccgcctgtattctccgggaaacgatttccgtatgcgtccagatgacaatggccagcgcgcacagcagggcgctgtaaaaaacgagcgcggaggtaagcgaaatctggatcatgatgatggcgcccctgctttttcgtgatcatccacggtctttgccgatggccgtttgccgttcccgtcttcctttccgggtgtcgccagcgtgaagagtccggcttggggcgtcatgggtatgtgccgcattgcttccctcatgatccgccctcgacctcgacgaataacgtgccgcgttgcaagtggacgttttcaatcggttcgaattgaaaacggggaagcacagtttggagttccgagacgacgccggtggcgtcttcgatggaagtttggacgttttccacttttcctttttcgttgacgctgaaaataatcgaaatgggagccgtaagccgggccggttccaggcgccacagggaagcgatcggaggaacaaacagggcgcggcgatcccgtggatcggacatccattcgacgaacagcgcaattccgggcgccggacattccaaccgcacgcggttgggcgttgtttgatcggttcggggccatgcccattgcgagagcgcggggccgattccgcgcaattcgctggtgaaccgcgcccatgaatcgggcgtgtcggcctcgcgcgtctcgaagagttcgctgaactgggaacgaatcttaagactttcttccgggctgcgcaagaccggcagggacgacgcgagccggggtagttcgacgggtggcagcaagtcggtatccgattcatcggccaacgcgagcagattcgggtaccgatcggtcggcatcggctgatcgctgtccggggttgggggttggacaaggccgatggtaaattgccgtgtttcgggttttggcagaagaatcacgatcgaaaaaaccgataccatcgaaagatgaaacaggaccgagacggcgagtgctatgttaaaagcggatgcgcgcggcatgacgcgttaccgttgcggcggcccggcgggacgggcggcaatcgtgcaatggcggatgccggcgtcgttgaccagtccgagcacttcgatgagccgcgcgctttcgatgcgggcatcgggccggattacgacggtgatgtccgggcgttgcgcatgcgcctctgcgagaatgcgcgaaacttcgtcgaatccgcccacctgctcctcattcacaaaaatcccgccctcatgcgaaagcgtgattgacaagtctttttcctcgtatgcggacggcccggcggcctcggcggtcttgatggtcacggggaactgcgtggcgaaggttgttcccagcatgaagaaaatcaacaggttcagaacgacgtccatgagggccgtcatatcgatcgtggggcggatcctgggcttccgttccttgcggaaccgtatgaggcgtttatccgccgccgcttgcatcatggggcctatccgtcctcgccggttcggtgcattgtcatcaattcaacggcttccgatgcgccgacttccatttcaacgatcatggtgtccacgcgcgtaacgaaataattgtacgccaccatggcgggaatgcccacaacaagccccgcaaacgtcgtgatcagggcatttccaatgccttcggcgagatcggaagggtttaccatgcctcggcggttctcgatggccgcgaagcatttgatcatcccttggaccgtacccagcaggccgagcaacggcgcgacttgcgcgcaggttcccagtccggcgagataacgttcgagacggggtatttccagccgtcccgcgtcttcaatggcctcgcggatatcggttttggtgcggttgtgcttgaccaggcccgcttttacgatgcgcgcgatgggcgcacgggtttcgtcgcaggtttgcaacgcctcctggacgcgatcctgccgtagcgcggcgcggatcagatccatgaattcccgcgtgacgactgtgatgcggcgcagcgtgtagaagcgctcgatcgcgatggccaacgcgacgatcgagcaaacgaaaatcggccacatcaccacgccgcccctgccgatcaattcgtatgcggtgttgtatcctgccggtaacatggcttcaagcctccggtaagtctaaagcgtgacgagcgtgcccacgcccttgtccgtaaaaatttcaagcagaagcgcgtgtggaacgcgtccgtcaatgatgtgggtgcgcgatacgccgtgatccagcgccttgatgcatgcgtccactttcggaatcatgccgcccgcgatgattccctcgcgcgtcaactgggccacctcgccgtgccgcagatggtgaatcagcgaatccgggtcgtccttgtcgcgcagcacacccggcgtgtccgtcagaaagacaagtttttcggcctgaagcgccgcggccacttcgcccgcggcggtgtccgcattgatgttccacgtgcccccctccgcgtctgtcgcgagtggggcgacgacgggaatcatgcctgccgcgcagagcacgttgaggatgcgggcatgcacattgacaatctggccgacatgtccgatatcggcgccgtcctcgaactcgatctttcgcgcgtgcagcagattcgcatccttgccggaaaggccgacggcctgcccgccggcttggttgagcagcgtgacgatgtccttgttgaccgttcctgccaggatcatttccacgacttcaatggcggcgtcgtcggtgacacggcgcccctgatggaacttggattcgatggccagccgtttcaacatgccgttgatggccggtccgccgccgtgtacgacgatcggattcatgccgacatatttcatcaacacgacatcttccgccgtgctcttgcggatgcggggatccgtcatggcgctgccgccgtacttgataacgaccgtcttgccctcgaacttccgaatgtacggcaacgcctcgaccaacaccgatgctttttgtataaccgcttccatttttctccttctgtcgtgcccgcaagcgcctcgggcggcaactacgtcctgtaatctgcattgatttccacgtagttgtggctcaaatccgatgtccagaatacggtttttcccggtccatttccgacttccacgcgaatgcggaattccggcttgcgcatgcaggccgccgcgtcttcttccttgtattcggccggcatcccgttgcgcatgacttggatatcgtcaatccacatgcacagtttctccgggatgaacgatgcgccggaatagcctgcggcgcaggcgaaacgcccccagttggggtcttgcccaaaaaaggccgtcttgcacagttgggatgtcgcgatggcgcgcgcgatgatctttgcgtcgttgtcggaagaggcgccattcacggcaatttcgacgaattttgtcgcaccttccccgtcacgtaccagcgattgggccatgtgaatgcacacgtcgcgcaatgctgcggcaaagcgcccgaagtcgtccgtgcccggctgtagaaccggcgtgcccgatgccccgttcgccaaacagatgaccgagtcgcttgtgctcatgtcgttgtccacgcatatttgattgaaggatacctcgacggattcgcgcagaatcttggcgagcggctccggttcgatggcggcatccgtggtcaacaggcagaacatggtggccatgttgggcgcaatcatgcccgcgcccttcgcgatggcgcccagccgcaccgtgccgcccgaaagcgctagttcgacggctgtttctttcgggacggtatccgtggtcatgatggcggcggcggcatccgcgctgccgtccgcgcgcagcgatgccaggcattcccgcacgccgttcgcgatacggtccatcggcaacgggaggccaatgactcccgtgctcaacacgcagatctcctcggatcgtgcgccgatgccttcggcaaccatttttgccgttgcctgggcatcggcatagccgcgatcgcccgtgcaggcgtttgcgttgccgctgttcgcgaaaatcgcccgcgcgacgccgcgcgtgcatacgctttcactccagcgcaccggaggcgccttgaataggttgcgcgtgaatgtgccggccgctgtcgccaatcggtcgctgacgatgagcgcgcaatcctttttggtcgaattcggcttgatggccgcagcgacgcctgttgcttggaagccttttgccgccgtcacgccgcccgggatggtcgtcatggcatcatccccgccagtttaaggccggtcgtctccggcagcccgaacatgacattcatgcactgcaccgccatgcctgccgtgccgccgacgaggttgtctatggcgctgacgataatcaggtttttggtgcgtttgtccacgacccaaccgatatcgcagaaattcgagccacgcacataacggatttccgccggtttgccttcgccgagcacgcgcacgaacggctcgtccgcgtagcgttcatagcaggccgccacatcgaagatttccttgagatgcacggttatcgtgctgagaattccgcgtgtgtaggcgcctacgtgcggcgtgaactgcaccgtaaaggccttcagcagctcctgttcgatttccggcgtatgctggtgatttccgatacggtaggccttgacgttttcattcatttccgggaagtggaaagcctccgccacggcccggcccgcgcccgaaagacccgaaatcgcgtccacaacgattggtacatccttgtcaatgggagcgtccacgagcggtcgcatcggcaagatcacgcttgcagggtagcaaccaggcgccgccaccaattgggcgtctcgcaattgatcgcgataatagggaacaaggccgtacaccgcttcccgcacccattggcccgccgtgtgctcgaccttgtagtattcggagtagagacgcagatccttgatgcggaagtccggacccatgtccaccgtgcgaacgcccgcctcgcgcaatgccgcgcccaacgccatggacttcgtgcccggcaccgcgatgaacaccacgtcgcacttcttcgccaacgccgccgggtcgaatttttcgcataccacatccacgagtttaccaaaggccggcaacaattcctggatggattttcctgcctcgacttccgccgcggccaccagtttcgcctcgggatgcaaattcagcaggcgtatcaattcacgcccgccgtaaccaatggcgcctacaagacctacacgtatcatgaaatacacctccgtgggatggattggaaacagccggattatagtccgctgtcggcagggcaatcaaagaaagctcacacattcgacgaattttctactgcagcagccacgcgacaccggcgccgcccaggatgacccaaggcaccttggcgcgcaggagcaaggccgcaaacgccgccgttccgactgcggccaacgatggattccagggcacttccatgccgagcatcgcggtggtggcaagaaggaggccgacgaaggatgccacggctccacgaagcacgcaccggactgcgggacggcggcgcaggcggtggaattccggggccagcgccagcagcaccagaaacgagggaaggaagatccccatggtcgccgcgcaggccccggccagcccttcgcgcatgtagcccacgaatgtggcggtgatgatgatcggtccgggcgtgacttggcccagtgcgatgccgtccatgaatgtccgcgcgtccagccaatgccgggcatccaccacctcgtgcagcatgatggggagggcggcgtatcctccgccgaaggcaaacaggtcaatccgcatcatcgtgaaggccagattgaaaagcgagcggtccacgaagaaaagcaccaccatgccggccaacgctgcggacacgacaagcgcggccgcccgccatgcgtttctccgttgcgtaaagggcgcgggcgatcgcggcgattcttcgtcgcccacacgccggtaaagccaaaatccggccaaggccgcgacggggatggcgatatacggaacgccgccaagtccgagatagatcgcgacactgaaggccagcagtacgtcctgccgatacttcacaaattcccggccgaaggaccacgccgcatgcgccaccaaggccacgaccacagcctgcaatccgttgaacattgcaagaatagacggcaaattgtgtgtccggctgtacacggcggacagggcgagcatgagtagaaacgccggcagtccaaaacccacaaaggccgccagcgccccgcgaatgccgccgatgcgcaatcccaaataccccgccatctgcattcccgtggcgccgggaatcgcctggcacagtccgatgccgtcgtcgaatgcctcggcccttacccagccgcgactccgcacgagatcttcgcgtagatgaacgatgatggccggtccgccgaacgccgagcacccgagaatcaaaaaggtccggaatatttgccacaggtttggattcggcatgggtcgaatcggttgctggtttgtttgcatgtcctggatgatatcatttttcccgcatccaattttggtattgccgggtagggacacctctgtcctgtactcaatccgctcgtatctgcgtcatccgcggaaggccatgcggtcaaccgaggacgcggctattcgtagatgctgaaaagatgaatggggaatcaacgcaagcccgatttcagccagccgcttgtcacgcctcgacggtttgccgtttggggagacgcaccacaaatcgcgtgttcgaggacgcggcgtccaagaacaagtcgccgtggtggttttcgaccatccggcgcgaaatgctcaaaccaagaccgatgccgccgatggtctgtttcgtggtgaagaaggggacaaaggccatttcctgaagatccctgcccaagccgtgtccactgtcggttatggcaaatcgaatagtcgtcccttcatcttcgacgtcgagccgtatccatttttccggcaattctttgacggcgtcgtaggcattgttgatcaggttgagcagcacttggcccaattgggcagagcggcattcaatatggagttcattcggtatgggcgacaccgtcagtgtgatgccggcgtctctacagcgcgccatgcacacttccagtgtttctgtgacgatggtggcgaccgattcccgcacgaatgcgtcggacgagccgtccctggacaaattccgcagtccttggacaatatgttgaacgcgcttgacattgcgcacgatggtcttggtcacgtttgcccggtattcgtttgaaaggcggggatcgtcgagacttcgttcgagttgttcggcgccgaccgaaataatggccatgggattgtttatctcgtgcgcgatgccgcttgccatcgtgcccaaggccgacaggcgcgccgcgttcagcatgagcaactgctgttcgatgattaggcgctgcgcctttacgcgttcggtgatgtcgtttccgatgcaaaggatttcttttatgcggccgttttcgtcgcggatcggccggttggtccacgatatccagacgatgtccccgtttttccggcagttttcgttttcattgcacagatactgttccgggtgttccccgatgccctttatcattgcctcgtgggcgcgcccgtcggaatcttccgggcgcaggatggttccgatgacattgcgtccgatgatttcctcctcggtgtacccgaaaaattcctgcgcgaaatgattgaagaaaaggatgttgccgttcacgtccatgcgcatgatgacgctgttggcgctctcgaccagttcgcggtatttcgcctcgctttcgcgaagggcctcctcggcttttttgcggcgatcaatatcgcgtgtgatgccctgaaatccgagcaatttgccttccgaatcgaacaggggcgccgacaccgtttcggtccaaatcaaggttccgtcctttcggatttgctccagttcataggtcgcgcttcccggattgattccctgttccatgagtttcaaacgctcgctgaattgcgccttgaacgaggcaagcgaccgcggggttataaattccaaaacggatcgcccaatgacttcttccgctttgtatccccgctgccgttcgtccgccgggctgacatacgccgcgcgcagatcgggtgtcaactgccaaaaaacatcgtccacgctttctatcatgaaccggagggattcctcgctttctttcagcgcctcctcggcctgcttgcgttccgtgatgtcgcggcccaccgactgggtttcgatcaggcgtcccgttttatcgaagaagccccggttgacaaactgcatccagcggatttcccccgtgccggcatagacacggttttcgataacaacgacggggttgtccggcgacatctttccgagttgctcttcgatgatcggacggtcatcctcatgcgccaggggttgccagggtttttcaatcagatcgtttcttgttttattgaaaaagcggcaaaaaacgtcgttcacaaacacgaatgtgccatcgggccggaaccggctgatgatttccgtctgatcctccaagacagtccggtagcgttgctcgctgtcgcgcaaagccgtttcgatgaggcggcgttcggcgatttcttgttccaattgccggttgatccgcatcagttcggcggtgcgttcggccacgcgattttcaagttgtgctcgcgtctgctcaagctcctcgaacgctttccgtttttcctccatctggacacggagcgtttcctgttcgacttggagccgttgcttggcccggtgggtttcatacactccccagaagaggccgccgatgaacaatacaatgccggtgctcatgagcggttccttgaccagatggaacggcctcacgaccggacgcacattgccgccgaaagatgagatgccatccatgacattgatgatctggccggccaagataagggcgatgccgatggccgccagaaaagtgatcggccgtacggcatacacgacggacaagacaaacgtggtcccaatgcccaacagaagtagactgaaaaaagtaatggtatcggcgataaaaaaactataccagccttggtaaaagcccacacggcccagtaaatgaagggaaagaaccagcgacagtgaaatgacgacataccacgcgacgcgcggcggcaaatcatattttgtcgccggagatgccccttgatcggcttccgccttctccggttcgttcccgtcacgcctcatgaaatacccctgccctgttcgggccgttgctccctgctcctacctttcccgtatgccggtttcattgtactactttctcgccaaaattgaaaggcctctgtttgaaccaccgcgtaaagcgtcgtagactatattccgccaagtgcgagaggagaagcgccgatgtcggaaacgaagaagtttcgcgtgggggttatcggggtgggttcgattgcgcaggcgtgccacctgccgggttatctcaaagatgatcgggcgcaattggtggctttcgccgaccccgaaccggagcgccacaaggagatggcgctgtcctatggcgagatgcggggctatgcgcattaccgcgacatgcttgcccgggaaaaactcgatgtcgtcagcgtgtgcacgccgaacaagtatcatgccgaagccgtaatcgccgcgctggaggcgaaatgccatgtcttgtgcgaaaagcccatttcaacgacgctgcaagaggccgacctgatgatcgccgccgcgagaaaagtccggcgcaaactgatgattggcttcacgcaccggcttttcaatggcccgaagaaatgcaaggaactactcgaggagaagacgctgggaaaaccgttcatgatccgcgtgcggtttgcgcatggcgggccgtttcccggctgggccaagagtgattggttttaccagaagaatctggcggcaggcggcgcgatgctggacatgggcattcatgcgattgatttatgcctgtggcttttcggcccgatcgtggccgtaagcgccaaggcggcgacgctcgtcaagaaaatcgaagtggatgacaatgcgttgttgctgctcgaattcaaaagcggcgcgctcggatacatcgaagtgggctggaccagccgtcccggattcagcggccttgaaatctacgggaccgagggatccatcatctgcgactacacgcggggcgtgtatctggtggggggcaaggcatcggcggggcgcgacggcaaacacgaatggaaaacgctggacaaatcgcccacggaagggggatggtccacggagatgggctactggctcgatgtggtcacgggggtggaaaaactgaccatggacggcagggccggacgggatgcgttggaagtggcgctggcggcctacaagtcgagccagaccgccaagcgcgtcaccatcgaataagccgcctgcaacctttcgcgcggcgcgggtatatcattgagaaggagggttgccatgattcgcgggctatttgtttcgattggcctttccgtgctggttcttgttccggatactgcgttggcgcaacgcgagccaagggctttccgaaccatcaacacggatcaatacgaggtggccgttcacaagaatggcctgattgacattcgggtgaaccggatcgaaaccattgccaccggtctgtatccgatgatctggattgagggggaggccgcgccgaaaccttttcccgttgatgcgcgatacagcaaccgcgctcccgtgaacaaccgccttggagaaggacaggggatgtggttcaagaaggggacgctggattggattgtggagacgtaccccacaaaacctttcatgacgattcaagtggcgttcgaaaacacaaccaaaaagcccgtgacgatcaaggcgctgattccatgggcgcttggaggcgagaaaaagggttcgctcaatctggggttgggttccggcgggtccgttattcttgaaaacggccgccatctgggtttgaccgacgaagttccccaagtcgtcgccgggaagacgcaatgtctaagcaattgcacggccttcaatccgaccagcggattgtcgttgacggcgggttttctgaccatgcggcatgcgtacggacgaatcatgcttgaattggatgacgatccgacgagggccgtcatgcgcgccgactgtatatttgatccgccgatcgaggttccgcccggaaagcgcctcgaatcggagattttttatgtggcccttactgaacgaaaccccttcgacgggttggagcatttcgggcaggccgtcggcgcgttcaacgatgccggcccgcaaggtttccggttgccgcacggttgggattcatggaacaccgccctcaagagcgacatcaacgaatcgaacgttttggcggcgttggatgtgttcgatcgcgatttgaaacgttacggttggacgcattttgcgattgggggcggttggcagcaggccacgggaacctgggaaccggattccgcgaagtttccgcatggcatgaaatggctggccgaccagatccattcgcgaaaaatgacggccggcctttggttggatccgtttaccgcccatgtaaacagcgccgttgcgcgggaacatccggattggttgcgccaaccggccgaggcgtaccgttccatgctggacccggatgatcgcatcatagatgtgacaatccccgaggcgtacgcgtgggtgcgggatctggctgtacgcgtcgggaacgattggggattcgacacgttgcagcagggcgattttgcatgccggttgctgtatgcggatcggtacgccgcggtgggtgttacgcgcgtggatgtgtttcggatgggcgtgcaagccttgcgcgaagggctaggcggggaatcgttgattacctctttttccccggcgcaggtcacggcgccggtttggcgtcgggagacaggccggaaaccttggggatgtgtcgaggcgatgacgaacgccgcccggcgctattattttgcgccgcattgttggatagccgacacggactgttcctattttgggattgattccacacgggaacggtggagtgtgggccatagacctcccttgtccgccgaacaggcgcaggcatggctgacggccgccgccctgaccggcggcgtgatcaaaatgggcgattggcctccggacctcgacgccggacagcgcgcccttttgacacggcttctgcccaccattggccgctctgcgcgccctgtcgatctctttgaaggcaaaacgcctgcgatttggtcgcttccgattcaatgcgccgtgggatcatggcatgtcgtcgccgtattcaactggaacgatgccgcccctgccaagattcccctcgatttcacaaacctgggtctcaatttcaaccgctactataccgtctatgatttctggcgcgacaagttctatggcctcgccaaggggaggctgatgctcgacatgccgccgggcagcgtgcggctgctgggtctgcgagcctatgagggccgaccgatgtttctcgccacggatcggcatttcacgcaaggggccaccgatttcacccgcctcgaatggaatgcgcaaacccgcctcttgtcgggaacatttaccggcattgcggagacggattataacctgcgtatttttgtgccggacgaatatgcggtgaaatcgtcctattgttcggcggaagcgcccaaaacggaacaggacgggaaagtttacaaactcggttttcgctgtatcgaatcagcaccggtcaactggaacgttcagttctgaaccgcaaggcggtggatttcccacgcgatcgcgccgtttatcaggcccgacgcggcgagcaagggcacgtcgtagccttcgaggggcacgcaggcgtcgggccaatcccacatgggatcaatccatataacgccgcgatcatgagcaaaatcgcgttcgtgccggagcgccgtgaaagcgacacgggcgccggccggccgtgccttgcggaggagatcgtccggcggctgctggtatccgatgagcacaatcatgtcgccgggacgataaacgtcatcgggtttcggcgacgtgcggaatcccgcgttccacacgtccgaatgaaacagttttccgatgtctgttttacccacttcgtccggaaacaggtggcccatgctgtacatgaacaattgtgcgccccgctttctcgccgctcggcaccatgcgcctgttttgtcgagttggcggcgttgttcgcgatccacgcgatccagcatggccttgattgtgttgatatagcggttggcgatgacacccgctgccacgggggggacttctttatcgtcgtgaaaggcaatatcgccgttcttgtactgcgtgatgcgcgggatgccgctgtatgagccgatactttcgtaaatgaccggcattttgccgagccgggtcaacgcggcgatcgtttcgccggtaaaaatccatgcgggaatggcgtttgccagcgtgggggagatgcctgcctcttcggcatgattcggaaaaaacggccattgatcatgaaccggccttgaaccgaaggtcactacaagcgcctgcgtgtttttcagggggtcaggcatgccggcgccgatttcgggcgtgtacaaaaccacatcggcgggatcaggcggctcgcttcccagtgcgcgaatcatcataaagccgccggcgcgtccgctgatttcgctgacgagcgagggctggcccgccgcccatagtttccctccgttggccagagcggcggcggcccgttcggcaaccggctgcatggcggataggtcgccccgggcacattcgatcgcatgcgccacgcgcgccagatacgaaccgttgatcggggcggccatggccgcactcattatgccgataatcgccgtcatcatgcgcggaaaccctttacttgaaagacagtcggaacccttttcccgaaacgactatcggatccaccgtgggaacatcgcccgattcgggcaatagaatccgcatgggggaaaaatccagaatatctttcctgatgtcaatgccgggcacgatacgcaccagttccataccgcgcggcgtcaactggaaaatgcccacattggacacgtaaagcactttcttgcccgtggcaagcgcttggcgtccactgaaggtaatttcgtccacattggcgatgaatttcggcttgccgtattcgacgatgcgcagggcattgccttccagacgaatctttccacccagcatccaactactgacgaagataatcgtccgcgccgcggtcgtgaagtcaatgaatccccccggtccgacgtaattgattgcgccctcgccgcgtttggaaacgttgacgtttccatcgctgtcacattgcagcatccccaggatgctcacatccaggctttcgtagcaccgatggaaaatttccgcgctggtaatcatctttttgggacatatcgcagcgccgaaaaagacgcccggcgctggcaatccaccaatgacgccgctttccgtaaacagggtgatgtcctcgtagagtcccgcctcgtacagcagccggcaaacttcttccggcaggccgacgccgatgttgaccaggctgccccggcgaacgttttccgcgaaagccgtcgcggccaagcgcgcaagcgaatcgtccaccgctgtgcgtctcggcgtgatgcgcagagtttcgttggcgtacttgagtttggcaacgctttccgcgatcggcatgtcgctttcggtagtgaacatcggccagtgtttgcgatgtttgacggaacccgtctgttccgtgcgggggtagacaacgaccgcgtccacatccgatgccggcagaaagatatcgtccgaatttttttcgacgacgtacccgacattgacgataaccaatccaccgtttgcccgcgcggcctttgcaatttcgcgactctccgcgagcatggccgtgtgcctcatgtagatattgccttcgcggtccgccgatggcgcgttgaacatcgcgaccgttatcgggggaagccggtagcgcaatttgccgttttcaaccgcaacccattgttccccggcgggcggtgtcacgggcgatccgcgccccacgcgcggatccatgaatgtgccgatgccggtgcttgtcaacagggatgtttccccgtggccttggccctcgatgaggaacgccataaccccttggggaatgcattggagttccagttttccttggtctgccagacgaagcatcgccttgaaggtttcgagatgtccgctgaaaaaacgcgtgcataagccgggaaggccgagttcttccagcgatcccggcgcgcggccccgagcgcccatgcccccaatcgccatgacggtcaaatcgcgcgggtggcccgtttcctgaaacaattcccgaatggaccaatacaggatggacgcccattgattggcgcccaaacccgaagcggccacgacggcgccgtcggggatcaatttgacggcgtcacgcggtcccatgaatttcggattgtcgggaatcgtgaaccgataatgcgtgtcgcgccggttccatgtcagccgccatttgagaacgtgatacaatacggaaatcttggaaaatagtgtcatgaggggtacttcctctttgaatccgtgacgtaagatagccgcttcaagaccgaaaagcaagagatatcggcgcggccactttacatggccgattccgttgcgctaccgtacccgtcaaaccggaacgaaaaaaaggatcgaagtatgaaagcgcctgtcgggattggggtattgagttttgcgcatggccatgtcggtgcgtatgtggacgtgatgaagaattttgccgatgtgagactggtgtcggcatacgacgacaatgagcaacggggcaagggggtgtgtgacaatgcggggatgcgctacacgccgcatgtcgaagatgtcttggacgatccgaatgtgcaggcggtcatggtgggcagcgagacatgccggcacgcagaattgtgcgtcgcggcggcgcgggccggaaagcacatcctctgccagaagcctatggccctctcgctcgaggattgcgaccgcatgatcgcggcggcggaaaaagcgggcgtgatgcttgccgtggccttccagatgcgtcacgacccggccaacatccggatgcgcgagattgtccagtcgggcgaattgggccgcatcgcggtcattcgccgccgccactgcatcggcgtgctgctcatggaatcgttcgtcaacgggccgacgcattggcatatcgaggccgacaagaacatgggcatgttcatggatgacgcgacgcatcccgccgactggttccactggatgctcggcaagcccgtcagcgtgatagccgaaattgacaatgtaatcacccatgtcgcgcccgacgacaacggtgtggccgtgttccgtttcgcacagggggaaatggggatcgttttcaacagttcgacggtcatggcgtcggaaaacacgaccgaaatctacggggagaaaggctgcgtgattcaaaattacggggacgcgccgtcgtgcgacacgcggctgcctggcgggatagccgtcaagatgttcaagtacggcgagggcaagtggcaggacctcggcgttccgattcctcccggccacggttgccggattcaagccgtgccgaggccctgggtggacagtcttgtgaacgagaccccgccggccgcgacgggacatgacggccgcgtggccgtcgagatgatcctcggcgcctacaaggcggcgcgtgaaggccgccgggtaacgtttccgttatgaaaggatccatgacgggattgcgggctgtttgtcgtccgcaacgggaagcgttgatgcccgtcatggggaaaaaggcagtatgaaggaattcgatctcgacacgatggtggatgtgggttgcgccacgatcctggaagtgcagcagaagatccagggcatggtgatagacaatccggcccgggcgctggatccggtcattgtcggtgcgcggaaaaaggccgcgttgcgcgtggatgtcttcgcggaggattacaccgaggccgaactgcgcaagaaattgaggaaataccgcccccgcgtgatcggggaagagagtcttttgaaggaggatctcgatctatcgcgcgaggatcgcctggtcgtgctgctcgacatgctcgatggcacggatttgctcgagcggggcttgtccaactggtgttcggcgatggtgttctattatccgcccgaatgcaggattttggcgtcgttcgtcggcattccgaacgatgccgtctactttgcgatcgaggatcgatcggcgccggtgcggaaatttctctggcatgtccgccgcggtcagccgcgcgtcattgacgtgaccggcccgtcgtccgtcacggccttgcaggaagcctcgctgtcgttctacggccagcagcccgccaatttcatgtccgttgcgggaaacaggcgttttgccgcgaaactggctgaattcgaaaccgtcaaggacgactcattcaagcgcatgcgcatctataatttggcgggcaatccgatgatgatgaaactcattgacggatccaaacgcattgacgcggtgttcgatttgctggggcaattgccgcacgacatggcgcccggcgcctacatcgcccgccgcgccggcgcaatcctgtgcggcctcgacgggcggcccattctggaagaagatcttgcgcgcatgttgataaaacccgcgcacggggcatcgaaaaggccgtatctgctggccgccaccgagggattgaaaaacgaatttctcgccctcttcggaacggatgcgtgccgggactgagaagtcccgatcctttttttgcatcaatggcgtgttatgcgccggccgcttcgcgcaaggcccgcaggacggcctgcgcggcgccgggggccggatcgctgagcaccggcaggaaaatcgtccgggccatcgcgcgttcggcattcgggaaatcgccgggacggtagccggcatagccctcgctcgcgcacaagggaccgcgattgcgcgtaaaaatatcgaagcctttggcaaacagcggcaagtcgtgcaggttcggatacggcgaaagcgacgcgcccacgccgcgcgccttgatccgctcgacgtaatccgcggtggacagaccccccatggcctccggctcgtgaatgattgggaatccataaaaaccgccgcgctcggcgccctcgtggaccgtgatggggcgcaatcccggaatcgaatccagtccggcctccacttcggcgaaatacgccgcgcggcgccggttcaattccggcagttttttcaattggaccgccgcgatgccgatgcccaggggatgcgcccggaacttcatgcccagtccgagcggttgaagctccgcatattttgccccgaccaaatcaatgcccgcgatgcggttgacctgtccgacaaggcatgcccgctcgaacacatcgaggtcgtccgtggcgatcatgcccccttcccccgcgctgaccgccttcgatccctgcaaactccatgcgccaacatggccgatcgcgccgcacatgcgccctttgtactttgcgccgtgcgcgtgggaacaatcctcgaccacggcgacgcccgtctcccgcgaaacggccatgatcgcgtccatgtcgcagacgtttccccaaagatgcacggcgcacaggcaacgcgtccgcggtgttattttccgtttcatgtcggccggatcgatcagaagcgtatccggattgatgtcgcagaaaacgggccgcgcgcccagcagcagggccggcgcgatgctgcaaatccaagtattgacgggacaaacgacctcgtcgcccggcccgactcccagtccgaaatacgccgagtacaaggccgatgtgccgttcaccaccgacacggcgaacttcgtgcccatccacgcccgccacgcctgttcgaattcgcgcaccacgggcgttccgcccgaaagctcgtttcgacgaaccatgtcggcggccatcgcggcctcgtcctcgccgatttgccgccaccggtcaagctcgcccgccgcccgcgccgtctgcacgaacgcacgcggaccgcccggattgacttccacgtcgagcgccatgttctttcccgatcgcgtgatgtgaaccgctattttttagcggcgtcttcctttggcacgaccttgtcgaaattgggctccgtgccgtccgttccttcttccatcaaccacatggccgcgtccacgatacttgcctggaacgtcggattttcccaaagatcctcgcgatggccgagggcgctgaaatacaccttgcccttgcccaacgcgctgcaccaaatcaccggatacggcgcaatgcgatacgccgcttgttttgcccctgcctcgcccgggtccagcaacgccagcacatgcatcgtttccgtgttgaaatttttgaacagataccactcctcctcgaaactccaatccgccggaatgctcgccatcgccggatgcgccggatccacaatcttcagcgtgcccttgaactgcgcgccatgcgtgacgaattcggcgcccaccatcttcaaatagggcgtcacctcgccgccggccggcgtgtgaaacgtgtccgacgcggaatgaaagcccatgaaacgcccgccgttccggacccactccaccagttcggcctggcccttttcacccatcggcgcgccgccgtccttgctggggcgcgtcaagtcgccctgcgtgtaaaaacacaccagatcgtagttcttgagattgtccgcattgatcaggctcgcatccttcgtgctggtgaaaggcgacccgttttcccgcgcaagccgcccgagaatcgtttccgccagactcggctgatcgcccttgacggccaccgggctgtgctcgaacccttccgacttgctcaagaacaaaatccgcggcggcgtgatatcctgcgccacggccacgaaagccacacccaagagaaccgctgtcgcccatgccgtccatgcaaccattcgacacatcgtcctttcctcccatgcgttttccatcgcgttgtccaaccggcgtagcataccctcccccgcggcgcgggtcaattcgccgcatttgtagtgtattcctgcacatgaaatttggaacgagcacgcaggtaatggtatatagttcgatatgcgggcaagctgaaggattctaatcgacaataggtttttcagtgcttcagaaaggggttgttgattatgaacgagtataatttgctggatgaatcgtggattcccgtactataccgaaacggctgcttcattcgcatcggcatccgcaaagccctcgaagacgcccaccgcattcgaaccatcgccgcaagcaatcccatggaccgcgtcgcaatccttcggttcctactcgccttgctgtattggtgcaagggcaatccaccggatggagcgaacgcaaacactggcgatccgtttccaacggattggttctcgatgcttgatgccaagagagactgctttaacctcctgggtgaggggaagaggttctatcaatacagaaaggctggttctggctcggaaaagaagcttgccgcaaactatttggcacaagaggtgcccaccggcacgaacaaatggcatttccggcatgcgacggacgagaaggatggcttgtgtcccgcatgctgcgccatgggcttgctgcgactcccactattcgcaacatcagggggacgtggcaagccgccaggcgtcaacgcgaaaccgcctctctatgtcataccggtcggcgattcgctcgcaaagaccttgcggctctcgtggaagccaatgcccaatctgggaacaccggcttgggagaagccggaaatggaacttctaaagacgggggagttgcccttactgatgggattcacttggatcccgcgacgggtctggctagataatcccgacaaacccgaaacaccctgcatatcatgcggtcaggtctgccgattgatccgcctcagcgtcttcgctcctatcggaagcaccaaaacgcaggaaggcggtgtaggtcgcttctggcgcgacccacacgttctctattccacttcagccaatgacgaagtaatctcgctgcatgccgccgacgtgcgcgccgctccggacgccgcagcgggacagtgggcaagaatcatcgctggcaatcagaaagtgcggcaagcagatgatcgaatcgggacttggattgttggtttctcgacagtgaacaacgatacgtatttggaggcgaccgaaagccttgtgcgtgacccattcttacccgaacagtcggaggccatcattgccagactggaacgatggcaaaaggaaggatcaaaacttgcccgcaaggcgcgtcccccgaatgagaaggttgcctcgcgaaagcatgtcgaaatccttccaatgctcgatggggttcgtccacatgtcgaaagcaaggtgttcgcggacgtaggcgagttgcttgtgggagacgatgaagcatgggagcaggcggcggctaagtacaggccaatgatgaggatggtagcccgatcgcttgcgcccggcttcacgaccgaggccctacgccgtcgccggaccatacaattcattgtccccaatatgaaacccaaacctgaaccggtcaagaaagatacccggaagaaagggggcgcgagcgaatgacgcctaccgagatgttcatcaaaaccctgacgaacctcaaaaccggcgacctcagcctcctgcgcacgcacgcaggacaaggtctcgatgagtcgctggaaggattcgacctcttcaccggaatctggtggcccttgcgcgagaagaatcaagctgcaccgcgccgttcagtggcatggctgatcgcgaagctctacgcgttctgtcccatccaccaggagcggggatgcgcgctcgccgcgcaattacgccgttgccgacccagcgaacagttctttaagaagtgtgacaggctgctcctgttgccgaacgaccggttggaaccagctcttcaatgggcaatcggaacccttgcttcaaataaattgcggctcgactgggtgcaactaacggacgatttatccatttgggaacgtgaaacaacccgcctcaggtgggcggaacaattactcgaaaacagggaggagaaatagacatgttgatcgaaatccacgccatccaaaaccacagcccggccaacctgaaccgggacgacctcggcgcacccaagacctgctacttcggcggcgtgctgcggtcgcgcatctccagccagtgcatcaagcgcagtatccgaacaagcgagcagttcaaggccttgtgcggcggaatccgtacccggcagttggcaaaattgattgctgaaaaggtaaccggcaaggccgatgtgaagaagcgcgcggcaaagatcctcaaggaatgcggcatcgctccaaaagacgaagacaagagcgacatgctcgtttacacgacgcaagaggcgatccaggagatggcggcgcttctgcaagatggcgacggaaagaccgatgaacaactggcgcaggccttcggcaacctaatcgctgatcggaccgccgtgcctgatatggcactcagcggcagaatgctcgaaaccggtgtcctgaaagacacgaccgtagaggctgcgttgcaggtaggccacgccatttctacgcacgaggcgcgcccggaagtggactactatgtcgccgccgacgacatccccggcgatgacgcgggagcgggttatgtggacgaagcaatgtttgcgtccgcctgtttctacaagtatttctcgatccactgggagacgctggtcgaaaatctgaagggcaacgaggagttggcggcccacacggtcggcgcattcattcgcgcggcggcattggcgaatccgacaggcaagcagaacagtttcgccgcccacaatccgcccgacgcgctcctcatcgagatcaaagataccccggttagctatgccaacgccttcgccaaaccggccgcgcaaggcgaacgcgacatcatcgcgcagagcattgctcaattggcgcagtacgttcacgacctcgatgtcggatatggccagccgcgacagcgattctggttctctcccaatctccgctataccttgagcgccgtgcaggataagaaggagatcgcactttctgaaaacaaccttcgagcgctcgacgaattgattcctgccgtgattgccgcaatcggccatgactgggaggaagtccagaaggttgtcgcaaaccatgaggtggccccatgagcgctaacaccctctttcttcgcctcgaaggtcccttgcaggcatggggcgatcagcagtcgaaattcgtcatccgccggaccgccgaagcgccgaccaagtccggcgtcatcggtatgctctgcgccgcattgggcgtatcgcgcgccgatgcccccgccgagtggctgccgaagctcggcgcgctgcgcatgggagttcgcatcgatgtgccgggcattcgatggtgggactatcacacggtcggcgcgggcatggaaatgcgcattgccgaagcagagggaaagaccaaacccggcgcgatgctcacgcggcgcgaatacctctgcgacgcgtcttttctcgtcgccctgcaaggcgatcccgctctcgttgccgaactggaagcggccctgaaagcacccaagtggacgctctatcttggacggaaatgctgtccgccctcgcgtcccgtgatgcaacatccatccggttcctttgaagatctccgttccgcgctcgcgtccgtgccatggcaagcccgactcaaaggagatacaccgcctaagtgtgtcgagtgtctcgttgactgggaatccacggaggaacaacctgaagcgcccgacgatgccctcgtctggtacgacgtgccgttgacattcgaaccaccggcacatcgcccacgattcgtcattcgcgagcaattgtccgttggcattgatggcgtcctaagcattgccgagacccccgcacaacggtttacaccgccgccgccgcgtcctcgagccgattatggcaacaaggaatacaaggatcgacgtaaagcccgcctcgaacaagaccaccatctctgcgtcttctgcaagtcgcccgcaaccactgttcagcacgtcacctatcgccgtgccggtggagacgagcagatagacgatctgcgttccctctgccgcctgtgccacgacgccgtcaccatgatcgagtacggccttggcatgggcctcgaccgtatcaaccccgaagaacaacgctggcgaaacaagatcatcgagaaacgcgacgaaatcgtcaaattccgttcgctggagacaaggcggcggcgtctcagcccagaggaggtcgaataatgttcctgtcccatctcttgatcgataccggaggcaatcccgaccgcccaagacccggcaggaaatggctccgcaacgtctatcacgtccatcagcgcctgtgcatggcctttccttcaaacatgcgtgtgcaggacgatccggagttcctcaagcccttcaagggagaagatttcccgttgcgcgggaacgcgaacgcggatccgcgcaatccccggcacagtttcctgttccgcatagacaacggcatcgagagcgatgccccgcgcgccatcatcctcgtccagtccgaactgaaacccaattgggactacgccttccacaacgcgcgcgtctttctcgcggccgacccggaaacccgcgaatacaaccccgcctttaccaccggcgacacgctccgttttcgcatccgaatcaacctaagcaagaagattcagtccaatagagaaggtatcgatcttcgaaaaccgcgagtggggatagacgccaaaggacgtcaaaaagatcaaagcaagcgagtggctctcacatggaacgacgatcagaagccggaagacgtaatcgtgccgtggtttgccgagaaaggcgccaaacgaggctttgaagtgaaaggtgcggcccttcttcaacttggctggtcgtcgggatttacggcggaaaaagaaaaggggatgaaattccggtccgccctgctcgaaggcacgcttgccgtggccaatcccgtgctcttttcccaaacgctggcgtcggggattggcgcggcgaaagccttcggattcggactcttgagcgtcgcgccatgcaatgtgaacccgtgacatgcgcacacacgatctgcacgaattgccgaaagtgagagacaaactcggttatctgtacgtcgagcattgtcgcatcgatcaggaagacaaggcgatcgctttgcatgatgaaaccggcgttacctccgttccatgtgcggccctttccctgctcatgctcggacccggcaccagcattacccatgcggccatactcacgctggccgacagtgcctgtcttaccgcatggtgcggcgagcaaggcatccgatactatgcctccggctccggggcgacccgcgacgcgtatgccctgctccggcaagccgccctttgttccgatgatgccgcccggctgaaagtcgtccgaagactttacgaggcccggttcaaagggaaaatcgacccctccctgacgcttcagcaactccgtgggcgtgaaggcgttcgcgttcgcgacgcctatgcccatgccgcgcgggaaacggggattcaatggcaagggcgaaactacgatcgcggcaactggaacgccgccgatcccgtcaatcgagcgctttccgccgccaatgcctgtctctacggtatctgccaggccgccatcattgccgccggttactccacggcgctcggttttatccacacgggaaagcaactttcctttgtttacgacattgccgatctttacaaatgcgacatgaccgttccactcgcttttcatgtcgcggccggccatcccatcaacttggagcgggaagtccgaatacaatgccgcgacgtgttcgcggaacaacgccttcttcaacggatcgttgacgatatcgcccagatcctcgatatcccacctgacgaagatacgcgtttggatgaggatccggccctgcccggcgcactctgggatccccggcaaggatcatgtccgggcggcatacaatacggtgctgatgactccggagatattggacatggtgatcatgattcttgaatccgtctcgccatcccttcgtggacaactcacgcggtggctgctcgaaccaaaatcaggcgtctttgtcggatccatttcggccatggtccgccaaaaactttgggaaaaggtttgcaaggaagcacgagatggcggcgccatcctcatcttttccgccaagaacgaacaaggtttcagaatagacttctggggaaaaacaacccgatggattacaaattgggaaggacttcaactagttaccaaaccaaaatgccaataaattcaatgggtattccccacgcacgtgggggtgaaccggatcgcaagaatgaggcggcgcagcaccgaatgtattccccacgcacgtgggggtgaaccggcggagatggtaagggagaaaataaaagaggggtattccccacgcacgtgggggtgaaccgagcaatgccgcgtatgaacaggccgcgcacaagtattccccacgcacgtgggggtgaaccgatccgccggtggccgcgccaagcgcgaatccg
